United States Patent Application Publication US 2026/0097106 A1 - sequence listing, part 8

SEQ ID NO: 66 - DNA, 40299 bp, Escherichia coli
  source 1..40299: mol_type = genomic DNA
aaatatcgagttcgcacatcttgttgtctgattattgatttttcgcgaaaccatttgatcatatgacaagatgtgtatccaccttaacttaatgatttttaccaaaatcattaggggattcatcagtactttgtttgaatcaacagcagcaagtattgttttgggggtaattgctttcctgagtggtttgggtactcattttgctgccgtgcaatgggcaaatgatattgcagaataattacagataagaagcgaaaagaatgaatatgagatggtttttattatttgtatcgttagtttcagcaggaacatttgcaaaaatagatcctctacaatggaatgtaattgaagagagaggggggagagaatatacaatccataatcataatggtgataagataagttttttatgtgatatgggattcatgtatggttcaccagatagtgcaggtagtttaggcttgttgctaagttcgtcgaataataaaaaagagtataatgctgacaagaataaaatagtattaactatagatggtgagcaatatccttttagcaatcttggatcaatggttggagattcttggtggtatgccttttggcaagatgcagcagattcaaatgctaatatgattgatgcttatgttgataatgaaaaaattgctacattccctctttctgggctaagtaagttgtatcaacaagccaaaatggatggatgtattaaacgaggcaaatgatctttctgtgttaaagattaacgcaatcaataaaacattggttgcgtaatattctattatataaatggaataatatgacaaaaattactaattctaatgagttgaagttactgtataaacagccagtgctcattccatcatacaaagatcacgtagtgatcttgcaaaaacaattaggaatagaaaaacattcttttcaaaatatgacaagattgaatagacaagctgtaattagtaactctcttcgaaaacaattggctagtatgccgaacttggctggaataggcagcaagtatcgtgaacatatcgcgattttacagaaacagactcaggctcttttccctcatgacgcaaatagatatattcatatgctaaggaaacaggccgaaatagctatgccattacgaaaacagcttgaggtgcttaataagcaagctggtttaaataacatgcaagcgatacttaaagaattacaacaaagtgcaagttataaaatagatgtaagccaagacataaagaaagtactagatcactatgctagaacaagaaatgcttcattacatcaaataatagagcaggggatttcatctattgcgcaggcttatgctgaaggtgctactgaaacatcacacaccaaaagtaatgttcaaaacaaaggattaaataaacctagctcaaagtttgttgattcatttaaagagcttccttatccactgcaatggttactaatggttatattttctcaagttgtgtttggtgcttttattgattacggaaaagagaaaaccttgctgggaatacacaaggcagaatcatattttatatctctgtttgaggataaaccaatatcaaaacaacaattaattaaagaaaacaaagaaattagttgggaagatctcaatggttttcgttttataactggtgagaacgtaagattacacgtcagtccttctataaatagtgaggtgattgaatgcattggcaaaaatactatagtggctgttttagataaaaaagatcgccaatggcttttcgtgcaggttaaatcaggggacgagtttgttactggatggattacacgaacatacacaaagcctcttaaggcttgaattttatcaccgtatcttggggctgggtgttgatgacgatgtgctacttgaagtacttgggttttttaacgcagcatctgaaatgtgtagactgaccggtaacaaatgactactcgtagaatcggttaacacaccagattctacgaggtttcaatgacaccacgacaattactcgaagacgtcaaatcccgcttcacacctttgattgcggatgaacctgctttactggaatccctgctaagaaaagcattgggaacctaccaggatagggcggggcacatcaagcggatacgcttcaccgatcaggccagtaaatcacttgcttgcccagctgattttcttgcgctcgtatcggttacagatcacaccggcgatcttgtctactccgatgtttacgatgggaatatcgagcttgaagatactcatcgagcggtatacccgctgaatgtgtcatatctggctaatttacgtgatatggatctggataatggggaagtgccacctgaaatcattgggttactttctgactatctggaagtgttaatcgcgatacctaacacagatcgcctgcgaagaatatctatcgcggggaaactcgatgccagcaatttatccgacgagaacacgctgtatcagcgaaagctggatctggaagagaaaatgagcgcaacaagggcaattatcccgggaattgttcttttctcatccatgttgaagtgagagggctgatatggggtttaatgttgcttcagtaaagtcttatgtatcttcggcattaacgacgacattatttggctccggcgttggtgaacgggaagttggtaagctgacgtcaatcatcatgaacaaaatgctgttcgcgcaaggatggcagttctctgtcgaagttgatggactggagggggcagacttctttgccaaagatattacctaccacgattacagcatcgaatatgaaacgattaaaatcggcggagggaatatccttcaaccaacggagcgttcgccagggcagataacaatgatggtcagggataccgttgatggcctcgttttggactggtttaagacggcaaaaagtcgggtgatcaatccggacggtaccgggaatataccgtctaaatatttgctcaatgtgcgtatttatcggttactgtcctccggcttaaccaaactggaaaatgagatgacggtattcccggtcactaccggcgatgtcacctatgcgcgagatcaggttactgaatttaagtcatttccaatgaccttcgcattgcacagcacgtttaaccaatcctcaagttctttggcttcccttctgggctttagcttttctctttgaattaaggagcaaggatgcttttacctcttttcccgctaccatcgcggccaactgaattgatccagttccgtcagccaaatattgctgatgcgatgcgtttcaactcgataacactggaggaacaagaacaacagacaacggcgtatttaaaagccttgctggctgaacccgcgaaacatgatcccctgacatggacggcgcaggaccggattaccgcgttatggtggatatttaccggctcccgtgaaacaccggtcgagacattcacctatacctgtaaacattgcggtaaagagcattattacgattgcgatatgaatgctctggctgaagatatccaggtcctggaagtggaaccgttcattgacgatattgaggtgtctgtagagggagtgccttatcaatggcgtatcgtgccgcttgatggctgggcaatggaaatgctggagatgcgtcgtgcagcattgccacctgaagacgacgcggaattcaaagaagcgatcgttgatttgcgtttttgggaattcgcttatcagtgtgagctttataacgatgttagcggtactcgtgaagatcaggctgagcgtcgttatgaaacaattaaacggatggccattgatactgaatttatgaagctggcggcacacatccgactggctcatgaaaagctcgaacatggtttaccgtgctacatcgataaaggtgaaatgcgtcttcgtctcccgccgcataaatgcccaaatcaggataaaaaggagtccacagagggtgcatatacccgtctgtgggtgccctttcgggctaccgacttcattccacaggtggggattgaaaagctatcagaccttagtgtccaacctggttttgtatgggggtataccgattcaggacgctgaaaggcttactgaatcctatgcgtttttcctgttggagaaactggaagaaaaacttaaaccgaagcggtaggcgataagatcatggaaagaaaaaacgccaacattgacgatgttataaggacagttgaaaccgccagcgcaaaagagctggaagagcttgctggtatccgggaagctgttgaagatttgaaaggggggcgcgttgcaactgttgatcctgtctctcgcagcgtgtcggcattaaatcgcacaatcgaaaattcccggcctgactttgtggccaaagcgccatcagtagaccctattgttgacgcaatgaaacggcttaatttaggggacgtttctcgtgtagttcaggaagatgttgttcaacaggaacagcgggccaaatcaaccacaccaaagggtaaaaaacgacgcaggaaggctataccagaggatgtaaaggcacaacggaccgaagcagccgaacacgctcgcgaaatgttcggtcaaaaaggcggtgcgcaaaaaagccaaaaccaacgcgatgcgcgtggtcgttttattggaaagtcagggagtaagaccgcagcggaagatgcccgtgctgaacgagcagaaaaggccaggcgaaaagaggatgatgagcgtctaaatgctgaatcaggtttattaaaaaaactgtcaaaagtagctgaaggcataggtaacccttcagagactcgtgccgtcgatgcgttaggttatgccgttgctggtccattatgggcagcagggaaggagcttggcgggatatcaaaagaagttggtggatcgcttaatggtgccagaaagtctattgccgatgtgattcgtggcaatgacgataacagccgtagaaaaggtttttttaggcgtaaatcgcaaaatagtgccgatgtcgttcaggttaacacccaaaaacggacggttcaggaacttcaggagcagaccagcgaaattaaagagggcaatgacaagattctcagcgcccttgatcagatagccaaaaacaccgggaaaaagaagggcggcttgctgtccaaactatttagcttgttagggaagggggccggtggcgtcgcgtcgttgttaatggggcgtggcatgctgaaaaaagctggagcactcgcttttggcgctctgggggcaaagaaacttgtaggaatgctacgcggtggtggcaagaagactctcgcccatgaaggcggagatttggctgcccgggcagcaggtaaacttggattaaaggcagttggtaaaggggcgttacgcgcaattcccctagtcggcacagtggctggaggtatttatgatgcggtaaccggttggaatgatacagaagcgcaacgtcgagcgtttgggcttaaatcaggacaagatccatcattccagcaaaaagccgcttatacgttagctaatgttcttgatatggggggactggtatctggtattagcagcgccattggtgaggttctcaaatcacttggatttgaggatatcggcaatatgttgcaatcattttcgacggaaagtattgcccaggccattgatagtgggattaccaacttagaaacatatattgctaaccttggcgacaccatttctaccaagttcgatgattacacagcaaagattggtgatgctgtttcagcatggtttagcgatacatctaataagctgcttgaaaagctggatgccatcaaagacttctttactgtcgataacctgaaacaggttttcagtgatgcaattgatagtgcaattgatttcattaagaaccctgggaaacacattaaagaggcggctggtaatatttgggatggggttaaaaatttaccaggtaaagcattagatgcagcggttgatgccgttaaaaatacccctgcggcaatgattgtatcaaaaatacccaatccgatcggcgaggctaatgcgaaagaaatcactccagagttaaaagctccggttaatagccaccaggagacgtctgattctaaaactgaatccgatgccaaacagagtaatattgctacccgcgtgataaatgcggcactggacacagcgaaagatagcaataaaacagttaaacaaactgccaatcagattatcaatgcaaatgccgtagaaacgggcaatagcgcgttgcagaaaattgataaagctattggtcaaaatagctcgtcatcatcgtcgcttaatactactggcactaggaatgacattcagaaagctgcggatacctacaacaatggcaacttagatgtaaaagtcggaagccttggcgctgaaggtaaggcaaatctcgataagttggctccgtattttgctgaactagagaataaatatggccttcctgaaggcactctttactcgattgctgcaactgaatcaggaggggatcctaacgcaaagtctccgcttacaagatcaccagatggaaagttaagtggtggcgcactcgggatgttccagttcacgagtattgctcgtaaagagacagggatatcggaacaggatgcatttgatcctgtgaaatcggcagaagctgcggctcttcttatgagcaagtatctgaagcaagccaatggagacttaaacgaggccatcactgcatataacgctgggtttggcactatcaataagtggaaaaaaggcactggtgacttatcgaaagaaaaccgtgagtacgcgatcaaggtcaatactcatcgtgctcgctatttaggtggtgaaatctatacacctggggcaggagcacagggtggggcgcaatatggagtgaggggaccactgcctgataacgctgttatcgatcagtctactggtctggcgtttacccctggtgatagcccgtttgagaaaggcggtctggtagacaaaatcggcaatgctgttggcgttaacgatctggtcaacaaattcatgaatggccgggggatgcgtcgggaagtcgttcagggaaccctcgaagaacgcgcacgaggaagggggacagcaacggcagctggcaatgtgtatgttgatacacctatgccagttgaagaggcacgtccggtggccaacaactcaagttactttgaccagctcggcgcacaaatggggattgatggactgtatgacaaactcattaatgcccggggaatgcgctcaaataattctcctcaaccagcctccacgtcccaggtgacgactgccgccaacgatttgcagcaaccaaccggtcgtatgcagatagacggacaggttattagtgaccttggcggctccggtgccaagccgacaatgcagttggctgataataccgtttcacttgatggtgaaacgaagcggctgtttgcgcagatgacctcattgcttgccaggattgaagagcacactaaagactcggcgaaaggccagggaactgtcgtaaaggtcagcacgcctcaaccgggcgttatgcgcacggtgccactgtcaattgatgatccgttgatgaatgactacgcgagagttgattgatggccaacaataatgaaattgatcctttactgacgctggagttatccggcgtaaaaacgtatgagtcccaggaggaggcctggggcgctcgtttatatgagtggctaaacacttatcagggtgaggtatacggagatccgtcatggggcaatgttttaccgcagtttaaacacgaaccgaccaacttgtcgcatgttcaaattgcggttgaggcaatgctgttgcaaaaactgacggtagatttacctgacataccgatttctggcttgtcagtagccgagggagatgcttttgataagttgaaaatatccattcgtatcagggatataactatcacacaggacgtggtgctatgagtaaaacaacaccgactaaagacagtattcgtgcagagtttgaagagcttgtcgagaaagattcattctggtcgaagtttgtcggctctcaatttgtctcgatgctgacattgtttattacccagattgtctacaggtgctttcagtatgccgatgcggcgctggctgaaggctttatatcgaccgcgacgcggcgttcctctatcctggcagcggcagaaacgaatagttacgttggtaccaagccaacaccgtcatcggggatgattgagatcaccgccacaagtgaagatgccccagcggtaatccccaaaaacatgcctttaatatctgacgaccagtacccttacatgactatggatgtatgcaggttggttgacggcaccggtacggtagaagtggcacagttggaaatccaggaggtgacatataccgttacggcagccaaagaatttctggaagtcgtgttatcaaaggctctcactgctgtctgctataagctggaagtattcgtgacgaccgatggtaagaccacgcagtggtcttccagcactatgttccggttagccggtagtaaaagccaggtctacgttgagttttataaaccatccgagcagttgggggttcgattcggcgatgggctaattgggcaaataccgccagaaggctcgacaattacgcttaaggtatggtgcaccaacggcgatataaccctggttgctggccaaaacctgacgcctgtcgattctgcggctaatttagctaatttgatttcagttaagacaacgacacctataaccgcaggtaccgatgccgaaacaacggagatcacacgtaaccgtgcacaatattaccttgcctatgatgatcaggtcgtatggggcggggactatacgtattttctggtgcgtaacatcccgggactgtcctgggtaaaggcatggggcgagggtcagcaagaaaaattagatggtgcttataatgttcagaatatcaataagatatttatttcaggatggcatccaaacaaaagccagtcagagcttgaagaaatgatcttggctgcctttaagaaggtgccgaatgagttgaacaagaaattctcgtataaagaggtcagaaaactaccctttaagatcaccatcaccgggcggatatcggcaagcctgaccattgagaacgtgactgatgagctgaagtcggcactggaaacaaaatttgggcgtgactcaactttctttgatccgaaccgtgtcggcaagtacatcctaatcaagaaaaaagacgtttgggcatttatcgaaacgctgggttatttccgcgacttttatctggaatttgtcgagtggaatgagtccaacggcttttacgatttcgtttatctggatacagaaaactccacctttaatatttcgtatgaggaggagtgatgcagcgttcctggtttaataaccggcttacatcagctaagcaaaagtcattgctctataaatcattggctgatttggttcagtcaatgatggatacctttgttgacccatggttggagcgaattaccaaccgaaagtctattttttccatgagcaaggaggatctggagaccaggacaaatgaacttggccagttctttactatcagaacgtcgaactcatcttccgttccgatgttgttacaacagcgtcttgatgagattcactttaaggggactgaacgccctataaaccagacaatttaccgcgaatttaacggtatttctgttttatgggatccgatatatgcaccggtggaccttgagcgtcatccctatggcacggttctaataccagaaagcacactggagactaccggcggcacattcggcgagatgtttctgacttccagagggatgatcagtattcccataaacgacctggcccggacaatggggattactggcacgatagatcagtccgcaattacagaagaaattctcagaaagtttaatcagttcgtaaagcctctactgccactgcatatagtgtttgatgggcttacgctctatttgtcggttgttgtaaatgaacaggccgacatgatcactttgaacgagatttctgataccgaaaaagcattctgctggtttgaaacttcggatacaacttcgcttactggagttacgtcgattagcgccccgatcaccgcaacgcctggtggcactattgtgaaagcgacacctacgtttgatcgcacacgcgcagatgatttgttgctggatagcgacgcctgacaatcaccccgtccgcagggcggggtgacaagttacttctcttacaatgaggcttcacaacattgattagggaaaatcatgtctgacgtctcaacaaacctctataagagtcagttgttggactattactatcagcggcgcgctgaatcgtccattaacaaaggctctcgatttttaatcagcaaggccgttttcggtaccagttcactggttactaagaaaggagatggcacttatgagattggagaactgccaaaggctttcgatctggcagaactgaccagtcaattttgcaccatcaacctcgtcccaacctactcaggcgggataattactgtccgaatggaccttgatcaaagccagttgcaggaagggaaaaactacccattcaacactctggttgttctggataacgagaacaagccaatcgccattatttgtgtccaggaagactcgttgtatgtgggcaaaacatataccgcagttatggccataaacacgacaacagcataaggatatgcttgatgaatgacgttacagttgttacatcagttacttacccatcacccgagtcgttggctctggtggctgatgtgcaataccacgaaccatatctgtcagccgcgctaaaccgaaaattcagggggattgttgacccgggattttatgccggtttcttacctaagcctggcggtgggatgaacctgttaatcacctcagtggatggtgataaaaccgcaggcgcggcgtcggtggatattggtgaattctaccaggtaactattcagcaacgtaaggatatttctcttgcacttagtgcaggcaagaaatatgcaattgtgctgaagggaagatacctccttggagaagatacctatcaggtgaataccgcgtcacatattcatgcggctgaatttgttgccagaacctataccgattcatatcagttaggagatggagagctgcttgtttgtacggtgaatatccctgctggcgtatcagccattacccaggagatgattgatacatccgagcgtattaaccgcacgatcggcattgatatttcagactctgtaaccagtagcagaagtgatgttgctgcaagttcgctggcagttaaaaaagcctacgatctggcgaaaagcaagtatacggcgcaggatgcaagcacaacgcaaaagggattagttcagctcagtagcgaaactaacagcgacagcgaaacaatggcggctacccctaaagccgttaagtctgtaaaagatcttgctgataccaaagcgccaatagaaagcccgagtctgacaggaacgccaagcgcgccgacggcagcgcaaggtacaaacagcacgcagatagcaaatacagcctttgttaaggcagctataactgcacttatcaacggtgcacctggcacactggatacacttaaagaaatagctgctgcgatcaataacgacccgaatttcagcacaactgtcaacaatgctctggcccttaaagcgcctttagcaagtcctgcattaacgggaatacctactgcgcctaccgctgcacagggtacgaataacacgcagattgctacgaccgcttatgtaagagctgccatatccgcactggtcggctcatcacctgaagctcttgataccctgaatgagcttgcagcagcactgggcaatgacccgaactttgcgacaacaatgacaaatgcgctggcagggaaacagccacttgatgcaactttaaccgcgcttgctggtcttgcgacaggcgcaaataaattgccgtactttaccggtacagacactgtttctcagactgacttaacgtcagtcggtcgcgatattctggccaaaacaagcgttcttgctgttatccaataccttggtttaagagaactcggtaccagcggtgaaaagatccccctgttgagcacggctaacacatggagtgcgcgccagattttcaacggagggatcaccggggcactgacagggaacgccgacaccgcgacgaaattgaaaacagcacgcactattggcggtgtggcatttgatggtactgcgaatattaatttacctggtgttaacgttgcgggtaatcagaatacatccggtaacgcggctacagcgaccaagttgcagacagcatgtactatcaacggcgtctcgtttgatggttctaaaaatattgagctaacggcggaagatttaaatctacaggaatttattaataaagcaaataatgccgttcagcgttcaggcgatatcttgtccggcggacttacttttgaaaacgactcaatccttgcctggattcgaaatactgactgggcaaagattggatttaaaaatgatgccgacagcgacacagattcatacatgtggtttgaaacaggcgacaacggcaatgaatatttcaaatggagaagcaaacaaagcaccacaacaaaagacctgatgaatcttaaatgggatgctttgtctgttcttgttaaagcccttttcagcagtgaagtaaaaatatcgacagtcaatgcactgaggatatttaattcatcttttggtgccatttttcgccgttctgaagaatgcctgcatatcatccctacacgagagaatgagggggaaaatggtgatatagggccactacgtccctttacgcttaatctcagaactggccgcataactatggggcatggtctggatgttacaggagatataacaactaacgcctgggtgtatgcaaacaggtttgctattaatagtggctcaacctcatggattgatatgcgaaaccagaatgtcatttttggtagaaacgcagtatcaacaagttctgcgcaggctttgttaagacaagaccatgcagaacgcaaattttttgtcggtggacttggtaactaccagtttggtttttacatgattaataactcaaggacagccaatggcaccgatggtcaggcgtacatggataataacggtaactggctttgtggctcgcaagttattcctggcaactatggcaattttgattccagatatgtgagagatgttcgcctgggtacgcgagttgttcaattgatggcgcgtggtggtcgttatgaaaaagccggacacgcaattaccggattaagaatcattggtgaagtagatggcgatgatgaagccatcttcaggccaatacaaaaatacatcaatggcacatggtataacgtcgcacaggtgtaaatgatgcagcatttaaaaaatattaagtctggaaatcctaaaacgaaagaacaatatcagctaacaaagaattttgatgttatctggttatggtccgaagacgataaaaactggtatgaggaagtgaaaaactttcagccagacacaataaagattgtttacgatgcaaataatattattgtcgccatcactaaagatgcctccacgcttaaccctgaaggttttagcgtcgttgaggttcctgatattacagccaaccgccgcgctgatgattcaggaaagtggatgtttaaggatggagctgtagttaaacggatttatacggcagacgaacagcaacaacaggccgaatcacaaaaggccgcattgctttccgaagctgaatcagtcatccagccgctggaacgcgctgtcaggctgaatatggcaacagacgaggaacgcacacgactggaagcatgggaacgctacagtgttctggtcagccgtgtggatacggcaaatcctgaatggccacaaaagcctgaataaaaattaaggcccgctatcgggccttgtctcattcaggttgttcgggaaatgttactggcaggctggaggtgtctgtagattcgactttctgcgcatagagcatccactcagttaatttttgtttattctcgtcggaaatgatgcccagccgtagcagtgagtcccatagctgggttttatccctgacaagttgcaacaggctttgtttttcattctctgcctgctgcctttgttcctcctcggtataagttcgctttatcactacgccatctttgaacatccatttacccgaaatatcagcccggcgatttgctgtaatatcaggaacctcaacgacgcttgcgccttctggattaattgctgaaacatccttttcaatacaaataataacgtcgttgtggtcatagaccattttcaacgtatcaggctgaaagttcttttgttcctcataccagtttttcccatcctctgtataaagccatttgatgttaaattgtttcgttagctggtattgctcttttgttttagggttgccagcagtaatgttttttaagtgcatcatcgttaaatactccccgcgttataccacgtcccattaatgcaatactgaattggccttgcctgagttgtatcaattaattcatcacggtttccgttaactgaacctgtaacgacataacctgacctgtcagaccagccgggaccattccatgtctgaacagatgacagaccgcccaggcgaatacctgtaataaaccttgagttacattctgcctgcgtatatgcaccaacatcccccgcagagggtttgcgggttgtggtgtaaaactctgaccagttagcttcaaagccataaccatcacgcgctgaacgataaaagataccgccgttcttataattcacgcggaactgtacagcagggcaactccccgcattcatattgaagtggaggattaatgtcgatgcgccactgatatctgcatcataaacgccgctattccagttccagccaacagctttatcatttgcaaccctgcttcctgtttgccctaaagcaaatgcaggctgctggtttttcgtgttgtagtctcttcgccagccaggagcataagcatcaccatgattaatataagtgaattgagcgttagtaattccgccaccgctggacgtgctcggcgtagtaacgcgtatggtcattgcgccgcgagtgccaataacttccaccacagcacctgcaagacaaatatttccgcaacctgtatctgtaatgaccttattatttgcataagcccatgagcctttgcacatccagtaaggatggttaaatgctccctgactctccagccacgaaataaattgcgcggttgtccagacctgactatcgccaccaatattcagccatgcgctatatgcgcggcaggcaccaatatttttggtgaaggtatcttttcccggaatatctgcgccgttctggtttttctgtaatgctcctgcggctaattctacagtttgctcaagatttaaatctgccgccgttagctcaatatttttagaaccgtcaaacgagacaccgttgatagtacacgccgtctgcaatttggtcgctgtagccgcattaccagaggtgtcctgattccctttggtattaacgccgggaacggaatcttttgacgtatagatctgtgcccattcggaccatgccgcagcagtgctatctcttttggatcgaatgaaagctggtgcatgagcgccatttgtgccactccagccaatgagcaactcgccttcaccagtggatgcagctcccttcaggtgaagtacattcccgtaagtcgtcggataaccattgttgtatgcctcatacatctgcaatccagtagcagcaccttgcgttgtaccggtaagcgcagtaacgcgtcctctagacgtaattgttggtttaagagaactcggtaccagtggtgaaaagatccccctgttgagcacggctaacacatggagtgcacgccagacttttaacggcgggatcaccggggcgctgacagggaacgccgacaccgcgacgaaattaaaaacagccataaacattaatggcgtcagattcgatggttctacgaacatttcgataccaaggtttaggattgaaatgacgacgccggaaacttcttataaagcgtggaaacagccacatcatagatgattgcaacctgcttacgggggatgccattctccagcaatcgccgcatttgctgccatgtttcttcttggtatttaggccgacgcccacctatacgaccttctgcgcgagctgcatcaagtccagcgcgtgtacgttcaacgataagctcacgttccatttctgccagcgcccccattacgtgaaagaaaaagcgccccattggtgtactggtgtcgatagagtcagtgagactccggaaattaattcctctgtcacgcagctcttccaccagcacaaccaagtgacgcatgctgcgcccaagacgatctaacttccatacgaccagggtgtcacctctggaaagcatacgcaaaaccttttttagcccagggcgttcagtctgtttgccgctcgccttatcctcaaaaattagctcacatcctgcgctttcaagggcatttcgttgcaaagcagtgttttgttcatttgttgatacgcgtacatagccgatcagcatgatttttactctaatgcgttgttcttatgagtctgcgaattttaaagaacaaagcgttatgcacagaaataacaatctgaataggttcctgcttgatttttgttagatccgggaggagcttatgcagattttgatttttttaatgtccattattagtggaacctatttatttcttactggagttaggcgtggagcttataagccatgttttttacattggcttgaagcatggctgcttgccataaaaggtggttttgttggtttttgtcttgcagaagttcagtggggaaactcatttttggatgtggttgcttttttgatatgtagttggaatagccattttgtattaagaataaccaaaatatgggtttttcacttgatttacgaatgtattggcaaattatgaacaaccagatgagaagttactttgcataccattacctcctgacaacgtaggagggaacttgtgcttgacacacaggaattagctccagttgctattgcgctcctgctttcagtaattggtgggataggcacgttcctgatggatgtccgagacggtcgccagtctggcaatttgttgggattggttacggagatctttgttgcagtgacagctggcgcggtggcgtacctattggggcaacacgagggctgggagttatcaattacgtacttaatggtaacgatagccagcaataacggtcatgaggtgatttcagggatgaaacgagtgaatatcgatagcattctgaatgttcttacaagtttggtgaaaaagggaggcgggaaatgattggctggggtgtatgcgttcttgcgttagccttagccgatcgctatttgctaaaacgcaaggacatcacgcatttagaacttggtgatgtggaaattaaaccgggtttcatccgggtgccgttcaaataccggtctaaattcccgtttttgcgcggcgcaacggtcagatattggatccgcgatgttcagaagccaacgacagtgattgaaggcgaacaacgttgtctgacgtcggctgaacagggcgaaaacagtgaatggttgtacatacccactgaatatatgggtaaaggagaacggctgtggcatttcaacgtcatggttacgcatggcgactcgttcattaacccgttgtatcggattttccctgttactcagcaaatccgcagaagttacgtaataaatctcgcacaggatgtgtcagatgacgaaaaataagtatgcaacggtcgattttgaccaggttaatgaaaaggggctgaaatcccttatcgcggcgatcaataaaaccggtgttacggtaattgaggttgactccagcaaccgcgcaacaacgaaagatggcgttaaagttaaaaccgcaaagctggttcttaacgacggacaaattcttgccatacaggtaaacgatactggcgatatatcgtctgtgaggctgaatggaaaagctattcctaacgctcagtcgccggatatcaagacgcttggtaccgtcatggggcaagcggcccgcaaaaactccgcaaaattccagaaatcactgatcgccaaagcgaaacgtgttgccaatccggtagacaagaaaccggcagtaaaatccaactttcagcgcctgcaagaggcaaaacagcggaatgctcaggtggttgccgcttataaatcagcgcagaactcggtgtctttcaatcaacagcagatcactgatttgcgggcgaagctggataaggagacaggccgactcaataacgaaaaggcccgaaatggcgaactcaaacgccgtcttaagcaactgaaagcaggaaattaacatggaacagttcaatatcaataaaggggtgacgatcaagcctgggcttgacgtgcttcccccgccagtgactgatgatgaatatcgcgcattaatggccggtgaggaccgctatctgatgacggaatccaacaccctggaggaaatcgaggctacgttcttctatgacacgccgatccactggtgtgctacggatttactggaggcgattagttctactcgtttgcagctacaccggaccatgcaggcatttgtccgggcattgaaccagaagctgaatggtaccggaatctctgcggggagtgataaaacgggggatgtggcccagaacggtgcacgcgcgatcggcggggctgaaattggccgggcacgtaacgttaacgggctgccggtcctgccagccattattccgctcagtgatggtcagactatcagcattctgtttcatagcccgacagcggaaaaccggatcaccaatagcgatacgctgattgctttccagttcttactgaataaaaaagacgttactcataccgttgctccgatgagtggacgtgatatgacgctggcgcaggtcaccatgaaacttgccaaccttgcagagaaaaactcggcaaaattccagcgtgcgcagaagaagaaaaaagccctggttgatgaaataacccaactacaggctgacagtgaccagaaagaggatgccatgagcgacctcgcggatcaggtggcagcggtagaagggcagaaggtagatctggagcagaaaattaacgctgttgcatcggaagcggattctctttatgaagagaatgagcgtttgcagacggagattgatcagctcaatcgaactggtgggcgcgaaaccattgctcctgcggggatgactggtggacactctcgcgcgatgacggatcgccttgcaagtatcaaaaatcgtatgcatatgaacggggaagtgacgctcagtaatggtgcatcaatgaagcaattcattgaggacggtgaagggtatatccagttaaccgattcggatggcagcgtgtacatgatcaaggctaaatccatacagggtgtggacatggcagatgcgatcggcaagctgtttaaagcctataaagcgggtaatgtatcggaatacctggtccaaccagaagaacataaaccggaaaacgtcgaacctgaaccagcggaggataccggtagctcttcgcctgaaccagaagtctctgtaggtgcatatcgatatgccctgcaaatgcgtccggcggcccctggcgcaatacctgaaggtaacaaagcaattctgccgcgccctgatgaaggtgacccgtattatgaatatgcacgctacggcattgctacttacgataccccgctttctgatcagcaaatgagtgagtacgacctgaagttattgcctcgcgaggattctttcgacttcctggcgaagacacttactaatggtccgtttggcaaatatgcacaaaaagctctggagctggccaccagctcaccagacgagttccgcgtaatgctgaaaactcagtttcaaaaaactttccccaatattgcgtttccggggggcgctggcaccgagaaaatggtgcagagcatgatcaatgcattgcaggccgaagtcggtgagattactcagccagaacctgccccggcacagcctgatgaaacggttagcgaagcagatgcagaggctaataaagccattgaatatctcaataacgtgatggatatgcaaagcactgacatggcggagatccgtaacgcccggggtaatgtccgggaagcgattgcagcccttcaggctgccgggcgttttgaggaaaacgaagagctggttaatggcgctgctcgccacctggctgatctgctggtagcaatccagaaagcgggggtagcggcatgacactatcagctattgagttaatggatctcagcgataagttggatgctctgatgtccaaagcggctaccgcgagtggcatggagttgctggatatcagcgatgaaattgaccagatcatgcaacagatggggtacggtgtgtccggcggcagtagtggcgaggaaaaacaaccttcggtacatgatggtgtgccaaaactggttgctgatttcctggctgataaattcgtcgatcagagcaccgatgcatttatcggtaccttgcaggatttgagtcaatatgttggcacatacatcgacctggaccaggttaaacagcacacggcggcatggatagccgccaacattaaagaggcagcataaggcgtaacagggatgagcttaagcgatcaggtggtaatggccaccagcatagaaacgctgatcgagctgctaaagaacctgcccgattatgggcgggtttcgtatgtggtgacagcgaagggagacgaggtaaaaacagcgtttgatatcgtcgatgcctcagttcttttggtatccaatactctggatgggaaaattaatccagactatccccaggaacttcagccgcgcgaccggacccgcgcatccagccttcttcaggtcaaccagatatccaaggatttgcgtcctgcccagcttaccgattccggtttatccagccatggcgcgccaataattggtgaggacaatgccgttgagtcaggtaatgggcggaccatggggatcattaaagcctatcaggacggtaatgcggatcggtatcgggagtacctgattgaacatgcgaccgaattcggcatacggcctgaaaaggttgaatcaatgacggctccggtactggtgcgccgccggttaacgaaggttgaccgtgttcagtttgccaaggactcaaatatttctgatctccaggaaatggcagccagtgaaaaggcttttgttgatgccgacagcataacaccggcgatgatggcgttgtttaacccgtcagaaagtggagatctgcttagccgcagtaatgacgcgtttattcgcggatttatgacgcaagttggtgccacacaggcggctggccttgtaactgaagatgggcgaccaacacggcaacttgtagaccgtatacaaaacgcgatctttgccaaggcatataaggatgcgcgcttggtaaggatggttgcagaagaacctgatccggatatgcgtaatgttctgacggcgcttaatgcggcagccaatgattttgtccagatgcaggctttatcaggagaagcgcacaagcaggctgtgacaactattgttgatggcattgagacagcggatagcctcgataaaaaggcgctggaggcattgaaagatgcggtagacctggtaaggcaatcgaaggagtcaggccagcatattaccgatgttattgctcagggggatatgttcagcgaaacggccccggaagtgaaagcactcgcgttgttcatcgtcgcgaataaccgtagcgcgaagcgtatggccaccgcctttaagttgatggctcaacgtatcaatgatgagttacagcaccagggccaggcgctgggggatatgtttggcggcggcgatgtgtcgttacaggatatccttcgccaggtgtctcaggaactggaaaacgaaggcatgcaagggatatccggcggtcttttcgagtccgtttccggcggtagttacaacggtgttgctccgtataccagtttgctattacatcgggcatccggcatcaaagacattattcatctgatcaggctgctttcccgcacagatccccaggatgaacagcttgtacaagtgcttgcgcattttgttcgaatgcctgttgccgacgtgaaaaaatggtgccgattattcggtatcagcaattcgttacttcgcggattgttaaatcacgcatcctcccttgggcgcgacggctttgatgagatagcgcaggcgataaaaaacggagatatgccaccagctattgactggttttccattcgcccaaccagagtgaaagcattccttagcgcggcgcaatcagcatcaccattggcagaaatggttcagaggttatcgctcatattcacagaccataccgcgttgggtgatctgactctggacgagatgaaagaagcctccattcagtgggccgatcaacaaaatgaggttaactcagacttcttgccagcattcaggaaggccgttagtaaagcggatgatgcccgtggaattctgaaggcatttaaggcattgcaaagtcgtgttaataaacatgtcggtgatatcgatggggtaacggcggaaggccgggatatccttaaagagcacggcataacgccagagtttattgatgagatcaggactgatatgcagcgtgaggtcgtatcgtccctgcaaatcgtagccagagcgttggcggatgctaatccgaagagtgcggccattgttaaccgggttattggtgatattgaagcatcggagggcatgggggcgctgaaactcttcctttcgcgagcgtttaatcctaacggcaatattctccctggcattattggtgaggctaaaaagtatgtcagtgaagaagaacttgagcagcttgaccaactacttaagcgattctcatataacccgcagacacgctggcaaatgaatcagcgaagtatgggttcggtccacgagaaagtgttatctgccatgaacagtgcgatcgcaaactcatccgtatctgaagaaaaagctcttgagtgggccgactcttttatcacagaagaagtggaagaagtccgcgctggacagaatggtgggatagacctgcgcaaggaacttgctgatatttatcgcctgaccggcgggaaaatatcgaccttatcaaaggtagttcaccaccagggaagggcatatgcaaatcttaatggtgttgttgctgtcaatttgaacgatgaaaatgcaagtgcactgtggcacgagctgggtcatcatcttgagtacagtaaccctggtttgttagagaaagccaggtcattcctgaaggccaatgttgaaggggataagccatctttcgtcaatatcggtgggcgtggcaagcctgaatggtgcttcagatctcgattgagtaatatttatatggcgaaggtatacccgccagcctcagtaagtaacaccgggaaaattcggcagaaatcaccgactatttccaaaacgtcagcaacggaagtattctctatggctcttcagttgtatcatgacaaagaggccgctgccgcatcactgatgaatggtgacggattgctggaactgttattaggtgtggcaaaggagctaaataatgcagattaaaatcgcagcgccattaggcggagatgccattatcgaatttgatgataatgaagaagtttccgggcgtttaagcattatctccggtgacattaccgaggacatgatcgctgaagccatagctggggcaaatcccaatagctatatgggattcgttaacacccttgatgctcccgcaagtgatgttctccgaacgctgcatctttacgctggctggtttgttgattggccagcagtagagggtggcgatgaggacgacgacgatgatttgggtgatcatgtggatcagtttgtatattagatactaacagatcgtctatgtggctagaatcgttcgagtttagcgattaacggaagttctggtcgattatgattagtgcatattcatgcacaggcacacaaaatctggagatattgatcagcgtttatgtatagtttgtaatataaaaatcgccttgaacggagtttgtgcgttatgagaatcaatcttaactctggagtaagatagtggacgctttgtctgaggttttcgttaataattggcttcctggtatctgcacattttttttaggtatcttttattctaatattgttgaaaaaaagaaacttaaacagaagttaaagaatgatattcttgagatattcattcctgtatttaacgccggaaatgaaatctccattgaaattgctgagaatgcttacaggaatatgaatggtacgtttcagttgtacaagagaatatatccaggtatgttcaacaaagaagcagagcgtgagctagaccgactactaaaagacggtttcctcataaatggagaggttaataagcattactttgaaccaactaatattgagagcctgattaaaagattataactcatttaccacagttaaaaccccgcttcattgcggggtttgcatcatgcgccaataaaagctatttattctgcgtcaagttgtaacatctaatccactattatatatcgttatgtttggcatataacagataattaaatgaattatatccagatctaattttatgcggttctggaacccggctacgtactatataatagaaaaaaatcagagtctatcaaaaatagagccttttctcggtacaaatattttctcatacagtcgagtagcgtaatcatctgtcatgcctgaaacatagtcgcaaatgacgcgcatttttttatcatcaccttttgcttcctcttgattatatttctttcgagtttctgtcgggagaaaacgtattgggtcatttgccagtacattgaatagttccacaatcagtttctgacctttgaactctaatagttggacgttttcgtgctgaataactttgttcctaaccagctcaaaaatggctttacgtaactcttctaccgcggcaggaagtgccactttatagcgtaaaattttacttttgaaatcagagttctgcacttcaagcttaacgctagtgatcatcagatgaacaagtgtccctatgcactccttgcgtagataactttcgccgaacagtttttcagctacatcatcggcttttagattaaacgagtcgcattggcaagctgcaaataaatgggatttgtcctcgaagtgctcctcccacatttttttgtcgatcatcttcagagaaattgcgtcttcaagatcatggagtgagtaggatatctcatcagccaagtccataatcgttgtatccagtgctttatatattgtttccttgtgcttattcaacgcggtagtttttaccgttttgaataacttaacatcatcactatcaaaaggttggagtgcgaatctaacagtgttctcctcagagtccaggtaacatttcgggggcttaaattcggatgatttaaacaaccactcattgcttcttggctgtaactggctgtaagccctctcattgacgacctctgaatagcttgctggatatttcagtacgcctaaaataagtctacgggtgggatccagcccattggtttcggtgtacttatccagtttggagagtatacgcagtgtctgcccgttaccttcaaagccgccataggatctcatgcagtagtttagtgcgacctcaccaccatgaccgaaggggggatgtcctatatcatgagcaaggcagatagcctgcatcaggcttgggtcaggtaagaatttacccccctcatctgtatcgcgcttagacaactgagacaagataccgccgccaatttgcgctacttccatagagtgagttagacgcgtacggtagaaatcgctttcgcccaatcccaacacctgcgtcttcgattgtaatctcctaaaagcggaagagtggattaaccgggaaagatcacgttcatactccgaccttatctcattcgggcgggtggtattgtacccttgacgctcataccaagtattttctttgcagtgtgtcatacgtgttcctttgggcaggatagagcaagtcgcctgcttaattgctgaagaaagaaatacaaatttgtaacgctgtggatcttctttatgcgtccacaatcagtaaatattggatacttgcaaggtgcgcgaaacactaaagattgtcaattaataattaacacctcttatagttactagaaataaaaatcccctgtattaacaggggcctgtgtatgaactatttacaaataactcacaagttaactctaaaacggaatatcgtcgtcaaagtccattggaggttcgttattggcgctgctctgaggtttgccgccaccgctgtattgctggtggttttgaggttggtttgattgcccccagccatttgaggactgtgaatcgtcgcggcgggcgccgatcatttgcatagttccgccctggctgacgataatttccgtcgtgtaacgttctacaccggcgtcatctgtccacttacgggttttaagtttcccttcgatgtagacctgagaaccttttcgtaaatactcactcgcaatttcagcaagtttcccgaacaaaacgactctatgccattctgtttgctctttctgttggcccgtttgcttgtcgcgccatgattcattcgttgcgatgctgagtcttccgaccgctccgccatttggtatatacctgatctccgggtcttgccccagggtaccaatcaggatgactttgtttacaccgcgttgtgccacttatcttacctaataaaataaattaattagagcaataatgtatatctttgaaacgtagctaacaagtgatttgcattatcctgtgccttctaaagggatcgagtcagtcggtattggctgtgaatgggtgtttgtcctggagcgtaaaaaattcgcttatgaggtctttatgaagggaaaaacagccgcaggaggcggtgcaatttgcgctatcgcggtgatgattaccatcgtgatgggtaatggcaatgtgcgaaccaaccaggcggggcttgagcttatcggaaacgctgaaggttgccgacgtgatccatacatgtgcccggcgggggtgtggactgacgggattggcaatacccacggagttacaccgggtgttcgaaaaaacgaccagcaaatcgccgctgattgggaaaagaatatcctgatcgctgaacgctgtattaatcagcacttccggggcaaagacatgcccgataatgccttcagcgcaatgacaagcgcggcattcaatatgggatgcaatagtttacggacctactacagcaaagcgcgaggcatgcgagtcgaaacgtccatccacaagtgggcgcagaaaggggaatgggtgaatatgtgtaaccatctccctgatttcgtgaacagtaacggcgtgcccttgcgaggtttaaagattcgccgtgaaaaagaacgccagctttgcctgacggggctggtcaatgaataaactcaggcagctccgccgactttcgacaatgaagttatcgctggcggcgatagttttcgactcgattttcatggcggtatatgtgctcaatgagacgtggccactggaaccgctattgtatgccgggcttcggctgtgcctgacatttttgagcatggccgcgagattgatgcagcagaaagaaacagcttcagattgtccaggccgcgcggtgcgcaaatatatggcacgcaggcgaaggtgataatagttaacgagaaccccggcagctgccggggttatttttggtggttatttgaacggattgattgaattattaaacgtgatgatgcttgtctcacgcggtgcctggacgttagccgcttgcggaacctccttaattttcctggtgacaggcaagttgcgtgcgccaactttgatcagagattcgaaaagtgtggcaacgatttttgcatcaccaggttctttgaggcggaatgcgtctttttgggcggcggagacgaagatcgggaggttatccagttcgtcttgcattgctgccagcacatcgtcgcggatacccgctgttttctccagcaaagcgattcgcgcttcagcatctgcgatcttggccattgcttcaaggtggcggccctggctttcgagtagtgcggtttccagttcagccgtacgctctgtcgcctccaccatcatttccagttcagccattttactgtaatgggatataacggcctgcactgactcgtcagagtatccatgcgccgccagggactctgccagtagagatttagaatccgcgctttcaaacattccggcgctggcaggatgatccagactgatatagttcggcgttgtcacataatccacaccatggaagctggtggttacagcgattttcccggactcacgcccgccagtggcccagctccagccaccagctcggctttcgatcatcgcggcgacaattttacccggctctgtgttaagaatttcctgtgtatgggtaacgatgccgttgtcgtcaacagatatagccactgttcggcacgctggaacattgtcgattacgaccgggcgaccttccaccatgatcacgctggtttctggtacttccagtttgccggtcagctgtcggcgaccgtgaccgtaatagccgaaaagctcaccaaggcgtaaaccttcctgagtttccttgctttcaagcatggtctttaccgcgcttaatacatactgtcgcccgttctggcgaccttttctagcattactatagagacaaaagcggtcagtgaccgttttcaaaacatcagtcattctcgtttccctctttaaagaccgattcaaggatttgcgccagttcctgtggcggtgttttgatgatggaatccatcaggtgatcgtcgtcctcgcttttcgctttcagttcgttcaccagtgcttcagagattttttcgtcaatctccagcacatcgctgaacaggtaacgtttgaatgcatcggaattggcgaggacgctgttattgctgacggcatcgaggatttgcgtaacgatggtggcgtagttcgcctgcgagtcgcggttttcgttgtgctcttgttgcagagcggtattaacggagtggaattcgattttgtacgggcgatcaccttccgggtataccttgccgtacttgaaagcaagatgaatatcgatagcccgctgaatgaactcttctacgccctgctggatccatgaggcgcgcatggcggcctgaattgccgtgcgcaggaatccaccttcaccaagcccgccggacatttgatctgcccaccccaggagggtgtaatcgaggccaagtgctgccgccagctggcgcatataggtgagaatgtcttcaatgccgttgatgtcagcctggatggtctgagtatcaatagtcatctgtcccttgccgtcgcccataataggcagcagggtattggtcaccgtaggcatgttattcgcgccgcgtgcgcgcttttccatcaggtcagctgctcgtttaagcgtctgagtaatggtgcgcgaataatcggctgcttttaccggatccagactattcatcgccaggccgatgattcggtcaattttcgacgcattaaaacgcgttgccttcagtgagcggatcgccgaacgcagattcatgtacggctcgtaggcgtattcgagcaagctggtcccgtaattctgggtttcaatcggcgtgcgctcttccggattatccagcaagctgtatgctttatggccagtgtgcacaggcataaggtttgacttaggccgccagtaggggattttcatagggataatggcccacggatcggcgaaaaccattttccctgacgcgtccttcagataatcgccgctaaatcccgccaggttaccgctgacctcgaactctttgatgaagcccggaagggtgtaataggagcactcaaaagacgtgatccctatgccttctttggcgtatggcctgacataagccaccccaaatacagacatgataaatgcccacccggcgacctctttgttgatggttcgcccgatgtcgttcatcagctcgtcacacaacccctgcgcggcgtcatagtcactatcgtttccgttgtgtaccggcacgatagagaaggtttgtccggtcttcttatcgaaagagagcgcgtgcgtaatatggatgttcagagcggtggcgatcgtgctgtaaaccgccatttcttcgagtagcggatagcgttgcaagcggtcttccggcagttgaacttcatcaaagataaagcgactcccatccaccagcccatcaccagccatgccactatcgcccggtttgccgcctaagaagccggacagttgtaccggtgcccctgcgcgagaaaacaaatacccacttccgccgtgcacagccagcgcggacaggaggatgttgtcccgttctccgttgtctttaaaaacccccgccagcgccttcctgaccgaggatagcgtgattttattgtctgccaagattgcaccttaattagaataattcgcatcgtgtttgaacggaaatttaacactagtcacttgttaaggattaccaatgaacaagctatctatgggggtgtttcgctgttcaagtgtcagcgaaatattgaaatacattagtgcaataacatctcaccgagcgccgattagatacggcgtggaaaaggtggaaggcaaaagctatgaccgactacgccgggaggcgaatcagaaggcgatagatttgcttaattcgctggtggacggcgcgacactgacagatgaacagcgccagatcctggctgggtacaccggcgaaggcggcattggcgggtccgtctccgaatattacacaccaaagccgatcgctgaaggtgtctgggagatcatgaagctctacggcgcggacgtaggtaacactctggaaccatcggcgggaaccggcgtttttaatgagacaaaaccggttggtacggtgatgaccgcgactgagatcagcagtgtttccggtcgtataaaccagctgttgcacccggaagacagcgtacagatttctccgttcgaacaactggctgtaagcacgcctaacgattcattcgaccatgttgtgggtaacgttccgttcggtggtcgtgataacacacgcaacatcgataagccttacgcagaagaaacggacatgggttcttacttcatgctccgcatgctggacaagataaagccaggcggattcatgtgcgtgattgtgccgccgtccattgtttcaggttcaaacatgaagcggttacgcctgcgcctatcacggaaagctgaatttcttggtgcccaccgcttgcctaccggtacttttgacgcaaacgggaccagtacagttgttgatgtggtgctgatgcgcaaacatccggcagagatggctgagaaaatccccctggtggatgaaagcactctcgaatcggcaaatgtgctttggccaacgtttatttctggcaagtggtttgaaaaggacggccgccggtttgttcatggcacccaggaaaagggcttccaggggcgtattgaggttcgtgccgacggtcagattgataaccaggctcttaaagcgaagctgattcatcgtttcgaaagccgtatcgactggtctttgctcgatatggctgaaccgtcaccgaccgcagacgttgttggtgaaggggaaatgcgcctgattaatggcgtatggcaaaaatatgctggtggtcgctggattgaagctgatgccgggaaggaacttaagatcgatgctgccagttatggcgcggatagctgggaggctcttcagcgtaacctgactacaacagaaggccgtctcggcatgacatttacccagatggcaaatgtccgcgataagtacaccacatcaatcagcgacgatatggtgcagctggtggactggattaacagccagcctgaaaaataccgtgaacgcttgtatcgcggggcgatgattggccggatgttaattgaatatcaggacatgaaggccgccgggcatagtgctgaacaaatcgaacagcagcgcctttctctggtatcccgtttgcaggcagagattgaccgttttggtaaccccggtcgcggtccgatagcgaaattgtcggggagcggtgcgcgcgcctggtttgctttccgtggtgcaattaagctggatggcactatttctgacgagctgacagggaagctggttacgcatgattccagcgcaagttatgactccaccagctatcaggacaccctgcgttatctctatagcgatctcccccgcgatccaatccagctcgatgatttccgccttgcgtttaccggcgaactgccagccagtgatgaagagttgcttaatttattggccagcacccctggtattgcggtttcaccgtatggcgggattgttccgttcgcccgcgccaccagcggcgacattaacgagatagtggctccaaaacaggaattcctcgccacactccccgacggtccagtaaagaacaacgtccttaatcagctggcagctatcgaagagaagcgcatcaagacgccagcagagaatatccggtttaagctcaatagccgttggttcgaccgttccgtcattctggaatttttgcaggaaaacggctatccggatctgcgctatgtgcagtcagtgcagctggaaggcgacgaaatggtttctgacacctatcacggtggtgatggtctgttcgtcgggcaccgatacggtgtcgtccagcgcaaggataaagaaacaggtgagattcgctacgagtgggaccgtaaatcaggtgaaaacgcgaccgggttcccggcacagctggaaaagtatctcaatggtgcgcgtatcggtggcaaagatagcgcgacggcgaacggctaccgcgagcagatggcactgcttgaggaccagttcaataagtggatcaagacgcacgatcgctacgatgagctggttgccaaatacaacgatgtgttcaatagcaatatcccgtatgaacactctggcgatccgcttgggttgaagggattaagcggtaagcgccagccatttgattaccagaatagcgaggtgcgccgactgtccgaagatgggcgcggcatcctgggcttcggcaccgggctgggtaaaaccacgaccgcgctggcgcttgaggcgttcaactatgagaacggtcgctccacccgtactgcgtatgtagtgcctaaatcagtgctggaaaattggtattacgaagcaaaagaattcctgagtgaagaggcattcagtaactacttgttcgtcggtcttgatgtgctgatggatggcgatcagattcgccaggtgccggtgctcaatgagaacggtaaacctgttcttggtactgatggcactccagttatgcgcgatgctcttaagctggcagatgaagccactatcacggcgcggatgaacgcgatcccgcactcaaattaccgtgcagtcgtgtttaccaaagaacaatacgcccgcattccgctacgtgatgacaccgtagatgagcatgcacaagacatgctttatgacttcgttgccgccgggcgcgtagccagcgcaatggactccgactcccaccgcaaagaggcggcgcgtcgccgggtattgtcggagtattcagataccggtaccgaaaaagcagagaagtatccgtactttgaggatatgggcttcgacagcgtgattgctgacgaaggccacaactaccgcaatagctataaaaatggtcgcgaagcgtcacagctggcctatctgcccaccagcgcggtggcgcaatcggcgcgagatatggcaatcaaaaacgcgtacttgatgaaaaagaatggcgggcgcggaccggttctcctgactgcaacaccagtcgttaacaccccgatcgatgcatacaacatgctttctcatgttctgccgaaggaatactggcagaagatggggatctacagtcctgatgacttcgtaaaattcttcggcaagaccaggctggaaacggtacagaaaatcagcggcgaagttgaagaaaaaatggcgctggtgggttttgaaaaccttgatgcgctgcgcggcatattccatcgctggacaacgcttaaaacggcggaagacgttaaggataccgtggagatcccggaactggacgaacaccagcaggatgcaccacttactgaagaacaactggcggcgtatgaagaattgcgtcagcaggcggaagcggcggccaaagccaacaatggtgtaacgacctcggtcaatgaagacggcgtgattgagcacgagaaagcccgtccgatcttctcaataatcagggatatggaccgcgtatgtactgacatggacctgtactatcgccggatcacctatcgtttcctgccggagtacgccgatgcggtgcagcagctggcagacagtttgcctaaacaagccaccagcgaagacgacgacagtgatgattcaatcacgcagcaatcgcaatactccctgatagataagggcgagtttattcagttgcaggttccggaagcgttcgagcaggaagtgaataagcgcctggccaggtttggcattgacgaacagaccgtaactcaccccgttacgcccaaatacgcgaagctgattgccacgctgaaggagtttttcccggaaggtaagcaaatcatcttcaccgatgaaaaaacgcagcaccagaagctcaagcgcattatctgcaatgctcttaaccttgaaccttcaaaggtggggatactgaatgctcagacggttgccgaggcaggtaaaaccggtaagaaactgaaagcggttaaaccgccgaaagagttaccggatgaaccaacagatgcacagatagcgaaatacaacgagcaaatggctctgtatgacgcctatatcgcgcagcaaaatgaaatgtcgttgggcggtctggaaaagattgcagccgacttccaggagggccggactccgatcatcatctgcaacaaaaaggcagaggtgggtatcaacctgcatcgaggaacgactgacatccatcatctgacgttgccatggactccagccagtattgcgcaacgaaacggtcgcggtgcccgagttggctccaaccgtgcaagcgttcgcgttcactactactgcggcaagggttctttcgatgaataccgactgaagacgctgaagcgtaaagcaggctggatctccgatatcctccgttcagataagtcagaaatggagaacgccgacgccaacgatatgatcgaaatgcagatgtataccgctaaggatgatggcgaacgtctggcaatgatgcaggttcaaatggataaggcgaaagctgcgcaacgcgctcgccagaaagaacaggctactatcgaccttcagaactacatcaaggcgcagcacgcagctggtgaggatgtggaggtgcttaccgctgaattagagcgaagcaaggcggaacttgaaaagaccaccgccgaggtagctaaattcaaacaggcggcaatggccaaggcagcggataacgcagactggaaggcacgctgggggagtgtccatcacacagaccgtatgttgttagcacagtatcgcgcgtcgttgaaaagcgccattcagcgcaaggctaatatctctcaggccatctcccgctatgagaaattattgaaccgtactcagaaggccgcgacggatatcaaacgcctgcgcccgctggtggaggatgcaataaataaaggcattctggatgttgatcctgatctggttaaccatgcgaatgagttccttgttatcggcgatcgctcatggcgtgtaggccaatactacgattgtgccggtgatatcgttcgcattaagtcgctggacttcgacagccagcgcgcagacgtggagatcatctttaccttcaaaggcaccaaatcgggtaactgggatgtgaagacgctggataaacaggttgatgtaactcccgatgaagatgctgttatgcagaaaatcagtggtggcgtctccatcgccgggattaacgacatcatttcctgtgacgatttctaccgtttccagcagcgcggcatgatcaaaataactgactcgtacggcgttcagactacagagtcaggctatagcattgattttgttggtacctatacggacccactgaagcatgcggtttacccggatcgccgtgacggcgcgctgaagtcgtcaattgcaaaatgggtgcttggtatgatgtcggaagggaataaccgccaggtccgtttggcagaagtattcctgactgaactgtttggctccaattatggcgaggtaatcgcgtcatacggagatactctatcccctgaagcacttcaggagaaaatagcggattcgatcgccaaaatgccggagaaaacaagccagggggctactcgtaacggggattctgaacttgaggtcaccaatgctattttcggtacccatgagttccgggcgtcagattatgagatcaccacagcacagtttggcaccattggcatttacagcaataaagacgagatcaagcaggcaatggacgcagcaagtgcgcgcattgcagcagaacggaaagccaatctgaatcatgcagtcgccgcgctgactcaatcgtgggtaacagcaatcagggaggccgccaccacaggaaaaatcacaccggcaattgcggatgtcgtaaacgacggctctaaatttatggatgcctataaaatggatgcggtgcagttgccatcagcctatggccaactcagctatcgcataacctacaacctggtatcaatgtttactgaccttgccatccttgggctggtggaccttaacgaggttacgccggaattactcagcatgcgcaagaatcatgttgagatattgcagagaattaacacggttcttgccgggcgcaccgatgaagagaaacaggccgacgctgatcggataaacctggccctaggcaacatcacggaggaagaaattgccgccagaaacgagaaacaagaagagttatcatcaatacagggtgatgccaccagcatagctcagtctcttgggctgaattatcgcgtatccaccgccgacctgaagatgatgtacgcaccaaaattcgccgctggcgaggtatttgggcttcaggaagcctccggcatgaaaggggggcttttccgtgcgaaagacgcaatcaaggcgaaattcggcgctcgctggttgccagcgaaggcgaagaacagcgacttcccaggtaactggtggattatcgagacaaaacacaacgtggcggacgttctggccgtcatccaacaatacgcataacaggagcgcccggttcgccgggcgtcgcataatatggccacactatctgatacaataaaaccgaataaaacatatcttgaggcggtactccgtacagcgttgttaggaaagacagaagacgaatacgttgatttcttcctgtcagggctacgcgggcgattactgaaaaatccccgcctgtaccgcagctatggtccatactggccggaaattaaaaaattattactggagcgcggttatggtaatttcggtcgtctcgttgaccgtgacgttcgcaaaatttaccgttatgaccgcccggcgctaacactcatagccgcgacgctctacagccaggagcgttttgataatggtcagatatactcagcctggcatttactgccagtgcctgaagaagttgacgaccaggactatgagtttgagtcttacgatttggaagttgaagccttggcacaggctggagagaaaacttgaaaaagcgatactacacagtaaagcatgggacgctacgagcattacaagagtttgctgacaagcataacgttgaggtgcgcagggaagggggaagtaaagctctgcgcatgtaccgtccggacgggaaatggcgtacggtcgtcgatttcaaaactaacagcgttccccagggcgtccgtgaccgggcattcgaagaatgggagcagatcatcatagataatgcattgcttctcaatgcggattaaacttccccaaattatggctgtttgctcaccgagcatcgctcaaagaagcacgattcttcaaacatatagatagtgatagtgccacaacttctggctctaacgggctggggaggcggcgctttgttgctaaatgatctggtttaaaatggatatgaaaaaagaaacgattttttccgaagtagaaacggctaacagcaagcaactggctgtgttgaaagctaatttcccacagtgttttgataaaaacggagccttcattcaagaaaaattgcttgagattattagagcatcggaggttgaactctctaaagaatcatacagtttaaactggctgggtaaatcttatgcccgtttgttggccaatctaccaccgaaaacgttgttggcagaagataaaacacataaccaacaagaagagaacaagaacagtcaaaacctgttaatcaaaggggataacctcgaagtattgaagcatatggttaatgcttatgctgaaaaggtgaatatgatttacattgacccaccatacaatacgggtaaagatggattcgtctataacgatgatcgcaagtttacaccagaacagctttctgaactggcaggtatcgagcttgatgaggctaaccgcatacttgaatttaccaccaagggttcaagcagtcatagtgcatggctgacattcatttatcctcgtctttatattgcacgtgaacttttaaaagaggatggagtaatattcatctccatagacgataacgaagataaacagttgggattattatgcgacgaagtatttgggcaaggtaattttgttgcaaaactccctacaatcatgaatctcaaaggcaatcatgataactttggcttttcagatacgcatgaatatatatatgtatacgctaaaaacaaagatgtttgtagtttggggcaattcgatattgatgaaagtgaagttgaaaaagagtgggatgaagatgaatatgggctatttaaaagagctgatacattaaagcgtactggccaagatgcttctagaaaatcaagaccaaaaggttggtttccggtattcatcaattcagaaaataaggtttatgtaacagatgatgataaacctcttaacgaagatgactatgtactttacccagtaagccctacgggtgaagagctttcatggtcgtggggaaagaaaaaaataaatgatgagttttataatctaatagtaatagatataaaagatggtaaaaatatctataaaaaacagcggcctgctcttggagagctaccaactaaaaagccaaaatcaatttggtataaacctgaatatagtacaagcacggcgacaactgagcttaaaaatcttttaggtgcaaaattatttgaaggaccaaaacctgttcctcttataaccgatcttgtaaaaataggaacaaaaaaggattcattagttcttgacttttttgctggctctggtacgacagcagaagctgttgcatatttaaatgaaaaagattcaggctgtaggaattttatatgcatacaaaaagatgaagttataaataaaacaaagaatgcctattctcttggctatagatctatttttgaaataacaaaaaaaaggatacaggaggtatttaaaaaaagcacaaccacaagtgataatgcggctaaaataggtttcaaagtgattcatactattgatgactttagagcaaaagttgagtctgaacttacgctcactaatcatacattctttgatgatgcggtattaacgcctgaacagtatgatgccctattgactacatggtgtgtatatgatggtagcttgttaacaacacctattgaagatgttgatcttagtggctatacagcacacttttgcaatggccgtctgtatttgattgcacctaattttactagcgaagcactgatgaatcccctaatgattttggtaaaaatcattaagttaaggtggatacacatcttgtcatatgatcaaatggtttcgcgaaaaatcaataatcagacaacaagatgtgcgaactcgatat

SEQ ID NO: 67 - DNA, 38337 bp, Escherichia coli
  source 1..38337: mol_type = genomic DNA
aaaatatcgagttcgcacatcttgttgtctgattattgatttttcgcgaaaccatttgatcatatgacaagatgtgtatccaccttaacttaatgatttttaccaaaatcattaggggattcatcagcactgcgcagacgcgaggtggcaggtttgatttttatccagcaggcaatcagcgcagcaagcacgccgctgaatcccagcgttaataacatttgcggtgtcatcagcgcataactttctgccggagtggtatcaataatattggcaatcatcgagcggtcgatgacgatgccgtaagtcattatgaaatattgtgcagccgcgccaaccagaataaacaggcaggccagtggtcgattaagccataagaaagagcttagtgtcaggacaatattaatcacgctgaaagcgacgaccggcatcgacaagaaaaccagtacgttatgcagcgaatccagcggcagcgcctgcaacacctgtttaaaaaaggcaatattcaggcagatagagatataaaaagcggccaacaatagccaggcgagtaaattcaaagagggtctttttagtaggcgcttcaacatcacggtgtttccatcgaacaaagtgcgcatatgctcgcaaagcaaaattaagccaaccttaagttcttaaggttggcttttatgtttgctggattaaggggaattaatctttgcttattggtgcatctaagggatacgggtttttatgcagccggttgtaattcagcgcatacatggcggtgattaccatcagggtgacaaatgaccacataacctctttcgccccggaccccaccacggcccaaatgcagtagaggaaggcaatggtagtaacagccagatatgccgggcgtgctttaccaaagtgaccgtgaccgagcagcagtaacgccgcacaggtgtaaagatatggcaccagtgtaaagatgaccgagacggaagaaaccagaccgaactctttggtcgcgtttggtgaaatgctgctgagctggaagatggtcatcaaaataccgacgataatcagccccgccactggcgtgcccgctttatttacacgggcaaaaatcggtgggaacagtccgtcatcggcagcggctttcgccgtttgacccgccagcaacgtccagccgcccagtgaacctaagcaacccgcagctgcgcagaaggaaacaatggccccggcggtgtcacccaacgccatccgtgcggcatcaccgaatggcgaagcagaaacgcgcagtgcggcattagggatcatccccataatcgcggtggtagaaagtacatagcaaacggcggcaatcaataccccaccaatggtggcgatagggacattgcgtttcgggtttttcaccacacctgcggcaacggaggcactttccacaccgatgaacgaccacagcgtaacgttaagggtactttgaattgcaccgaaggtgcccaggccgctgacgttccatgccgccatataggtttcaccacggaaccagaaccagccaaatacggcaatcccgacgatggggatcagcgccagcacggtggcaactgcctgcacacgggtgatcattttcggaccgacaatgttcagcaggacgaagatccacagcaccacgacgcaggtgatggttaataccaatggatctttcagaatcgggaagaagtaacttaaatatcctacgccaatgaccaccatggcgatattgccgatccagcaggccagccagtagaggacgttggtttgataaccgagaaacgggccaaagcagcggcgggcgtaagcgtaagaaccaccaggacttggatcgaggaacgacattttggcgtataccatcgagagccccagcgcaccgataatcgtcaccaaccatccataaatggcaatcccgccagtggaggccaggtttgcaggtagcagaaaaacacctgaccccataatattccccgacaccatcagggtgacggggattaagcccactttgtgagcatcagcatccgaagacataattaaactcctgcgaaggcgagcttcgtgacaataaattacgtcatatcatacgcctgcattcgatagttgaattattatcgaccgggttatcgctgatgccgttattaatgtagctcttcgttaaggttaaaaatcaggcgacagtgcgttctctgtgctgactaacataatgcagcggcgtcataccgtagaagtctttaaagacagaaataaagtacgacgtactgttgtagccgcaggactgtgatacctgagagatatttttaccgtccatcattaattcatttacggcataacgcatgcggcaggtggtgattatttggctataactggtgttttcgcttttcaactttttctttaacagacttgggctaagacataaacaactggctaccatactaagattccagtctttgtgaatatcgctttcaataatttgataaacgctgtcacttacacaattacgtaacatatacatcattaatgaaaggaattttttactgtcgagaaaacgggatagcacagtgaataataatgcgcgtgttcgttccttttctgactcagtttctgcgggcatcatgctgtgttgcgcggcaacgcgaaagacgtctggcgtcaggcatggcagggtgagtatgggcgtagcgctacgttgccatactggtatttgcgagagatctttattcagaaaccggaggtaatctttgatgatgtcgtgactaatatgagcaaccaaagtgttgttaagagaggagacgtcgataatattattttcacaatttaataacgccatatggttagctttaaggctaataggttctttcccattcacccttatccagacatctttttcagtcaataaaacaatacaaggttggtcgctgcaaatcctcatacatgtactcctgagtgcaaataaaagaccagttctcgctaaagcaaagcgataccgggaaatggttatataattgtatgatgaatataaacatgcataaaaataacgagttttactaatattacaaatttttatagtaatttctcatgtacatatttttttacaggataaataacaggcaaaaaaaagcgcggggtggggccgcgcaaaaagtatgacatttttgtttgcagcaatttttatgaaaacgttgccatactcaaaaggcctaaggccaggcggcgtaatgttatttaaacaattacgccttcagcggaatagtggttacgctttcacgcacataacgtggtaaataccgtcaataatttcagtcccttcagtttcgtgttcaaatccagggaaatggtggtcccaggattgcagcgagcgtaaataacttacttgcggactgtttttatcgccgaagttttcaccagacagcagcatcgggattcctggcggatacgggataactgagtttgccgcgatgcgtcctggcagattttcaatggataccagttcgacattgttgtcgacaatcgcgttgtacgcttcacgcggggtgatttccgccatcggcaggccggaataggcttcgttcaaccgtgcgccagggttgttttctttcagccaggcaaacatggtgtcacccagatcgtgaatccccatgttcgcgtaagtgtcaggatattgttcaacaagttccggcatcacctgcgccagcggtgtgttggcgtcatagtggcgtttgaaggagcaaagggtgttaaccagagtcccccatttcccacgggttacgcccatagagaacaggaacataatttggaagtcagtggtgcgggtaggcacaatgccgtggcgaccaagccaggcagtgaccagcgccgccggaacaccggtttcttccagttcaccatcttcacccattcccggagcaaggatgctgactttaattgggtcgagcatactccagttatccggaatatctttgaagccgtgccagctttcgcccggatgcattacccagcagtcctgaacggtggtcagcagtttggttggtgcgtcagcaaagtcataggttttgccggtttgtgggtcggtgacgacttctttgttccacggtttgaagaaccagctaccgtcagcggtgaactctttatatagccgcgccatcgcctgacggaaatcaaccgcttcgtcaatcacttcctgtgtcagtgacaggccgctgttgccgtccatcatcgacaccgccacgtcgttggatgcgcagatggcatacagcggggaggtggtggcatgcatcatgtaggcctggttgaagcgggagaagttaatcgccccacgaccttcacgtacatgaatataagaagcctgtgacagcgcattcagcagtttgtgggtggagtgggtggcgaaaacggtaggaccgttgtgatcgccaggttcgccgcgcatggcatagtgatcggcatagatcgggttgaaacgtgcatagccgtaccaggcttcgtcaaagtgcagacgatcggaggttttttccagcagatcctgcgcttctttagcgttataacacacgccgtcataggtgcagttggtcaccacgcagtaagacggtttttgcccggctttgtctttggtcagcgggctttcactgattttcttctgcaaggtttcaggttgcatttcctgcggatagattggcccgataatgccgtagcggttgcggcttggcaccatatagaccggtttcgcgcctgtcagcatcaaaccttgttcgatggatttatggcagttacggtcaacgaccacgacatcgttatcggtcatgcaagcctgcatgatggtgcggttagagccggaagtaccgacgactaccgaccaggagcgatcggcaccaaatacgcgtgcggcatatttttcgctttcgccaaatgcgccagtatggtcaagcaaagaaccgagggaagttcgttcgatgcccatgtcggtgcggaacagattttcaccatagtagtcatggtagaaacgtccggcgggtgttttggtaaaaccaacgccgccctggtggcctggcgctgcccaggaatattcatggatgtcactatatttcatcagcgcgctgaacagtggcggcaacagctgctggcggtagcgggtcatcgcggcaacggcgcgtccggcgataaagtcggcggtatcttccagaatccaggcgaattcatcgacaagctccagcagatcccggtccattgcggcgagggctttttcccgatcgcccaacaggaagaccggcacgttttgttggcgctcatgaagcttaccgatcaattgtctgacgttttgatgttcgtccggatgttccatttgatagctgaacatcaggcagtcaatggcttcgtttgaagagagaatggcaaaaccatcatcaaaggaggtggatttaatcacggtaacattttgctggcttaaagcatctgccagacgctcaacggcgttaccgacccaggtgtcttgatggagaaactcgctttcaacaattaatactttcatcattgcttacccggttatgaaggaatcttcgttgcgggcaagtatcttccggccttttcgggctgtaaagcgcgtgaaaaacaaacatttttgaaatatttagttttataaacaatacgttatgtgattattttaaattattttcactgcttattatcgacggctaaactatttttttggctgatactgatatcgtctttagccgggaaacgtctggcggcgctgttggctaagtttgcggtattgttgcggcgacatgccgacatatttgccgaacgtgctgtaaaaacgactacttgaacgaaagcctgccgtcagggcaatatcgagaatacttttatcggtatcgctcagtaacgcgcgaacgtggttgatgcgcatcgcggtaatgtactgtttcatcgtcaattgcatgacccgctggaatatccccattgcatagttggcgttaagtttgacgtgctcagccacatcgttgatggtcagcgcctgatcatagttttcggcaataaagcccagcatctggctaacataaaattgcgcatggcgcgagacgctgtttttgtgtgtgcgcgaggttttattgaccagaatcggttcccagccagagaggctaaatcgcttgagcatcaggccaatttcatcaatggcgagctggcgaatttgctcgttcggactgtttaattcctgctgccagcggcgcacttcaaacgggctaagttgctgtgtggccagtgatttgatcaccatgccgtgagtgacgtggttaatcaggtctttatccagcggccaggagagaaacagatgcatcggcagattaaaaatcgccatgctctgacaggttccggtatctgttagttggtgcggtgtacaggcccagaacagcgtgatatgaccctgattgatattcactttttcattgttgatcaggtattccacatcgccatcgaaaggcacattcacttcgacctgaccatgccagtggctggtgggcatgatatgcggtgcgcgaaactcaatctccatccgctggtattccgaatacagcgacagcgggctgcgggtctgtttttcgtcgctgctgcacataaacgtatctgtattcatggatggctctctttcctggaatatcagaattatggcaggagtgagggaggatgactgcgagtgggagcacggttttcaccctcttcccagagaggcgaggggagcgtccgagcatcatgaggccgaaaactctgcttttcaggtaacttattaccataaactcagatttactgctgcttcacgcaggatctgagtttatgggaatgctcaacctggaagccggaggttttctgcagattcgcctgccatgatgaagttattcaagcaagccaggagatctgcatgatgactgcacccaaaattacatttatcggcgctggttcgacgattttcgttaaaaatattcttggtgatgtgttccatcgcgaggcgctgaaaacggcgcatattgccctgatggacattgatcctacccgcctggaagagtcgcatattgtggtgcgtaagcttatggattcagcaggggccagcggcaaaatcacctgccacacccaacagaaagaagccttacaggatgccgattttgtcgtggtggcatttcagattggcggttatgaaccttgcacggtgactgatttcgaggtctgtaagcggcatggtctggaacaaaccattgccgatacgttggggccgggcggtattatgcgcgcgctacgtaccattccgcatctgtggcaaatttgcgaggacatgacggaagtctgccccgatgccaccatgctcaactatgttaacccaatggcgatgaatacctgggcgatgtatgcccgctatccgcatatcaaacaggtcgggctgtgccattcggtgcagggaacggcggaagagctggcgcgtgacctcaatatcgacccagctacgctgcgttaccgttgcgcaggtatcaaccatatggcgttttacctggagctggagcgcaaaaccgccgacggcagttatgtgaatctctacccggaactgctggcggcttatgaagcagggcaggcaccgaagccgaatattcatggcaatactcgctgccagaatattgtgcgctacgaaatgttcaaaaagctgggctacttcgtcacggaatcgtcagaacattttgctgagtacacaccgtggtttattaagccaggtcgtgaggatttgattgagcgttataaagtaccgctggatgagtacccgaaacgctgcgtcgagcagctggcgaactggcataaagagctggaggagtataaaaacgcctcccggattgatattaaaccgtcacgggaatatgccagcacaatcatgaacgctatctggactggcgagccgagtgtgatttacggcaacgtccgtaacgatggtttgattgataacctgccacaaggatgttgcgtggaagtagcctgtctggttgatgctaatggcattcagccgaccaaagtcggtacgctaccttcgcatctggccgccctgatgcaaaccaacatcaacgtacagacgctgctgaccgaagctattcttacggaaaatcgcgaccgtgtttaccacgccgcgatgatggacccgcatactgctgccgtgctgggcattgatgaaatatatgctcttgttgacgacctgattgccgcccacggcgactggctgccaggctggttgcaccgttaaaacgcgactaaacgctactgcgccgggggatttattccggcgcacacctctgacgataccaataacagaaggcgggcgttggtaacagcgacccgataccctatgagcatttcaatgactacaaaactcagttatggatttggagcgttcgggaaggattttgcgatcggcattgtgtatatgtacctcatgtattactacaccgatgtcgttgggctgtctgtgggtttggtcggtactttgtttctggtggcgaggatctgggatgctattaacgatccgattatgggatggattgtaaatgctacgcgatcgcgatggggtaagttcaaaccctggatcctgatcggtacgttggcaaactctgtaatcttatttctcctctttagtgcgcatctgtttgaaggtactactcagattgtctttgtttgcgtgacctacatcctctggggcatgacttacaccattatggatattcccttctggtcgctggttccaaccataacgctcgataaacgtgagcgcgaacaactggttccttatccgcgtttttttgccagtctggcaggctttgttacggcaggtgtgacgctaccatttgttaattatgtcggcggtggcgatcggggatttggctttcagatgttcactctggtactgatcgccttttttattgtttcaaccatcatcactctgcgcaatgtgcatgaagtcttttcgtcagacaatcaaccgtctgctgaaggaagccatctgacacttaaagccatcgttgcgctaatttataaaaacgatcagctttcatgcctcttgggtatggctcttgcttataatgtagccagcaacattattaccggctttgctatctattatttctcatatgttatcggtgatgcggatttgttcccctattatctgtcgtatgcgggagctgctaacctggtgacgttagtattcttcccacgcttagttaaatcattatcccgacgcattttatgggccggagcatctattcttccggtgttaagctgtggtgttctcctgttaatggcattaatgagctatcacaacgtcgtcctcattgtgattgcgggtattttgctgaatgtgggaacggcgcttttctgggtattacaggtcatcatggtggcagataccgttgattacggtgaatataaactgcacgtacgctgtgaaagtatcgcttactccgtgcagactatggtggtgaagggcggttcagcctttgcggcttttttcattgcggttgtgttagggatgattggctatgtaccgaatgttgaacagtctacgcaagccctattaggtatgcagtttattatgattgctctaccaactctgtttttcatggtaacgctgattctctacttccgtttctatcgcctcaatggcgacacgctgcgcaggatccagattcatctgctggataaatatcgcaaagtaccgcccgagcctgttcatgctgatattccggtcggtgcagtgagtgatgtgaaagcctgacgtggacaatagctaacgaaaatggcctgatgcgatatgtttatcaggccacgtcttaatgtaatgttttggatttgcaaattttgtagaccggataaggaattcacgccgcatccggcatcaacaaagcgcaagttgttatccggttatcaagccaaagcgccgtagctggcggcaatgaaagcgagcgaggaatatcaccgttgttaatgcgccaagcagcgcgcagaacatatcggattgcgtgtcccactggtcgccctgggtgccgagaaaatcatccgctccctgacccattgccagcgctgcccaccactcgattaattcatacatcgcgcttatcgccagcgccacgcagcagaccaggaacgccaccattttacgtccgcgcacgtacatcccgcgaacgagaatttctcgtgccaccagtgcaggcaccagcccctggaaaaagtgccccagcttgtcatacggattacgactcaaccccagccattcctgcacctcaaaaccaacggggactttcgcgtaggtgtattgtccgccgaccatcaggatgatggcgtgaaggaaaatgagcgtatagagcagcggcgttaacggataacgtctggcggtggcaagcagtagcggcacgacaataatcaccggtgtcacttccatcagccaggtgagtttgtcatgggccgaaatgccggtataaatcaggattaatgttagcgccagtgcgccggtgttaagaattaacggcttgagtgtgcgggtcatggtgagttcgcaaatcagggaaaatactgactattcaccagcaagcgtgaaattacaatcgcaaaagaggtggcccagggggatcacctggcagcatgctgccaggcgctgggccgaagaggttacttagtgcagttcgcgcactgtttgttgacgatttgctggaagaagtcgttacctttgtcatcgaccaggataaacgccgggaaatcttctacttcgattttccagatagcttccatacccagctccggataagcgacgcactccagatgcttgatgctctgctgcgccagtaccgccgccggaccgccgatgctaccgaggtagaagccgccgtgtttatgacacgcgtcggtaacctgctgactgcggttacctttcgccagcatgatcatgctgccgccgtgggattgcagcagatccacgtaggagtccatacggcctgcggtggttgggccaagtgaacctgatggataaccggcaggggttttcgccggacccgcgtagtagatcgggtgatctttgatgtactgcggaagttctttaccggcgtcaatcagctctttcagcttggcgtgtgcaatatctcggcccacgataatggtgccggtgagcgacaaacgagtggataccgggtattgcgaaagctgggcgaggatctctttcatcgggcggttaaggtcaactttcaccgcttcgccttcaccggcctggcgcagttcttgtggaatgtactggcctgggttgtgttccagtttttcgatccagataccttcgcggttgattttcgctttaatgttacggtcagcggagcaggagacgcccatgccgaccgggcaggatgcgccgtgacgtggcagacggataacgcgaatgtcgtgcgcgaagtatttaccgccaaactgcgcgccaagaccgagtttctgggcctcttccagcagttcctgttccagctggacatcgcggaacgcctgaccatgttcgttcccttccgtcggcagttcatcgtaatagtgagcgcttgctaacttgacggttttcaggttggtttccgcagacgtaccgccaatcacaaacgcgatatggtacggcgggcaggctgcagtaccgagggtacgcattttctcgacgaggaagtttttcagtttgccgggagtcagcagggctttggtttcctggtagagatacgttttgttggcagagccgccgcctttcgcaacgcaaaggaatttgtactcatcgccatctaccgcgtacaggtcgatttgcgcaggcaggttagtgccggtgttgacctctttgtacatgtccagcgccgcattctgtgaatagcgcaggttatcttcgatataggtgttatagacgcctttcgacagcgcttcttcatcaccgccaccggtccacacgcgctggccttttttaccgacgatgatcgcggtgccggtatcctggcaggtcggcagcacgcctttggcggcgatttcggagtttcttaagaattgcagcgccacgtacttgtcgttttcgctggcttctggatcgtgaagaatagccgcaacctgtttctggtgtgccggacggagcatgaaagaagcgtcgtgaaaggcttgctgcgccagtagggtcagggcttctggttccactttcaggatggtttcgccgtcgaagtcggcaacgctaacgtaatcggaagtgagtagatagtattcggtattgtctttccccatcgggaaaggtgcctggtagataaagggtttgtttgacatagcttccagcctgtaactctgtatttgttattcgaaaatggcgtgccgcgtagtcacgggcggcacgcaaagtgcatttataagaacccgtacatcgcggcgaagatccagccgaagacgcacgatacgctcacaccaatcaaccccggcagaataaaactgtggttgatgacgaagcgaccgatgtgggtggtgccggaacggtcaaactgaatcgctgccagatcgctcggataagtcggcaggatgtaataaccgtagcaagccggtgctgaagccacgatgtatgccggatcaacgccgatcgccagcgcgaccggaacaatcgccgccagcgccgcagcctgagagtttacaaacttggaaaccagcagcagaacaatggcatacgcccacggatactctttcaccatttcacccagtacgccctgaatttcagacatatgcgcaccgaacatggtttctgccatccatgcgataccgtacaccgccacgatggcgatcataccggaacggaagacttcgttttttgagatagacgcgggattggttttggtcaggataataatcagcgccccggtcagcagcataaacatctgaataaccagtaccatcgacagcggtttgccgccgaaggatggacgcaggtccgaatcagcaccaagaagggcgactacagcgattgccccgaggaaaatccacattgccagccagttgcttttcggcagttttttatcgagcagcgtcgcggtatcaccgtaaacatactcacggttttccggtacggagatgaatttctggaactcttcgtctttatccagatctttaccgcggaaccagctgaagataccgatcgccaggataccgattaacgtcgatggaatggtgattgccagcaggtcgaggaactcaagatggcgaccatcaaaggtgacattacccagcattgcaaccagagacacgaccgcaaccgacaccggactggcgataatccccatctgtgcaccgatagaacttgccgccatcggacgttccggacggatgttgttcttaatggcgacgtcgtagatgatcggcagaatggtgtaaaccacatgacccgtaccgcaaagaatggtcagtgtacaggtcacaaacggcgcgacaattgagacatatttcgggttgcggcgcagcagcttctcggcaatttgcagcatgacatcaagaccgcccgaagcttgcaaggtcgccgatgccgcaaccaccgcaatgataaccagcatgacatcaaccggtggtttacctggctgaaggtggaagacgaagaccagaatgaccagaccgataccgcctaataaacccagcgcgataccaccctttctggcaccataaaacagacatatcagtattatgataagttggatagtaaataacatgtgtgaaccctcgcgataatcctatttaaatttttgctgaatagatcacagtcacgttctgttttgtatgaactgttttcagagcctgactaaatatccgtttggtcgttaccggctttagcaaatacctcacagtgaatattggctgattaaagcagcggcaaatttatgcactgtgataagcggctttttcagagagaaagactctctggcgatgggtttatagtttgtactgcgcagatgttaatgttttgtttgctgttatcttattgatatttatcggtctattttttgttctcagggcagatgtcattaggtttatagattaatctgatctacccatttgtgggtaaaaatacacataatgcgggtgacataatagttaattaacttttgttagcgttttgaaattaaaaacaccgttcacctgaagagatattaatttttagcgatgatggagggataattatatttgatctggcacaagttttactgatgaaggatgtaacttgtgccaggggtattttgcattacggtaataattattacttacagataaccagcgatccgttattggcaatattgtttcagtagtgagtagtgttctgcctgaatacggtaacggtaaaccggacgccccgtgacgccataatggatactggtgaacaagatgtggcagttgaccagccagatgaggtatttacggcaggaaacacgcgagatgttaacctcgttagccagctcgtcggttgaaaactcatagtcctgatgcgcgtcaatccactggcacagcgtgcgtaacgtctgcggcgttaagccttttggcaagcgacgaggatcctgttcgttggagctgctgccgtggattagctgatcaagctcggcctggtcataatactgatgtttttccagcgccattttcttttgccgccagccggtgagcgcctcttcaaagcgggaagcctggaagggtttgatcaggtaatccacgacaccgtaatgcagcgaatctttaatggttgccgcatcggctgcggaggagatgacaatcacatcacttttgcaacgcgcgttatgcaggacaggcagtaaatcgagcccgttctctttttgcatatagatatcgagcaatatcaggtcgataggcgtatcgctattgaagataatctctttggctttctccagcgtcgaggctgttccacagcattgaaagcctgggatttgtgctacgtatcggcgattcagctccgcgaccattgcgtcgtcatcgataattaatacattgatcatctgttcgacctctccccgtcccagggtatctggacaaaaaattgtgtgaaaatcccgggttccgattccacggcgatgctgccgccgagattttctacctgttgtttgacaagtgctaaaccgacgcctcgctcgcttccttttgtcgagacacctttgtcaaaaatgtgatcgattttgtcgggtgcgattcccggtccatcatcgttaacttcgcagtgcagccagccgtgacggtagtgcaatgttacgctaatttcgccaccgggttccggccctaatgcttccagcgcgttttctatcagatttcccaatgtggtaatcagcgtcgcgacctggtcctcactgccgctgtctggcagctggctttcactgtttaaaatcagcgtatggcctaaatcggtcgcgcggttaatcttgctgattaaaaaaccagcgataaccggagatttgatcttacccagcagagagccaatctcttcctgatagttattggctgttttgagaatgtaatcttccaactgcttataactcttcagatgcaataatccgagaatcacatgcaatttattcataaattcgtgggatcgttcacgaagtgcatcagcatagttgaccagaccgtcgagtcgctgcatcagtttacgaacttcagttttgtccctgaaggttgaaatggcaccgatgataacgccattactgcgcaccggaacggtgttgatcagtaatagccggtctttaatcgtaatctcttcgtcgcggcgcggcgtaccgtcgcgtaacacttccgagacatctaccacctgtgaccatgagtggcttagcgtcgacagtttctcatcgtcctgcgacttacggtaattcagcaattcttgtgcggcatcgttgatcagcgtgacctcgccgcgatcgtccacggcaacgacgccttctttgatagactgcaacatggcctggcgctgctcaaacagcgtggagatttcgtagggttccaggccgaaaaggatttttttcagtaccttaaccagaatgcaggtgccaatcagtccgaccagcatgccaaataataccgaccagataatgctccagcgactgtcattgatttgttgggtcacgcggcttaactcaaggccgatcgccaccacgccaatttgtttatgattttcatcgtagatgggggtaaatacgcgtaaagcctgcgccagaaaaccgcgattgatagcgacattttctttgccattcagcgctttaaggatgtcatcacctttaaatggctgaccaatacgctgggcttcaggatgcgagtagcgaagactttgcatatcggtaacgacaataaacagcagatcgttgcgtttgcgcacggcttccgcgatggcctggattccgctctcctgcggttttttctgcaagccctgacggatttccggcgagtcggcgagggtacgcgccactgccagtgccttgttggccagcccgtctcgcgtcatatcactgatttgcgagaagtaaatcagatgcaccaccaatagcaccgagaacagtaccgcgctgaccattaagatcactgtggtactcaatttcatcggacgtttgcgtaacatgcggtagggcaatgaatgtctcatcagcttccttgtgtgacaaatttcttaagcattatctctgatgaggcgggtaattcaaagggagtaagaatgattggctatataggggaagagactctggcaacggaaactgccagtgctgtatgaagattccagggctatgcttatagcgataatcatactgatgagagagggaaagtcatggatcaggcgctactggacgagggttatcgctgttataccggcgaaaagatcgatgtctatttcaacactgcgatatgtcagcattctggcaattgcgtacgtggcaacggcaagttatttaatctcaaacgaaagccgtggatcatgccggatgaagtcgacgttgccactgtggtgaaagtgattgatacgtgcccgagtggtgcgctgaaataccgtcataaataagcgagggtaaaatggaaatacgcgaaggccacaataaattttacattaatgacgaacagggcaagcaaatcgctgaaattgtctttgtgccgaccggagagaatttagcgattatcgaacataccgatgtcgatgaaagcctgaaagggcaggggattggtaaacagctggttgcgaaagtcgtggaaaaaatgcgtcgggaaaaacgaaaaattatcccattatgtccatttgcgaaacacgaatttgataaaacgcgggagtatgatgatattcgcagttgatgggagagtacagagtcacgatatttttcttgctctccgcggagtgatgcaggagagcatctgaagggtagggggatgcacaaagaatgggcagagagcgcgtttttttgtcccaagtcatcccctttactgagcaaaaaaaagaatatctcctatatgagaatcatcaatcggggttaataagttttgcgtccccagagcgtttaatattgataggagtcatattatggaaggtaaaaacaagttcaatacttatgttgtttcttttgattatccatcatcttattcctcagtgttcttaaggttaagatcattgatgtatgatatgaatttctcttctatcgtggctgatgaatatgggataccacgacaattgaatgaaaattccttcgcaataacgacatcgttagccgcaagtgaaatcgaagatttaatcaggcttaaatgcttagacttaccggatattgattttgacctcaacattatgacagttgatgactatttccgtcagttttacaagtagccaggaaggataagaagaacataaaaaatggcactattctctaaaatattaattttttatgtgattggtgtgaacatatcctttgtcattatctggtttatctcacatgagaaaacacatattcgtttacttagtgcattcctggtcggaataacctggccaatgagtctgcctgtggcattacttttttctctcttttaggagctgtagttgagtggacccgctggttatcgtgaaacgaagcgtctctcctcaaaactggatttgcggaacgacgaacgaagcagtcgcctgactgcttcgttcattaaagtgaaatttatttctgtgggcgcatcgccgggaagagaataacgtcgcgaatagtatgactgtttgtaaacagcataatcattcggtcgataccaatacccagaccagcggttggcggcagaccatattccagcgcagtcacgtaatcttcgtcatagaacatggcttcgtcgtcacctgcagctttagcgttaacctgttcctggaaacgttcagcctgatcttctgcgtcgtttaattcgctaaaaccattaccgatttcacgaccaccgatgaagaattcaaaacggtcggtgatttccgggttaacatcattacggcgcgccagcggtgacacttctgccggatattccgtaataaaggttggctgaatcagatgtgcttctgccacttcatcaaagatctccgtgacaatacgtcccagcccccagcttttctctaccgtaattccgatagattcagctaatgctttagcagcatcaaaattatccaggtcggccatatcggtttctggacgatattttttgattgcttcgcgcatggtgagtttttcaaacggtttgccgaaatcaaacacatgctcgccataagtgactttagtggtacccagaacctcttgtgccagggtgcggaacagggactctgtcagttcaatcaaatcgtggtaatccgcatacgccatgtagagttccatcattgtgaactcaggattatggcgaacagaaataccttcattacggaagttacggttgatttcgaatacccgttcaaaaccgcctacaaccagacgtttcagatacagctccggcgcgatacgcagatacatatctaaatccagagcattatgatgggtaataaacgggcgagcagatgccccacctggaattacctgcatcatcggggtttctacttccataaagccgcgcgcgaccatgaactgacggatagcggccagaatttttgaacggacaacgaacgtttgacgggatttatcgttagcgatgaggtccagataacgttgacgataacggacttcctgatcctgcagaccatggaatttatctggtaaaggacgtagtgcttttgtcagcaggcgcaactcagtacagtgaatggaaagctcaccggtttgcgtcttaaacagcgtaccgcgggcaccgataatgtcacccagatcccattttttaaactgatcgttataaacaccttctggcaggctatctcttgcaacgtacagttgaatacggccaccgacatcctgcaacgttacaaaggaggctttccccatgatacgacgggtcatcattcggccagcaaccgagacttcaatgtttaaggattccagttcctggttattcttcgcatcaaactcttcgtgcaactggtcagaggtatggtcgcggcgaaaatcattgggaaacgccacaccttgctgacgtagtgctgccagtttttcgcggcgatttctcagttcatcgttaaaatcaatagcctcattggctccccgtgtttcttgttcagacattttggttcctctaaatccagctttcaatttagcgtagataaagagacagatcggtacactgtattatctgcctcgactattaataactcagtttatcttatcgaaactaacgcttacctcaagttgatatcactaataaataaccatcaaaatggtttaaatgacttattaatctcgatttactagtgtgattaactgaaagttaatttattcataaccaattgtttttacgacagttaatcgttgctctcctgtatcatattcgtcggcgtgctaaacagaaaacgggtagcaaaggccaatacgacgatgatcgcgacacaagccaacgtccactctcccatctgagaaaagaatcgctggtaagctgcaattgccataccgctaatttgcgactctgtcgtctgctgtgccacgacgcctgccagccagttggcgaccgcgcctgttgccagcatatagatcccggttaatacgccagacattttcagacgcgtgatttgcgcaatcgccaccgggtcaataaagagttcggcaaagcccattagcgccaacccggatatcatcacgcccattgacgtttgaccgtcagccgctgcatgtcgggcatcaaatgccaacaacataaagccacaagccatcagcagtaagccaaaggcaaacttcagccagacgcgcaatgttgagttgccgcggctttctggcgacgccagccaggccagtacaaccccagcgagcatcaccgcaattgcattcaccgactggaatagtgctgtaggtacttcaatattgaatgcctgacgattcacaaagcgatcgataaacaagctgatggtactgccgccctgttgtgccagtacccagaacaatgtcccgacaaacatcaacaatacaatttgccaaagagcacggcgatgttcggggaatttgatcatcatgcgggcaatgatttgtgcggcaatgaggcaaacgatcgccagcaaatatcccgaccagtcgttctccagcagcagggtaaaaaatactggggctaaacagagcatcaccactaaccagctccatactggtaaggcaaatttcacgctagtgagcgcttttttatccatactacgcgtggactggaaatgacgatgcccgcttaagaaaatcaacaaaccgataaacatgccgccacccgcaagggcaaagccaacatgccatccataccactgagcagccaggccgcaggcgattggggcggcgatagaaccgatattgcccgcagcatacagcagcgaaaaaccgccatcacgtcgatgatcgttctcgtcgtagagctcgccaagcaaacagctgatgtttgatttgaataaaccgtagccacaaataatgattgccagcgccagatacaggctaaaggttgaatttgtatcaatgcccagcaccacatggccaagggtcattaacagcgcgccggcaatcactgcagtgcggttgccgagcaggcggtcggcaagccagccgccgagaataggggtaacgtaaaccagagaagcatatgcgctgaacaggctgatggcatggttatcatcaaaaccaagctgatgggtgaggtagagaatgagtaaggcacgcatgccgtaaaaactgaagtactcccagatttggatcgccacgatatagtatatcgcgcgcggctgtgagggtgttttcatgtgttctccttatgagcaaaaaagggaagtggcaagccacttcccttgtacgagctaattattttttgctttcttctttcaataccttaacggtatagcggccatcagcctgacggtatgcaccgtgaatatcggtttcaaagcccggatagtgagcgccgatttcacacagcatctgcaggaactccagaaccggacggctttcttcggtgatcatttcacccggcattaccagaggaactcccggcggatatggaaggatcatattggcgttaatacgacctaccatttcgtcgaggtaaacttcttcggtcataccgtgcagctctttctggaacgcagcatacggagtcattaccatcgtcggcagcacttcaaatgcgcgatacatcagatccggcagattgtggtgaacaatcagtttgtggatattctgagccagttcctgaatacgcatgttttcatagaattcaggatcttcacgatacagagacggcagcatgtttttcacacgcaggttcaggtcgaacgcacgtttgaagtcagtcagagcacgcagcaggctcagtgctttggtcttatcgataccgatgctgaacaggaacagcaggttatacggaccggttttctcaacaacgatgccatgttcgtcgaggtatttcgccacgatgctggccggaataccaaagtcgctcatggtgccgtctttttccatccccggagtcagcagggtgactttgatcgggtcaagatacatgtgctcgttatcgatgtttttgaagccgtgccaggtgctgtcagaacgcagcggccagcattcagtcgtatcgatatgatccggctgccatacatcaaagaaccagccatcagattccgttctcagacgtttgatctctttacggaatttgatcgcacgttcaatggaaccgttgatcagacgtttacctgcattgcctttcatcatcgccgcagcggtttcagtggacgccacgataccgtagtgcggagaagtggtggtgtgcatcatgtaggcttcgttaaaggtttcttcgtttacgtcacctttaacgtggatcatggaagcctgagagaacgccgccagcagtttgtgagtggactgggtttcgtaaatcactttcccttctacacggccaccgctcataccgcatttaccttcgtaaatcggtgagaagttggtgtaaggcacccacgcggagtcaaagtggatggatttcacatccagtgttttcttgatgaagtcggtgttgtacagcagaccatcataggtagagttggtaattacagcatgtaccggccaggttgcgtttggtgtttctttcacgcgcttagcaatggtagcgtgctggaattcactctgtgggataccaccaagaataccgtaagcgttacgggtcgggcggaaatagattggcgtaacatcgctcatcatcatcaggtgggtcagcgatttgtggcagttacggtcaatcagaatggtgctgcctgccggagcagagtacatgccaacaattttgttcgcagtggaagtaccgttggtcaccatgtagctgcggtctgcgttaaagacgcgagcgatatactgttctgcttctttgtgtggaccactgtgatccagcagagaacccagttcagatactgaaatggaaatatcagatttcatggtattcggaccaaagaaatcatagaacaggctacctaccgggcttttctggaatgcagtaccgcccatgtgaccaggagtacagaaagtatatttaccttcacgaacatatttaaacagtgctttagtcagcggaggcagaatagtgttgatatattcgtcagtggtctgcttgatcttattagcaatatcttcagcagcacccagcgcatattcaaagaagctaatctgtaaacgcaggtcattcaggcttacatcgagagtggaatacgtattagcgaacgcgtacaacggcaggttctcgttcattttgctaatttcttcgcacagctcgagattatatttatcccagtcaaaaataacgccgcacagacgcgcattgttttcgatcagttttaataagtcgtcacggtcgttcgggtaaacaatctggaagttcagacgttcaagcgcgcgatgaagttcacggatgggttcttctttaaaataaacccccatgtgattcaatattgcaataacgttcatagtcatatctccaggtaaaaaaggcccctcccaacacatgggacaaaatgaaaggaggagcctcggaaaatacttttaattaatgtgcgttagacgcggtgtggttatccattgagtggctctggcgctcgtgcattttgcgagcgtagaacatcaggataatcaggctgacgatgaaggtacctgccagctcgaaggagcttgcgcccatcagcgcgatgaagcagaacacgcaacccagtacagagcagatcaggctgacaaagttgcggatgttaacgccttcaaaacgaatcaggtcaacgcaagagtagaagtacggcagcatagtcagcagtactgcgataccggtcagttcaccgaacaggtcagatgctttaccaccggcagagttcatcagagtgatgaggatcatcagggcagtcattttcactgcagccagcagcagaccttttttcggaataccgttgctgtcgacttcaccataaactttcgggaagttaccgtcgttagcggcacgtacacctgcctggcctaccaacatcatccaggagcccagagaagtcaggcacgcaaaggcggtgaatgcagaaaccagcggcgcagcccagttaccgaggatggttgaagcactgattgcaaacggagcaccggaagctgccattacagaagatggatacataccggaaagcacctgagtcgcagcgatgtaaacaatacctgctaaaccagtacccagcatggttgccagcggaacggtacgtttcgggtttttaaccataccagtacttactgctgcggattcaacacccacgaaggcccacaggcagagcagaatacttttaatgatcgcatgaccatcagtggtatccgcagtattccagttagctgcataagttgccgcatcaaaccaatgccagccaacaatagcagtcatcaccacaggaataagaaccagcaccagaccaatagtggttaaacggcttacccaggtaccgccgagcatatttacaaaggtaaatacccagacgatagcaatacaggcgatacccgccggaacaggatcatttaatactgggaagaaggtggaaagataagataccgcggtaataccaatcgccaggttaccaatccagttagcatggtaataaagaacacctgtctgaaaaccaaatgcaggggaaatttctccggcataagcaattgggccaccttgttgcgggttttttgttgccagtcgggcatatacatacgccagcgacattgcaccaataatagagataatccaaccccagatagcaataccaccgatacttgctaggttcgcaggtaataatgcaataccgctccccatcatattaccggcaacaacaccggtacaggcaaatagcccgatcttcttggcagaactcatgctcttctcctaatttcatttttgaatttggagtccgggtcatgatgtataactatttcctgaccagaccaaactggcgctaagaatactcacgaaaaaaggattaatcctaaagattaggtgaaataacacaaaagtttctgtaagtgagaacttgaggttttttattaacacatcaggatcgcaagttgatatcatgaaaagataaacattcaatgtttacaatggattgcgggatattctctggttaaatttatgtaataaaaattatgcggcaaataaattgccgcaacatattataccaacagaaacatacaaaaactcaacaacaaatattcccgagcataaatcaacccgggagttacttattctgaagcgagaaatttgtcgagataaggtacaacataaggaacagaagtctggaatataccattttcaatccagtaaagggtgtttgcccctgggcgtaaattaaaggcggtgagatatgcatcagccgcttcccggttcatccccttcatttcataaaccttgccaagcaacacataatttagccaggacatttcaagatcaatgccagtatttatcgcctggtaagactcatctgttttaccttttaccagagcactgaccgcttttatttgatatataatggataggttattcaattccggtagtgtaacaatgttgtctatttctgtgttcagtgctgctaattgtttttcatctaaagggtgttgagaatggcgcacgatatcaactaatgctttttctgctctcgcgtaggtaaattctggggatgattgaacaatctcacctaataattcactggcacggttcaatgatttatcatcgccatgcagtaaataatcatgtgcctgataaaaattagttaataacgcaccacgatgaggcaatatttgctggagcgtctcctgcattcgttgtggccacggttggtttaacgcttttgataaactctccagtaaatcattttgaatcgccagctgattaccgttagtgatgacataacgtttatccagcatggttgaaccatctgcattgtctaccaattttatcgacataaagcattgttgagcacggtattggcgctgattaacaaacgcaatagataatgttttaccggaactgctcggttcatcaatgttgtagttgattttgtcatgcaccataaaggtggagaaggtgttaagtgatgtcgccaccaaattacccacgcctatcgcgtaagagagctgatacggggaactccagctgttacaacttttatttaccatattaatgtcaatatcgcgtggattgagcaaaatacgcgatttgctcataggaagacgtgtatcaagagttgaaaacgctaccagtgctacacagatacctaacgacaacaggaaaaaaaaccatacccaaaaggtagtgaatcgtttgcttttaactggggattgttcaggtggcgttgcggtgttttgaatgttaagactgtgggagggagaatctgtggcaggaaccgcctctggtatagggggaggcgaagatagcattatttcctctccctcttcttcgctgtaccagataaccggcaccattaatttatagccgcgctttggtacagtagcgatatagacaggactatcttcatcattatcttttaatgacttacgtagttctgagatactctgcgtcacaacatgattggtgacaatacttctcttccagacattatcgataagttcatccctgctaagtacttcgccactgtgttgagcaaagaaaaccagaagatcgattaatctcggctcaagggtaagttgacgcccattgcggctaatttggtttatggacggagtaacaagccattcgccaacgcgaactacaggttgttgcataatagaaactcattcgaaaagggaatgatgcaatgataattgccacaacctatttttaccatctatagatgggtttatttacatattattggtgaatgtaagacgttatttttaccagccataaacttcttgattacatagtattacgaaaggattttactgagaaccagaagtaatattccttaccatcaaaattcatcatctttgccaaagaaaaatgttcagaaaataatccatggaaaattgtccggagcgcttactattttaatggattgttagtctttgcatgagcaagcggactgatacatttctctttgttctcattcagaaaatctcatcagtcggcgttcagaccggtgttgtgctttatggatgcgttacgctcctgatgacgtcatttgacgttcaacaacatcacggggccgcacgacatttcacgtcagttagtgctatcgctcaggaacaaattttcccgaattgggatatgcccgcaaattgctggtgatgaggggagaatctggttgagttcgggagaattgatttggaggcagaacgcttaaatcgtggcgtcctgaaacgaaaaacggacctccgtggaggtccgtttatatgaatttggtgcccggactcggaatcgaaccaaggacacggggattttcaatcccctgctctaccgactgagctatccgggcaacggggcgcattaaaccgtaatctgcacatctcgtcaacctaatttcagtaaaagcgattcaactgcttaagattgcggcaaatcgcttcttttctgtgtttctgtcaggtcaatgcaccaccctggcggcagcgggcgaagcgcaggatatcttccgccagccgatgtgcagtgtcgacatccgcctggctacgattcaccagcattcggcttaaacagccttccagcaccagttccatctgctttgctaccatcgccggatcgtcaacttccagtgtggttaacagttcgtgggtgaaatcgtaggccgcgcttttttgctgatcggccagttgatgaatagggtggccaggatcgggataaaacgtacaggcagcgataaatagacagcccggatagcggttgtttttaacgcactccgataacgcctgataacgtgccagcagcttttgttcggcggtttgcgtttcgtccagcatcagctgacgacgccagacatctatctgttggctaagataacgcagcgcatcgtagaggattgcctctttgtctggccagaagcggcgtagctcgtccagtggataatccacacgttcagcaaccatctccagcgtggtgttggcaatcccttgtaattctaataatttcagggcttctcccagtacatcttcacgttgcacgctattttcctccgtctttcccactgcaagtgtcgttcacggttggcgatcgcgcaaatgtgcgctgaaggtttcagcatccataaagcccgtgacgcgtgcttgtggatgctcctggccttgtccgtcaaaaaagagaattgtcggtaggccaaggacattaagatgctttaacagcgccacatcttgtgcgtcgttggccgtgacgttggcctgaagtaagaccgtgtctgctaacgctttttgcacctgcgggtcgctgaaggtgtatttctcaaactctttacaggcgacgcaccagtcggcataaagatctaacatcaccggtttgcctttggcttcaacgagcgcctgatttaactcatctaccgttttgatttgtgtaaagttgagatgcgtctgagtttgcgcggtatgcgtcgcaccaaatgcccaatcctgaagtgggcgcacgctaaccaatgccgctgccagcaggattatttgcaccacgcgcatccagccgcgtttagcctgtaggctggtgataaaggcccagccaaagaatgcgacacccagcgccgaccacaagcgtaatccccatacatcaccaatcactcgctccagcaggaagaccggcagtgcgaggatcacaaaaccaaacgcggttttgacttgttccatccacgggccgcttttcggcagcaagcggttaccaaagacggtaattagcatcagcggcaggcccatgcccaacgcatagagataaagcgtgccgccgcccagccacatgttcccgctttgggcgatatacagcagaatcgcgctaagcggtgcggtggtgcatggtgaacagatcagtccggcaatcgcccccataacaaacacaccgccaggtgagccgccctgttggcgattgctcatcaacgtgagacgtgtttgcagcgaagaggggagttgtagagtaaacaagccaaacattgacatcgccagcaaggtaaagacgatggcgaggccaatgagcacgtatgggtgctgtagcgccgcctggaactgtaaccctgcggcggcaactaccagacccagcgccgtgtaagtcagtgccatcccctgcacataaataaaggtcagcaacaatgctctggcagtggagagccgctgtttaccacccagcacgatgccagaaatcagtgggtacattggcagcacgcatggcgtaaaggcgataccaataccgatcaacaacgcccagagcgcggaaaagggcaattgcgcggtgggctgctcttgctgcggaacagacacaggctgtgacgctgcgttgttggcgaccacttcgcttaacggaacggttttggtttctggcggataacagaaaccggcatcagcacagccctggtaggtgacagttaacgtcgctcccgcacttgcctggttgatggtgacgggaagtgtcagccgatcgcggtaaatctcgcttttgccgtaaaactcatcttcatgccagacgccttgcggcagctgcacgtcggcaattttcgcgtgttccggcgtaatgcggatctgtttacggtagaggtagtaaccgtctttgatctgccaggtcagattcaggtcatgttggttttgctgaaaatcaaaagcaaaggcttgatccgcggggacaaattgtgaacgtcccggcgcgtcgaataatccggcaaaaacggaagtgctgcaaagtagcaggatcagcgtaaagatgcgttgagccatgagaggtaatctgtgtctccgtgtgtaacaggtaaaaccagaagttccggggtttgatatggatgatgagacttcaggcattccagcagtgcctgctggtgagatacggtagtttttaaaatcatctgcacttcgtattcttgctccagcttaccttcccagtaatagagagaggtagcgccggggatcaaggtcgcgcaggccgccagtttttccgccagcactttggcggctaaatcctgggctgtcgcttcatccggtgcggtacatagcaccacgacagacgcggtattcgaacttttttcatcaagcataaacacctcgcaagaacagatggaaccgcaagagagaggtcactatacaacggacgggggaaggatgttagtcggcgggaaagaaagcggggcttgaacgccccgcgattggtcattacagcatgaagctacccagcacgaagccgaagcaaacggccagggcaacacccagagtacccgggatgaagaacggatggttgaagacgaatttaccgatacgggttgtacccgtgtcatccatctgtaccgcagcaaccagcgtcgggtaggtcggcagaatgaacagaccagacaccgcagcgaaagaagcaacagcggtcagcggtgaaacgttcagtgccagagccatcggcatcagtgcttttgcggttgcagcctgagagtacagcagagcagaagcaaagaagaagatgacggccagcagccacggatgaccctgaatcacttcaccagcggtatctttgatccagtcgatgttgttggaaacgaaagtatcgcccagccacgcaacacccaggatacaaatacaggcgctcatacctgctttgaaggtgctggagttgaggatgttgtcggtatcgactttacagataacggtggtcagagttgcaacgctgagcatgatgatcaggattgcgttggtggtgttcatcagcggtttttcaaccagacccatgcttgggctgttgatgattgcatagataaccacgccaactacgcccagcaggaacagccagacggacgtttttgcaccggatttgatttcaatctgcttttcaccgcgcagttcaaccaggccctcttccagacgcttgcgataaatcggatcgtcagagagtttggagttgaacagcatagtgaccagaaaggacatcaccagaaccgccagcagggtggacgggatgaccacggagagcagatggaggtagctgatgccatgaccttccatcacggaagacatgtaaaccactgccgctgagattggcgatgcggtgatcgcaatctgcgcggataccactgcagtagacagcggacggcaaggtttgacgccttgttccttcgcaacttcagcgataactggcagtgtcgccagagatatgttgccagtaccagcaaagatagtcaggaaataggtcacgatcggtgcgaggatcgtgatgtatttcgggttacggcgcagcagcttttctgtctgatgaaccagatagtccagaccgccagcaacctgcatggcagaaatagcggcgataaccgccatgataatggaaatgacatcgaacgggatgttaccgggtttaacgccaatagcggcaagaaccagcacccccaatccgcctgcaaaaccaatacctattccccccaatctggcgcccaagaagatcgccagcaaaactatgatgagttctacaactagcatattagccttccttgttttttaacaagttgatattaggttgttatttttaagttactgctcacaagaaaaaaggcacgtcatctgacgtgccttctttatttgtactaccctgtacgattactgttcgctttcatcagtatagcgttttgctttgtaagccgggtgcatcagattctgtacggagaaaatatcgtcaagttccgcttcagtcaacagaccgcgttccagaacgacttcacgtacactcttaccggtttcggcacagattttacccacgatgtcaccgttgtggtgaccgatgaacgggttcaggtaagtaacgataccgatagagttgtaaacgtaaccttcgcacacttctttgttagcagtgatgccgttaatgcatttttccagcaggttgtagcaagcgttggtcagaatgtgaacggattcgaacatggcctggccaatgaccggctccataacgttcaactgcagctgacctgcttctgctgccatggtaacagtggtgtcgttaccgatgactttgaagcatacctggttaaccacttccggaacaaccgggtttactttagctggcatgatggaagagcccgcctgcagttccggcaggttgatctcgttcaggccggcacgtggaccagaagagagcaagcgcaggtcgttacagattttggacatcttcacagccaggcgtttcagcgcgccgtgaaccataacataagcgccgcagtcagaggtcgcttcgatcaggtcttcagccggtacgcatgggaagccagtgacttcagccagttttttcactgccagcggagagtactctttcggcgtgttcagaccagtaccgattgctgttgcgccaaggttaacttccagcagcagttcagcggtacgttggatatttttcacttcttctttcagcaggatgctgaaagcgcggaattcctgaccgagggtcatcggtactgcgtcctgcagctgggtacgacccattttcaggatgtcctggaattcgacagctttacgttcaaagccttcacgcagttggttaatcgcatctaccagcttaatcagggaagagtaaactgcgatacggaaaccggtcgggtaggcgtcgttagtggactgacatttgttaacatggtcgttcgggttcaggtactgatattcacctttctggtgacccatcagttccagaccgatattggccagcacttcgttggtgttcatgtttacggaagtacctgcgccgccctggtagacgtctaccgggaactgatccatgcattttccgttgttcaggacttcatcacatgcggcaatgatggcattcgctacacttttaggaatggtttgcagctctttgtttgccatagctgcggcttttttaaccattaccataccgcgaacaaattcaggaatatcactgattttgttgttgctgatatagaagttttcaatcgctctcagagtgtgaacaccatagtaggcatcagctggaacttccctggtacccaacagatcttcttcgatacgaatgttgtttgacatgtgaaccttctttttcaagctgccaatgatttgctttaaacacacagaatatatgtggtttcgaatgtttttcgaccgacgattatcccctgcatcgaccgaatacccgagatcatatgctgcttgaggatttctaccgtaatctggatcactttaagtgtcggtttttaccccttaattattaatttgtgaaatagatcaccgctttgggattactaccaaaaatagtttcgcaaacatcttgaaattttgctaatgaccacaatataagctgaacgcgattcgcaacccattcaggtagccgggttttaccggctgctattacaggagaaacctttgcgctggttaccttttattgccattttcctttatgtctatattgagatttcaatctttattcaggttgcccatgtattgggggtattgctgaccctcgtgctggttatattcacgtcagttatcgggatgtcactggtacgtaaccagggctttaagaatttcgtgctgatgcagcaaaaaatggcggcgggtgaaaacccagcggcggagatgattaaaagtgtttcgctgatcattgccggtttgctgcttttattaccgggctttttcaccgacttcctcggtcttctgcttttattaccgccggtgcaaaagcatctgacagtgaagttgatgccgcatttgcgcttttctcgtatgccaggcggcggttttagcgccgggaccggtggcggtaatacttttgatggtgagtaccagcgaaaggatgatgagcgcgaccgccttgatcataaagacgatcgccaggattaatgtcgaaacgccggattatgtggttatgccattttccggcgtttttcgttttggcagcaacagccataaccccgccagcatgatcagcgcatagagacttttccagccgaccattgccagtaacagaacgcataacagcccgccaaccaccgccagtagtcgataacgtccttgcaataatttacagcctgccagcatgcataacagataaatcataataaagatgccattggcataaataataagagcgtccagattgatctctaaagcatgaatcaccaacgtgctcaccacacagcagccgagcaccgcattgagggcattattcgggatatggcgagaagagaggcgtgccaggtagtggtcaggattatgttgcgcctgcgaccagaccaggcgggcgaagctctgtatataaatgttgagactggcaaagcaggccagatagccaatcacgcaggcaatccataacgctcctacaccgaacaactgcactacaatttttggaagcgatgctgccgccgccattttttcaccataggcgtcgaagtgtaagacgactaccgtacagccccagtagactaatcctgccagcagcagaccaatcatcaatgcgcgaggaaaatcacgctctggatttttaaattccgaggcaagatgggcaaatgcttccagaccgacaaaacaccagaacatcactgataacgcagcaaataacccggtaagttcgatattaccaggtgccgggaaggggatattcgcaggtttgatatcgcccgcccaccagatagcgacaatcagcgcgacgataagtccggcaataacggtttgtagattagcactggaactggcaccgcgagtaccgatataccacaccagcgccagcgtaccgagttctgccaacaacagttgccagctatgccagccaaacattgcctggccgaacccggcggcaatttgtagcgcggcaggcaaacccacgggaatgaccgataaaaacaaccagccggtgactcgctcaagtcgcgaaccaaacgccataccgacgaagtgcgcgacaccgcctgcgctgggatagtggcgacccagaatcgcaaacacaatcgcaatcgggaacactaagataatcaaaacgggccacgcccacaggctgttattgcccgctaccagcgcagctaacgcaggaacggcaaacacgccagtgcctaataatgacgtcgatagcaggccaatgccctgggccagccccagttcttgtttgagtccactcatgggttgatatccgattgcgcccaaattttgggcaactgcgtagattttcgatggtagcacaatcagattcgcttatgacggcgatgaagaaattgcgatgaaatgtgaggtgaatcagggttttcacccgattttgtgctgatcagaattttttttctttttcccccttgaaggggcgaatcctcatccccatttctctggtcaccagccgggaaaccacgtaagctccggcgtcacccataacagatacggactttctcaaaggagagttatcaatgaatattcgtccattgcatgatcgcgtgatcgtcaagcgtaaagaagttgaaactaaatctgctggcggcatcgttctgaccggctctgcagcggctaaatccacccgcggcgaagtgctggctgtcggcaatggccgtatccttgaaaatggcgaagtgaagccgctggatgtgaaagttggcgacatcgttattttcaacgatggctacggtgtgaaatctgagaagatcgacaatgaagaagtgttgatcatgtccgaaagcgacattctggcaattgttgaagcgtaatcctcgcacgacactgaacatacgaatttaaggaataaagataatggcagctaaagacgtaaaattcggtaacgacgctcgtgtgaaaatgctgcgcggcgtaaacgtactggcagatgcagtgaaagttaccctcggtccgaaaggccgtaacgtagttctggataaatctttcggtgcaccgaccatcaccaaagatggtgtttccgttgctcgtgaaatcgaactggaagacaagttcgaaaatatgggtgcgcagatggtgaaagaagttgcctctaaagcgaacgacgctgcaggcgacggtaccaccactgcaactgtactggctcaggctatcatcactgagggtctgaaagctgttgctgcgggcatgaacccgatggacctgaaacgtggtatcgacaaagccgttaccgctgcagttgaagaactgaaagcgctgtccgtaccgtgctctgactctaaagcgattgctcaggttggtaccatctccgctaactccgacgaaaccgtaggtaaactgatcgctgaagcgatggacaaagtcggtaaagaaggcgttatcaccgttgaagacggtaccggtctgcaggacgaactggacgtggttgaaggtatgcagttcgaccgtggctacctgtctccttacttcatcaacaagccggaaactggcgcagtagaactggaaagcccgttcatcctgctggctgacaagaaaatctctaacatccgcgaaatgctgccggttctggaagctgttgccaaagcaggcaaaccgctgctgatcatcgctgaagatgttgaaggcgaagcgctggcaactctggttgttaacaccatgcgtggcatcgtgaaagttgctgcggttaaagctccgggcttcggcgatcgtcgtaaagctatgctgcaggatatcgcaaccctgactggcggtaccgtaatctctgaagagatcggtatggagctggaaaaagcaaccctggaagacctgggtcaggctaaacgtgttgtgatcaacaaagacaccaccactatcatcgatggcgtgggtgaagaagctgcaatccagggccgtgttgctcagatccgtcagcagattgaagaagcaacttctgactacgaccgtgaaaaactgcaggaacgcgtagcgaaactggcaggcggcgttgcagttatcaaagtaggtgctgctaccgaagttgaaatgaaagagaaaaaagcacgcgttgaagacgccctgcacgcgacccgtgctgcggtagaagaaggcgtggttgctggtggtggtgttgcgctgatccgcgtagcgtctaaactggctgacctgcgtggtcagaacgaagaccagaacgtgggtatcaaagttgcactgcgtgcaatggaagctccgctgcgtcagatcgtcctgaactgcggcgaagaaccgtctgttgttgctaacaccgttaaaggcggcgacggcaactacggttacaacgcagcaaccgaagaatacggcaacatgatcgacatgggtatcctggacccaaccaaagtaacccgttctgctctgcagtacgcggcttctgtggctggcctgatgatcaccaccgagtgcatggttaccgacctgccgaaaaatgatgcagctgacttaggcgctgctggcggtatgggcggcatgggtggcatgggcggcatgatgtaattgccctgcacctcgcagaaataaacaaacccccgggcagaaatgtctgggggtttttcttttggtcatctttcgagtataagattcagacacggacgacgcgagtggcgtccagctcattgattatggggaataacatgcacgtaaaatacttagcagggattgtcggtgccgcgctactgatggcgggttgtagctccagcaacgaattgagtgctgccggtcagagtgtacgcattgtggacgagcagccaggcgcagagtgccagctgattggtactgcgacaggtaagcaaagcaactggctttccgggcaacacggagaagagggcggttctatgcgcggcgcagcaaacgatctgcgcaaccaggcggctgcaatgggcggtaacgtgatttatggcatcagcagcccgtcgcagggaatgttgtccagttttgtcccgacggatagccagattatcggtcaggtttataagtgcccgaactgatgtgatccagaggctgggtgacaaacgtatcattgcctgatgcgcttcgcttatcaggccttgtattatccctccagtgcagagaaaatcggccagttttctctgcctgcagtccgcatgccgtatcgggccttgggttctaacctgttgcgtagatttatgcagcggactgcctt

SEQ ID NO: 68 - DNA, 37492 bp, Escherichia coli
  source 1..37492: mol_type = genomic DNA
aaatggcgaagaaacggtctaaataggctgattcaaggcatttacgggagaaaaaatcggctcaaacatgaagaaatgaaatgactgagtcagccgagaagaatttccccgcttattcgcaccttccctaagttatcgatgatcctcattgcttattctcgctgtgcaaattcgtggaaaagaaccctgcgccgaactcatacgacgccaggttttgcgcggtagcttctccgccagaaaccggcagcaacgtaaagccgtagctgaagtcacggaaccagacgcgccaggagtccagcacctcgctgccccaggagttggagccgaggccaagcagctggtggtcgaggttcagggtgatgtcatcactgcgctgcagctcgttacagtgctgggcagcgtggatgttttcctgggtatagcgccaggcgctgaagttaattgggcgctgcggaaccaccagcagaccgttgccgtggcggttagtcagtgccgtccagcggacatgctgacggttgccgttgttctgcgggaagggatagttctcgaacatggcatcgacggtgctgcgccagatatcgatgatgttagcctgctggctgtcggcgtagttttcgcccggtccacgaccgtaatacgccacctgatcgtattcgccgttaatccccatggtgaaaccgatgcacggaatgatgtgcggatagtcgccgtaacgctcgccggaaagcgccacgttaacctggccatcggcagcgatgcgccagatgtaggtgcagtgcatcccgaagtcaaacaccggcggggcaataactgtgcggctgatgatcaacacttcaccatcgctctgttctacggcaaagtcgcgcagatgttcctgcatgatctgcaaatgattcggttgccacagcccttcgtactcctgcttgtggttgtcgatcattggcttgaagaagttgatctttggctcgcgggtcagcagcgactcgccattcacctgccaggatgtcggtttgccactcatttttgagaaggtgatcgcgaagttgtagccgcgaacggtgcagctcaaacgatcgtcttccagcgtcagcggacgcgcattatttggtgcgaaaggcactggttgcgcggtgttttccttcagcgggaactgataagtggcgatagaatgcccggcttcgctgtagcgggtgcgggaatctttggtcaccgtaatgttgaggaacgcttcgcgggcgtccagctgcggcagcgtgatctgcaagggggcttcgctgttcggcgcaacgtcgcgcagtttaatctgctgcgtcgcgagcgtttcaccttcgacgcgcacctctgcgtgcagggtgtagtcatcaagcgtggtaaaccacagtttattttcgactttcagctcgccgtgagtcagatccagcgcgtggatttttaccggcgcgataacctgtttgtactctttcaggcccggtcccggcgtctgatcggaatagatcaaaccatcaagacagaagttatagttgttgggatagtcgccgtagtcgccgccgaatttataccagacgttgccgttgtcatcctgcgcctggatcccgtggtcgcaccattcccagacataatgtccctgaatgcaatcgtgcttatagaagacgttctggtactccgtcagcccgcctggtccgttccccatcgcatgagcatattcacagatgatgcgcggcttcggatgcgggtattcaccaaactcattcatcagcggcacgcgggtgtacatggtggaaataatatcgaccacttcagcatcgcgatcttcttcgtaatgcaccagtcgcgtgtcatccagcgccttcgctgcgtggtacatcgcgcggatgttacagccatagccggattcattgcccagcgaccagatgatgatcgacggatggtttttctgcgcgtgaatatggcgaacaatgcgctcgacgtagactttttcccactgcggatcgtcggtaatacggctgatatcgccgacattagcaaagccgtgcgattcgacgtcggtttccgccatcacaaacaagccgtagatatcacacagttcgtaaaaacgcggatcgttcgggtagtgagcggtacgcacggagttgatattgtgctgcttcatcaactggagatctttctcgacgcgatccattccaacggcgcggcctttgcgatgatcgttgtcgtgacggttgacgccgtgcagcatcacataacggttattgatccagaacagaccgtcgcgcactttgatatcacggaagccaacgcgttgtggcaccacttccagaacgttgccgttggcgtctttcagcgtcatgaccagatggtaaagataaggggattctgctgaccattgctgcggctgttcgacagtaaaagcaaagctggcgctggtcagtttttcaattgccaaatgatcaatggcgctgctgtgcaccacgcgttcgccatcaaacagggtatattccagcgtcgtgacgacaggggaggcggcgagattttccagcaccacttcgcaggaaagcgtggcatcgcaataggcttcgtcaaagtcggtacgcacagtgaaatcgttaatatgcgttaggtgttttccgaccagataaacatcgcggaagatccccgctgaccaccacatatcctggtcttccacgtaggtagagtccgcccactgcatcacgcgcacacacaacaggttgtcgccggttttaaccatcgcgctgatgtcaaactctgcggtcaggcgactgcccttgctgaaacccacatactgaccgttaacatagacttcaaaataggtttcgacgccgtcaaatttaatcagcgtctgtttaccctgccagccgtcgctgagggtgaaaatacgttgataggcaccggttgggttatcgctggggacaaacggcacatcgatggggaacggaaaaccttcgtcggtatattgcagtttgccgtgaccttccatttgccacatggcggggacggtaatatgcccccagtcagccattaactcagaggtgaaggcttctggtacttgcagcggatggtcaaaaaagtggaaattccactgaccgcttaagggcagaaacaggctgctggtttcgcgggcaaaggtacgcgcttgcgcaacagaatcatatgaaaaaaagtacgcacgcggcgcaagtcggttttcgtgggtgagctgaatgttttcccagcgattcatagggcctcccggtagagagaaatcggaaccattcatggtgatggtagtttgtgtaattgctggggagtttagtaaaatttttactaaaaagtagcaggtaaatgcatttactttaactggatcacgaaaataaacggcagcactgtccggcaaaaacgattgccggacagtgtgtaaggggatttaacgggtcgtgccgcgcagttttaatttgctgggaacgaagactaacagcggcagcgcgcgaccatcgcgggctttttcatacaccaggttaacgccctgacttcccatcatctcggaatggatgcgcacggtggagagcggcggaaaggtaaatcgcgcggtggggatatcgttaacgctgataagcgaaatatcctgtgggatgttcaggcctcgttcatgaattgcccgcagtacgccgatagcaatggaatcggaagcaacaaacagtgccttcggatagtcttcccgcgccagcatttgttttgccagttcataacccgacgaactggaaaaaccgccgcgccagatatcctcttcgcgtaccacttgtttcagtcggccatattccgcaaaggcgacctcacgaatatccgccttgccaggctcatcttcaccgccaataaaaccaatacgattaacgccctggttgatatagaagtcgatgatttctttactgatgcgtgccagatcgatatccaccgcatcgtaaccgctgccgggttcgtgaaagtcgataaaacagatattgtcggtcaacgcacaggcggcggcgcgcagggcgggcgtgggtttgccgacaattaaaataccggtgacgtttttaatgtctggtaatccgctgtgttcataacagttggtgagctcaatgcccagcttttcgcactgagtttcaatgccgtggcggatcgccagatagtaaggatcgttgatctccagctcctgttggtagctgtagatagccagaatatggtgttggttgactgcacctgtctggagtttacgggcactactggtcttgtactccagcttttcggcgatctcgagaatgcgatgtttcgtctcttctttcacattcaatgtcggatcgtcatttaagaccctggatactgtcgccagggatacgccagcttcgattgcgatgtcttttagtgttgccatgtttaccttttttactttccctgatgtgcgcccccattgtagaggaagtgcttatcgggtcacctgttttcagtaaataaagcgcgtttctttgacgctgtaacggtaacacagcggctcacgaatgtgatcacgcctgcattctccatttttagcctacaggattgagaaaaacttttgctatagtttagtaaaattttacccgaagggaggaaacaatggaaaccgtggcttacgctgattttgcacgtctggaaatgcgcgtcggaaagattgtggaagtgaaacgccatgaaaacgccgacaagctgtacatcgtacaggttgatgtgggggaaaaaacactgcaaaccgtgaccagcctggtgccgtactacagcgaagaagagctgatggggaaaacggtggtggtcttatgcaatctgcaaaaagcgaaaatgcgtggtgaaacgtcggaatgcatgctgttgtgtgcggaaaccgatgacggcagtgaaagcgtgttgttaacgccggagcggatgatgcctgcgggcgtacgcgtcgtataaaaagatcggatggcgacgtcgtatcgccatccgatttgatattacgcttcttcgacacttactcgcatggccgccagcgccttacgcgccgctttgatcaccagttcacactgttcaatggtcagtgtcagtggcggttcaatgcggatcgttttggcgttattgagcgttccggccaccagtacgcgctggcggaacatctcgctggcaaagttatagccgatttcgttatcaacaaactcaattgccatcaacatccctttaccacgcgcttcctgtaccagatcgggatattcccgcgccagttgacggaaaccgtccagcaacatatcgcctttttgctcagcctgagccggtaagttctgctccagcaacacattgatggtcgccagcgccgccgcacaggccagcgggttgccgccaaaggtggtggtatgcaggaatgggttgtcgaacagaactgaaaacacctcttcagtggcgatggtcgcgccaatcggcatcacgccgccgccgagcgctttggcaaggcagaggatatccggctgtacgttctcatgctcgcaggcgaacatcttgcccgtgcgccccatgcccgtttgtacttcatcgaggatcatcagtgcgccgaactcatcgcatagcttacgtacggcggtgagatagcccggcggcggcagaattacgccaccttcaccctgaatcggttcgaggatcaccgcagccacatcatcaccggtttttttgcactcgttaagagccgtgcgcatggcttcgatattgccaaacggcacatgacggaagcccggcagcagtggcataaacggtttgcggaaggtcgatttcgccgtggccgacagcgcgccaagtgatttaccgtggaacgcgccgctggtggcaataaaagtaaacttgccgcgcggtgactggtaagctttcgccagcttcagcgctgcttcaacggactcggtgccgctattacagaagaagctgtatttcagtttaccgggcgttagcgcagcaagggttttcgccaacatcgcccgtaacggatcgagcagctcctggctgtgcagcggttgtttcgcaagttgattctgtacggcggaaaccacaactggattacggtgccccacgttgaaaattccaaaacctcccaggcagtcgataaactcctgtccctgggtgtcgacaagcgtatttaaacctcccgcttgccactctacggctccgtaatccccgccggcggtaacagatttgcgatactctaaaaaccccggattgacatgctctttgaagtattcaatcacctctcggttaagtgctttcatctcctcatgatccagcgttcgcttttcaatgagattcagggcgtgggcgctgcacgctaaagccgatgcgctcgaaggtaacctgttcaaaatatgctccggaggctcgcgtatcacatgataccgatttaagtattgcagggattgcgccactccggctgcgatcgcgaaaatcgggataaacacaaatttggttatcatttgtgcaatatttaatgctatttgttaacatttgttgttattttgcacggtttttgtcgggtatggatttgatgattgctgcgcaaatgcacgttttcagggcaataattgcctgatttttgggcaagataattaacgttttcgtatagtaacagagtgaaagtattttaaatcaaagaattagatttgtgctttaatcgcaaattgcgatctaaatcaaattaatcggttaaagataaccgcagcggggccgacataaactctgacaagaagttaacaaccatataacctgcacaggacgcgaacatgtcttctcatccgtatgtcacccagcaaaataccccgctggcggacgataccactctgatgtccactaccgatctgcaaagctatatcactcatgctaatgacacttttgtgcaggtgagcggctttaccttgcaagagttacaagggcagccgcacaacatggtgcgtcacccggatatgccaaaagcggcgtttgcggatatgtggttcaccctgaaaaaaggggagccctggagcggcatcgtgaaaaatcgccgcaaaaatggcgaccattattgggtgcgggccaatgcggtaccgatggtgcgcgagggaaaaatcagtggctatatgtcgattcgtacccgggcgacggatgaagagattgcggcggtggagccgctgtacaaagcgctgaacgccggacgtaccagtaagcgtattcataaaggcctggtggtgcgtaaaggctggctgggtaaactgccttcattaccgcttcgctggcgggcgcgtggagtgatgaccctgatgtttatcttgctggcggccatgctttggtttgttgctgccccggtggtgacgtatttcctctgtgtgttagtggtattgttggcaagcgcttgttttgaatggcagattgtgcgcccgatagaaaatgtcgcccgtcaggcactgaaggtggcgaccggagagcgtaatagtgttgagcacctgaatcgcagcgatgagctggggctgacattacgcgcggtagggcagcttggcctgatgtgccgttggctaattaacgatgtctcaagccaggtgtccagtgtcagaaatggcagtgagacgctggcgaaaggcaccgatgaactgaacgaacatacccagcagacagttgataacgttcagcaaacggtggcgaccatgaaccaaatggcggcgtcggtgaaacagaactctgccacggcgtcggctgccgataaactttctatcaccgccagtaatgcggcagtgcagggtggggaggcgatgaccacggtgatcaagacaatggacgatatcgccgacagtacccagcgcattggcaccattacttcgctgattaacgatattgcatttcagaccaatattctggccctgaatgcggcggtggaagcggcgcgtgccggcgaacagggcaaaggttttgcagtggtggcaggggaagtgcgtcatttagccagccgcagcgctaatgctgccaacgatattcgcaagctgattgatgccagtgctgataaggtgcaatccggttcgcagcaggtacacgccgccggacggacgatggaagatattgtggcacaggtgaaaaacgtcacccagttgatcgcccagattagccattcaacgctggaacaggccgatgggctttccagcctgacccgtgcagtggatgagcttaacctgatcacccagaaaaatgccgagctggtggaagagagtgcgcaggtgtcggcgatggtgaaacaccgcgccagccgactggaagacgcggtgacggtgctgcattaatcggtatgccggatccggcggttggagcacaatgcctgatgcgatgctggcgcatcttatcaggcctgcggggtgtgtagcgggtgtaggccggataaggcgcgtcaagcgtcgcatccggcaattgcaccgcgccactggcggatgcggcgattaatccagttgcgtaatatcaaaagcggcgcggtcgatcaccgcaatgatcttttttatttgtgcatcactgatatcgctctggttgacgcgtaaatccagcaccgctttaaaattatccagcgcccgcttcatttgcgggttctggcgcagcgccgcgccaacgcaacgcgctttgatgcgttcttcaatcatctccacctgttcgcggttttcttccagccactgcgcgccttgttcggtcagcgcaatctgcttcttaccaccttcctcttcgcggatggtaatcagcgactgctcctgcagaaaatccagcgttgggtagatgacgcccgggcttggggtgtaattcccctgggttaggttctcaatcgctttaatcaattcgtaaccgtggctgtcatcgcgcgagagaatatccagaatcaccagacgcaattcaccgtgaccaaagaaacgttgccgacgaccgccgccgcgaccgtggcgaccaccgcagcattgaccgtgttcatgctggtgaccgtgtccgcagtgctcgtgttctgacttctcacctttgcagcagccctcatggcgtggctggccttcatgtttacaacacccttcgtgatgatggctcatatcagcctccttttgcttgattagatatatctaatttatatctgatgtgagcattactgcaagtacaaaaatgatttttaaacgtggaagcacctcacatccaggccggataagacgttcacgccgcatccggcagcattgctatggcactgaatgccttcacatacttcagatatatcagttctacaaatcgcttgcatttatcatgattaacaatcattatcatttacgaaaattatttagatatatctgattactatcacgaaggcgataacaatgaataactccccccgctacccgcagcgcgttcgcaatgatctgcgcttccgtgaactgactgtgttacgcgttgagcgcatcagcgccggttttcagcgcattgtcctcggcggcgaggcgctggacggttttacatcgcgcggctttgacgatcacagcaaactcttctttcctcaacctgacgctcactttgtgccgccaacggtaacggaagagggcatcgtctggccggaaggaccacgcccaccgtcgcgtgactatacgccgctgtatgacgaactacgccatgaactggcgatcgatttctttattcacgacggtggggtcgccagcggctgggcgatgcaggcgcaaccgggcgataaacttacggtggcaggtccgcgcggttcgctggtggtgccggaagattacgcgtatcagctgtatgtctgcgatgaatccggaatgcccgcactgcgccgccgcctggaaacgttgagcaaacttgccgttaaaccgcaagttagtgcgctggttagcgtgcgggataacgcctgtcaggattatctcgcgcaccttgatggttttaatatcgaatggctggcacatgatgagcaggcggtagatgcgcgtctggcgcagatgcaaatccctgccgatgattacttcatctggataaccggcgaaggtaaagtcgttaagaatttaagccgccgctttgaagcggaacagtatgacccacagcgggtacgtgcagcggcttactggcacgcaaagtaactgatatataaaaagaaaaaggctgacgatttctcgtcagcctttgctatatctggtggcccctgctggacttgaaccagcgaccaagcgattatgagtcgcctgctctaaccactgagctaaggggccatggtagcggattataaagtaactccgtgtcgcaatccagccattaccgtgcgcctgctgtttttataaacaatgtattttcaatccgttatacttttcctggtgatgttagaaaggagtaaatatggttgaggatattttggctccagggttacgggtcgtgttttgcggtatcaaccctgggctttcatccgccgggactggttttccctttgctcatccagcaaatcgcttctggaaggtgatatatcaggccgggtttaccgaccgtcagttgaagccgcaggaggcacagcatctgctggattatcgttgtggcgtcaccaaactggtagaccgtccaacggtgcaagccaatgaagtttcaaagcaggagctgcacgcaggtgggcgtaagctgattgaaaaaattgaagattatcagccgcaggcgttggcgattctgggcaaacaagcatatgaacagggattcagccagcgcggtgcacagtgggggaaacaaacgctcaccattggttcgacgcagatttgggtgctgccaaatcccagcggtttaagtcgcgtttcactagagaaactggttgaagcgtatcgcgagctggaccaggcgctggtagtgcgtgggcgataaaaaacgccaccgaaaaggtggcgtttgtgcaaagggactagtgccgggtgcggcgtaacgcctgatccggcctaccgattaatcgtccaggaagctacgcaacacttcagaacggctcgggtgacgcagtttgcgcagcgccttcgcttcgatctgacggatacgttcgcgggtaacgtcgaactgtttacccacttcttccagcgtgtggtcggtgttcatatcgataccgaaacgcatacgcagaactttcgcttcacgcgcggtcaggccagccagcacgtcgtgcgttgccgcacgcaggctttcggtggtcgcagaatccagcggcagctcgagggtggtatcctcgatgaaatcccccagatgcgaatcttcatcatcaccgatcggcgtttccatggagattggctctttggcgatcttcagcactttgcggatcttgtcttccggcatcagcatacgttcagccagttcttccggcgtcggttcacggcccatctcttgcagcatctggcgagaaatacggttgagtttgttgatagtctcaatcatatgcaccggaatacggatggtgcgcgcctgatccgcgatagaacgggtgatcgcctgacggatccaccaggttgcgtaggtggagaacttgtaaccacggcggtattcgaatttatcaaccgctttcatcagaccgatgttgccttcctgaatcaggtcaaggaactgcaagccacggttggtgtatttcttggcgatagaaataaccagacgtaagttcgcttcaaccatctctttcttcgcacggcgggctttcgcttcaccgatggacatacgacggttgatatctttaacctgctcgatggtcaggccggtttcttcttcaatctgctgcagtttctgcagggcgcgatgcacttcttcagagacatcgtgcagtttttccgaccacggcttgttcatcgcaattgccgcgttgaaccaggtatcgctggtttcgttgccggtaaacagggtaatgaagtttttcttcggcattttgcactgctcaacgcagagcttcatgatcagacgttcttgcgtacgaacgcggtccatcatgacgcgcatgctgttgaccaggtagtcaaactgcttcggcaccaggcggaactgtttgaatacttcagacagtttcaggatctcttcctgagcggcagcgtgactgcgacctttcgctttgatggtgtcacgcgttacaacgtactgagcgcgtagttccgcaaatttttcgcgagccagttccgggtcgatgctgttgtcatcatcggcgctgtcgtcatcgccatcttcttcgtcttcatcttcgtcatcgtccagatcttcctgggaaagctcagaaccgacgtgagtggcggtaggtgccagatcttcttctgcgttcgggtcaacaaagccggtgatcagatcggacagacgcgcttcttctgcttcaacacgatcgtactgttccagcagataggtgatcgcttccggatattcagcaacggagcattgaacctggttgatcccgtcttcaatacgcttagcgatgtcaatttcgccttcgcgggtcaacagttcaacggtgcccatttcacgcatgtacatgcgtaccgggtcagtcgtgcgcccgatttcagattccacgctggaaagcacctgcgcggcggcttcggcagcatcttcgtccgcggtgttttcagccagcatcagatcatcggcatccggtgcttcttccatcacctgaatgcccatgtcgttgatcatttggatgatgtcttcgatctgatctgaatcgacgatatcttccggcagatggtcattgacctcggcataggtcagatagccttgctccttaccacgggtgacaagaagtttcagctgtgactgcgggttttgctccataagacggtatccacacttatttcatgaggttggtgttgggcgattgacccgatgtccttcagccgttaacgctgaaatccaacggttgtttaccgccaacgataattacgagggcgtacttatatatttgccgctgcctctcagtgcggctgtcgggggcttcccgatcgctcttcggcacttaagccgttaaatcactttttcgccagctcctggtttaatgtccagagctccaggcgttcttcgttgcttaaaccatgcgtgcgctcacgagcgattaactcttcctggcgcagttcaagcagcgaatcaaacatatggttgagtgagtcggtgaaggtttgctcagcaatattcttatctgctatatcgtcccacatcgacagtttttcaagggtggcagcattatttgtaccacgatagtgctctaaaagttgcccggtggtcagacctggctgggagagacaagtgttgaccagttctctgaataagccaagtccagggagcttattttcatccagattctcaagcggcgggaccaacgtcgctaattctggattttgcaccagcaaccctataagtatacgcatggtcgtgcgttttagctgcggaacagggcgagaaacgccgctctctgccgcttttggcattaatcgttcaagctggctgtcatcaagtatgcctaatttgttgcctaattcctgacgaagatatattcgcagcgtttcgcccggcacttgcgatatcaatggcagtgccagcgtactcaaacgtgcgcgcccgtcaggggtactcagatcaacttgcggcatcaggctgttaaacagaaatgcggagagtggcatcgcctgctccatccgcgcttcaaacgcttctttaccttcttttcgtaccagcgtgtcagggtcttcgccatcaggcaaaaacataaagcgtagctgacggccgtctgtcatgtaaggcagcgccgtttccagcgctcgccatgcggcatcgcggcctgcacggtcgccgtcataacagcaaatgacattgttggtcgcgcggaacaacagttgtatgtgatcggcggtggttgacgtacctaacgacgcaacggcgtaattaatgccgtattgcgccagcgccaccacgtccatatagccttcgaccacaagcagacgattgggttcagcgttatcctgctgcgcttcataaagaccgtaaagctggcggcctttatggaaaatgtctgtttctggcgagttcaggtatttgggggtatcgttgcccagcacgcgcccgccaaaaccaatcacccgaccgcgtttatcgcgaatggggaacatcacccgctcgcggaaacgatcgtaactgcgtccctgatcgttagtgaccaacatccccgcatcaatcaatgactggcgattttctggattgccgccaaaccgcttcaggacgttgtcccagccggggggcgcaaaaccaatcgcaaagcgagcgataacctcgtggcttaatccgcgtttttccagatactggcgcgcagacgtggcaacaggttgttgtaaagattgttggtaaaacgtattcagaccgtccatcaactgataaagcgtttgcctctgatggcgctcgatctggctggggccgctgcctgcttcaaatggcacttcaagattgtgcattgctgccagctcttcgaccgtttcaacgaactcgagcttgtcgtagttcatcaggaagtcgatcgcgttgccgtgcgcgccacatccaaagcagtggtaaaactgtttctcaccgttaacggtgaatgacggggttttctcgttgtggaatggacaacacgcgtggaaattcttgccctgctttttcagtttcacacgggcatcgatcagatcgacgatgtcagtgcgtgccagcagatcattaatgaatacgcgtgggattcgtccagccataggccccgatttttagcaattcataaacgaaaataagccgcgcattcctttcggaagcacggccttacaactacaactcggtctgatcggagagcaacgctctcggggaattagtacagacgagtgcggcgtgcgttttcgcgagccagtttcttcgcgtgacgtttcactgcagaagctttagcgcgcttacgttcggtagtcggtttttcatagaactcacgacgacgaacttccgccagaacacctgctttttcgcaggaacgcttgaagcgacgcagagctacgtcgaacggctcgttttcacgtactttaattaccggcatgtgcctctcacctttgattaattcggtttgccgctggcatcaacgccagcttatttcaaaatggtgcggaattttactgcaattgctgctgctttgtaaagcaccgcggcctttttgaaagggacttttataagggtgaggagtatacacgaggctttctccaggggcgaacaaagttttacatcaacccgcattggtcctacactgcgcggtaataaagcgaggtaaaacaagtcatgcgtgtactgggtattgaaacttcctgcgatgaaaccggcatcgccatttacgacgatgaaaaaggtttgttagccaaccaattgtatagtcaggtgaaattgcacgctgactacggcggcgtcgtgcctgaactggcctcccgcgatcacgtgcgcaaaaccgtaccgttgatccaggcggcgctaaaggagtctggcttaacggcaaaagacattgatgctgtggcctataccgcaggccctggattagtcggcgcactgctggttggcgcaaccgtggggcgttctctggcgtttgcctggaacgttccggcaatcccggtacaccatatggaagggcatctgttagcgccgatgctggaagataacccgccggaatttccgtttgtcgcgctgctggtgtccggcggtcatacgcagttaatcagcgtgactggcattggtcagtacgagctgctcggcgagtctatcgatgatgccgccggtgaagcgtttgataaaaccgcgaagctgctggggctggattatcctggcggaccgttactgtcgaaaatggcggctcagggtactgccgggcgctttgttttcccgcgtccgatgaccgaccgtccggggctggatttcagcttctccggtctgaaaaccttcgcggcaaataccattcgtgacaacggcaccgacgaccagacgcgtgctgatatcgcccgcgcctttgaagatgcggtggtcgatacgctgatgattaagtgcaagcgagcgttggatcagactggctttaagcgactggtcatggcaggcggcgtgagtgctaaccgtacgttacgggcgaagctggctgaaatgatgaaaaaacgccgcggcgaagtgttctacgcgcgtccggagttttgtactgataacggcgcgatgatcgcctatgccggaatggtgcggtttaaagcaggcgcgacggcggatctcggcgttagcgtgcgtccgcgctggccgctggcggagttaccggccgcgtaaaactatcgggtgccggagagcaatttccggcaccgtccttacttaaagcaacaccacgggcatccacagtaagccggtaatcaccagcaatacgaggaatatcagcccaaaaatcgcccccagtcgccagtaatccgccgttggcagataaccactaccgtagtaaatcggactgggtccggtggcgtatggtgtaagaatgctccccagaccaattgccgcgccaaccatcaggcagaacaccggcagcgggatttccggcatcgccagcgcagcggcaatcatcatcggtgcgagggcggaggtatacgccgtggcgctggcgaaaaagtagcgcagcagataaaacaccacaatcaacgccaccatcaccatcgttggcgaataaccgcttaagctgcctgctaacagtttgccaaaccagctaataaaaccggtgttgttgagtccggtagcgagggtgataagcgaggccagccagaagaaaacgttccacgccgctttattactgacaatgtcgtcccaactgataatgcgcagaagcagcatcagtgccaccacgctgtaaccgaccatcgcggcatcgatataatcaccgccgaaaatccacagcaccagcgcgcctaccatcagccccagcatccgtttttcacgcgaacagagcgggcccattgcctgcagttccgtctctgcccagcgcggcacctgatcgccagacttcagtaccggcgggtacagcacataagccagccagggaaccagcagcaccagcaaaatactgagcggcaacatcccgaggaaccagtcgccccaactcagcgtggcgtgagatgcgcttttcatcagtccaattaacagcaagtttggtgccatcgccgtcaagaaaatggcgctggtcacgcagtcggcaacaatccccatccacatgatgtacgagccaatgctgcgcgaactgctgtcgtttggttgtgattgatagagcggtggcaggttacggatgatgggatagataatccccgcaccacgcgccgagttggacggtgttacaggtgcgaggatcagctcggagaacatcaccgcatagccgagaaacagcgtgcgatgtcccatctttttcaccagaatcagcgcaatgcggcgtccaagcccggttttttcatagcctgtgccaaacataaaggcggcgaaaatcagccagataaccgaattagaaaaaccggaaaccgcccacgagagggattttgcagtgaatttaaagcctggctgggcgagctgttcggggctgaacagcagccagggagagagtatggcgatgatggagatacccaccatcgccaccacggcacccggcacgggttcgaggatcagtccaacgatcacgccagtaaaaacggcaaagtagagccaggtatggttctccagccctgcgggaaccggaagtagagcaataatggcgatgaccgccagcggcgcaagatatcgccaccattcagtggaaggtttcatcgtgttatgcctgcgaaaaaggagagggggcgagcctctccgggagggttatttgatgtaatggacgtgctcgcagatctcttccacgatgggatcgcggcgttcggcgaacagctttttgttttcggctatcaggttgttgccgtgggtatcaatagagacaatcagcgggccgaactctttgacccggcagacccacagcgactccggcattccgagctctgtccagtgcacttcttcaatctcttccacctgggttgccgccagcaccgcgcagcctgcagggaaaatcacatgtagcgccttgaatttctgacagccttcttcggtcagcggccccattccgcctttgccgaccaccattttcacgccggtctgctcaataaattcacgttcaaaactttccatacgcatactggttgtcgggccgacggagaccatctcccatttgtcgccgtttttgcgcacgatggggccagcgtggaaaatcgctttgccgttgagatcgtaagggatcggacgtttcagttcgatcaaacggcggtgacaaacgtcgcggcaggtcaccagcgtaccggtcaggtagatcacatcgccgacgcgaatatcttgcagatcttcagctttgatcggggttgtcaggatctttttcataacgcgctccgggtgtgagacagattttcaaaggtgagatcggcatgaaccagcagcgtgccgcgacgatgcgcccagcagccggtagagacagcaacgccgatggttgacggatggcgggcggcagattcgatatgcacgcccatcactgaactgttgccggtcagcccttgtggaccaatccccagacggttgagtccttcttccaggcgtagctccagctctgccgcttttggattgggatggcggctgccaatcggacgcaaaatggctttacgcgagagtacggcggcggtttccaccgaggtggcgatgcccacgcccaccagtaccggtggacaggcgtttacggcgagggtggagatattttcgaagacgaatttcaccacgccttcgtagccttctgacggcattaacactttcgagcggccaggtagcgtgcagccgccgcctgccatgtaaacttcgatttccgcatcgtcattgtcggggatgatgtcccaggtgacccacggtacgccgctaccggtatttttgccggtgtttacttcgtcaaaaatttctaccgcattgtgacgtagtggcgctttgacggttgcctcttccacggcttgtttgagtatgctttgcagctcgccaagcagtgggaagcgggaaccgactttaacgaagaacataatctccccggtgtcctgacaggcaggacgattcaggtcaatcgctttttgcatgttgtcgaacatcgtatggtagataattttccccatcgacgacgtttcggcatcctttagctgttttagtttatccaccacgtcatcaggcattcgggtagaaatcatggcggtaaagttagcgacaatctctgtcaacttattcactgcctgttgcttattactttcgctcatcatggcaactccagtttttgtatttgtctggaaaaattcaccgccacaaactaccactaaaaatgtggttttatattttttgccaccgtgaatatgtaattaacagttcgtgaatcaacgcgaaaataagaatgaatattgcgccagagcagggaatggcaatgttttgcgaaatacactgcgcttatcacaactgcggataattaacgatgctgaatagctggcctttagccaaagacttgcaggtactggtagaaatcgtccacagcgggagttttagtgctgcagcggcgacgcttgggcaaacgcctgcatttgtcaccaagcggatccaaatccttgaaaatacgctggcaacaacgctgctgaaccgctccgctcgcggcgtggcgctgactgaaagtggccaacgttgttacgaacatgcgctggaaatcctcacccaatatcagcgactggtcgatgacgtcacgcaaatcaaaacgcgcccggaggggatgattcgtattggttgcagttttggttttgggcgcagccatattgcgccagccattaccgaacttatgcgcaattatcctgagttacaggtgcattttgaattgttcgatcggcaaattgatttagtgcaggataatattgatctggatattcgtattaatgacgaaattcctgattattatattgcgcatctgttaacgaaaaataaaagaatattatgcgcagcacctgagtatctgcaaaaatatccgcagccacaatcattacaggaattaagtcgtcatgactgtctggtgaccaaagagcgcgatatgacccacggaatatgggagttggggaacggtcaggagaaaaaatcggtgaaggttagcgggcatctttcctccaatagcggcgagatagtgttgcaatgggcgctggagggcaaagggattatgctgcgttccgagtgggatgtgttgccgtttctggagagtggcaaactggtgcaagtattgccggagtatgcacaaagcgccaatatctgggctgtttaccgggagccgctctatcgcagcatgaaattacgtgtctgcgtggaatttctggcggcatggtgccagcaacggctgggcaagcccgatgaaggctatcaggtcatgtagatccaccagaaatcactcgggatccttttcgcgctttcttttgaatttcgtccagatttttgtctcctgacgacgccacagacgctggatgttgtcatgatgacgcagcaggatcaggcaagagagcatcgaaaccgggaaggtgaattgtggcttaaaccaccatacataaaacggagcaatcagtgcactgacaatcgctcccagcgacgagtatccgctcaatagcacggtcagtaaccaggttcccgccattactccggtgagatcccagccaatgggtgcgatggcaccaaaagcggtagcaacgccttttcctcctttaaatccgaagaaaacgggccagatgtgtccaagacaggcggcgatggcaattaagcctagccagaaggggctgacacctaattcatacgcgccccagacgggcaacattcctttcagaacgtcgaaaatcagtactgctacggctgctcccttgccaccgatacgtaacacattggttgcgcctggattgccggagccgctggttcgcggatcgggcagcccacacaagcggcaaaccagaatggcactggaaatggagccgcagaggtacgcgatgaggatcattccaggcgcgattgcactcataagctgttccgttttgaaaattcgtgttcaacgatgaatctgtggataatacgcacatttcgccggaagtggtatccggttagccaaaaagcaggcaggacgtgatggatattgtatttatagagcaactttcggtaatcaccactattggtgtttacgactgggaacagaccatcgaacagaagttagtgttcgatatcgaaatggcatgggataaccgtaaagcggcgaaaagtgatgatgtggcggattgcctcagttacgctgacattgcagaaacggtggtcagccacgtcgagggggcgcgttttgcgctggtggaacgcgtggctgaagaggtggcggagctgctgttagcacgcttcaactcgccgtgggtgcgtatcaaactcagcaagccaggcgcagtggcgcgggcggagaatgttggcgtaatcattgagcgtggcaataatctgaaagaaaataattaattttacagctgttaaaccaaacggttataacctggtcttactgcagtagtccggacaagcggtacattttaataatttaggggtttattgatgagcgatatgcactcgctgctgatagcggcaatattgggtgtggtcgaaggattgacagaatttctgccggtatccagcacgggccatatgattattgtcggtcacttgttggggtttgagggcgacacggcgaaaacctttgaagttgtgatccagttaggatcaattctggcggtagtagtgatgttctggcggcgtctgtttggcctgattggcatccactttggccgcccgttgcagcacgaaggtgaaagcaaaggtcgtttaacgctgatccacattttgctggggatgattccggcggtggtactggggctattgttccacgacacgattaagtcattgtttaacccgataaatgtgatgtatgcgctggtcgttggcggtttgttgctgattgccgccgaatgcctgaagccgaaagagccgcgtgcgccgggtcttgatgatatgacctatcgtcaggcgtttatgattggctgtttccagtgtctggcgctgtggccgggtttctcccgttccggggccaccatttcaggtgggatgctgatgggcgtgagccgttacgctgcttccgagttctcgttcctgctggcggtaccgatgatgatgggcgcaacggcgctcgatctctacaaaagctggggcttcctgacaaccggcgatatcccgatgtttgccgttgggtttatcaccgcttttgtggtggcgctgatagcgattaaaaccttcctgcaattgattaagcgcatttcgtttatcccgttcgccatttatcgctttattgtggcggctgcggtgtacgtcgtgttcttttgattgagaaaaggttcgggagcaggcctggttttctccctcgctctgtagggagagggccggggtgggggtgattgttcgcaccggtgctggtctgttcccctcaccctaaccctctccccgaaggggcgaggggatggttcgtgttaacgtttagttttatactcagtcaggctttgggcaacgttgttccttccaactggctatcgccgcaatccgccgtcgggtcagctcctcgcgaatctccacacctttaaatcccgcttcaacgaccgcttttgtcggcactgactgcgccacttcccaggcttcgcgcaaccaacggccttgcgggtagtccgctgattcaaaaccggttctgccgcgcacgtcagcctcgctggtcagcgccagttgctcgacacgctgcggtttacgccaggcatcgatggaatcaaacaatttgacgatagtttttgggttcagcattgggaaggtgtggatgagatcgtgaaactcagccaccagtctggctaaatcgcgaatttcatttggcacgcgcagacgctggcagagttgttccactaatttcacacccgccggaccgtgaccatgatgacgcggccaaagttctggcggcgtcagtcctttaccgagatcgtggcataaagttgcgaaacggacatcgacctgcggactcagcatcgccgccattgagagcgtcattaaggtatgaatacccgtgtcgatttccggatgccacctggcaggggccggaacgccaaacagtgcgtcaatttccgggaataaaacgcgcagtgcgccacaatcgcgcagtacctggaagaacacctgtggattgcgggtggtgagggcgctttccgtctctttccatacccgttcaggcgtcaggtgttccagttcacccgcatgggtcatctcgcgcatcagcgtcagagtttcatcggcaatacgaaaaccgaggtgggcataacgcgcagcaaaacgcgccacgcgcagaacgcgtaacggatcttcgccaaaagcgggggaaacatggcgcaacagacgattttgcagatcgcccagaccgttgtacgggtcgataatctcgccgttatcgtcctgggccagcgcattaatggtcagatcgcgacgcttaagatcatcttccagcgtgacatccggtgcggcatagcaagtaaaaccggtgtaaccggaaccggatttccgttcggtacgtgccagcgcatactcttcatgcgtttgcggatgcagaaacacaggaaaatcgcggcctacctgctggtagcccgcgtcgagcatctcctgtggcgtactgccgaccaccacccaatctctgtctttgaccggtagccctaacaatgcatcccgaacagcaccaccgaccagataaatcttcacgccatcatcccttcgtcaaatacacaattcctaataataagacagtgcaacgaagaaggcgatttagttcatccagcgatctttgcgtttgcgcgttgggatcaggtgtggcagtaccagaccgagcagcaagccaagccccagcacgccaccgccatacataaaccattgcatgatgatggtgcgctgtttgtcatccaactgtacgctggcggcatcgacctttttctgcgcgacaatcagctcgtttttcaatttctgattttcttcttttaatccgttgatcacgctgtcgctctgcgccactttttgctgcatttctgcggtgcgctgattccaggtgttatcgatattggtgagtttatcggtcagggttttgacctgattttccagatctggcacacgggagcgcaggcttggctcagtgctaagttgtttcaacgggatccaggcggtacggccagagctgtctttcacctgggcataattggtgttggcgtcagtttgtaataaggtcacttcctcgccggcgttaaccgtgcccacgaggcgataatgatctcccggaccgctacggacccaggtattcagttcatcagaaacatagcgcgtttcttcagcgtgtgagacggcagtggcgctaagtgcgagtaaagttaatccgatcaggcgtaattttggcatcaggctgtcgttattgtcatggaaagtggaacgatagtagtggcatcagtgtcgctacgcaaagcattcgacatcaatcggaatcctctgtgtcaggtcttgccactgcttcaaacttttacgcccgtcaaattgcccgttgcatggcaatttggcgcaaaatactatctactgacaaaaaagatcgcattaagttcgccgttcatcgtcacttatgtgacataaccgataagtaaaggccatggctcaggaaatcgaattaaagtttattgttaatcacagtgccgttgaggcgttgcgtgaccatctcaatacgctgggcggcgagcaccatgaccccgtgcagttgctgaatatttactacgaaacgccggataactggctgcgtgggcacgatatgggcttacgtattcgtggcgaaaacggtcgctatgagatgaccatgaaagttgcaggaagagtgacaggcggcttacaccagcgcccggaatataacgtggcgttgagcgaaccgacgctcgacctggcgcagttaccgacggaagtctggccgaacggcgaattgcccgccgatctcgcttcccgcgtacaaccgctgttcagcaccgatttttatcgcgaaaaatggctggtggcggtcgatgacagccgaattgaaatcgctctcgatcagggggaggtgaaagcgggggaatttgctgaacctatctgtgagctggaactggaactgcttagcggcgacacgcgcgcggtgctgaaactggcgaaccaactggtatcgcaaaccggattacgccagggcagcctgagcaaagcggcgcgtggctatcatctggcgcagggcaatccggcgcgtgaaatcaaaccgaccaccattttgcatgttgcggcaaaagccgatgtggaacaggggctggaagcggcgttcgagctggcgttagcgcaatggcagtatcatgaagaactgtgggtacgcggcaacgatgcggcgaaagagcaggtgctggcagccattggccttgttcgccatgcactgatgctgttcggtggcattgtgccgcgtaaagcgagcactcacttacgtgatttgctgactcaatgcgaagcgaccatcgcttctgcggtttctgccgtgacggcggtctactctaccgaaacggcaatggcaaagctggcgttgaccgaatggttggtaagcaaagcctggcagccgtttttagatgccaaagcgcagggtaaaatcagcgattccttcaaacgctttgccgatatccatctttcccgccatgccgctgaactgaaaagcgttttctgccagccgttaggcgatcgctaccatgatcagttgccacgcctgacgcgtgatattgactcaatactgctgctggcaggttactatgatcctgtcgtcgcgcaagcctggctggagaactggcaggggctgcgtcacgctattgcgaccgggcaacgcattgaaattgaacatttccgtaatgaggcaaacaatcaggaaccgttctggttgcacagcggaaaacgttaatcaggcaaggataaaatcgcttatgaagccgctctcttcaccgttacagcagtactggcagaccgttgttgagcggctgccagagcctttagccgaggaatcacttagcgcacaggcgaagtcagtacttacttttagtgattttgtgcaggacagcgtgattgtgcatccagagtggctgacggaactggaaagccaaccgccgcaggccgacgaatggcagcattacgcggcatggttgcaggaggcgctcagtaatgtgagtgacgaagccgggttaatgcgcgagctgcggctattccggcggcgcattatggtgcgcatcgcctgggcgcaaacgctggctttggttactgaagagagcatattgcagcagctcagccatctggcggagacgctgattgtcgccgcgcgtgactggctgtatgacgcttgctgccgcgagtggggaacgccgtgcaatgcgcagggcgaagcgcaaccgctgctgattttaggcatgggtaagctgggcggtggggaactgaatttctcctcagatatcgatctgatttttgcctggccggaacatggttgtacgcagggcggacgccgggaactggataacgcgcagttttttacccgcatggggcagcggctgattaaagtgttggatcaaccaacgcaggatggcttcgtctatcgcgtggatatgcggctgcgtccgtttggcgaaagtggcccgctggtgctgagctttgccgcgttggaggattattaccaggagcaggggcgcgactgggagcgttacgcgatggtcaaggcgcggattatgggcgatagcgaaggcgtctatgctaacgagttgcgtgcgatgctgcgcccgtttgttttccgtcgttacatcgatttcagcgtgattcagtcgctgcgcaacatgaaagggatgattgcccgtgaagtgcgtcgacgtggtttgaccgacaatatcaaactcggcgcaggcggcattcgcgaaattgaatttatcgttcaggtgttccagctcattcgcggtgggcgcgaaccgtcgctgcagtcgcgctctttactgccaacgctcagcgccattgccgcgctgcatctgctttctgaaaacgatgctgaacaattgcgagtggcatatctgttcctgcggcgtctggaaaacctgctgcaaagcattaacgacgaacaaacccaaacgcttccttctgatgagcttaaccgtgcgcggctggcgtgggcgatggactttgctgactggccgcaactgaccggggcgctgaccgcacatatgaccaatgtgcgccgggtgtttaatgaattgattggcgacgacgaaagtgaaactcaggaagagtcgctgtcggaacagtggcgtgagctgtggcaggatgcgttgcaggaagatgacactacgccagtgctggcgcatcttagcgaggatgatcgcaaacaggtcctaacgctgattgctgatttccgcaaagagctggataagcgtactatcgggccgcgaggacgtcaggtgctcgaccatctgatgccacatctgctaagtgatgtctgtgcgcgtgaagacgctgccgttacgctgtcgcgcattaccgccttgctggtggggattgttacccgcaccacctatttagaattgctaagtgaattccccgcggcgcttaaacatttgatttctctgtgtgccgcgtcgccgatgattgccagccaactggcgcgttatccattattgctggatgaattgctcgatccaaacaccctttaccagccgacggcgaccgatgcctaccgcgatgagttgcgccagtatttgctgcgcgtgccggaagatgacgaagagcaacagcttgaggcgctgcgtcagttcaaacaggcgcagctgttacgcatcgccgcagcggatatcgctggtacgctaccggtgatgaaagtgagcgatcacttaacctggctggcagaggctatgatagatgccgtcgttcagcaggcgtgggttcaaatggtggcccgctacggtaagccaaatcacctcaacgatcgcgaaggccgtggttttgcggtggtcggctacggcaagctgggcggctgggagttaggctacagttccgatcttgacctgatcttcctccatgattgcccaatggatgcgatgactgacggcgagcgggaaatcgacgggcgacagttttatctgcgtctggcgcaacgcattatgcatctgttcagtacgcgtacctcttccggcattttgtatgaagtggatgcacggctacgcccgtccggggccgcgggaatgctggtgacatccgcagaagcatttgccgattatcagaaaaacgaggcctggacgtgggaacatcaggcgctggtgcgtgcgcgggtagtgtacggcgatccgcagctcaccgcgcactttgacgcggtgcgtcgcgagattatgacgctgccgcgtgaaggtaaaactctgcaaacggaagtgcgggaaatgcgcgagaaaatgcgcgctcatctcggcaataaacatcgcgatcgctttgatatcaaagctgatgaaggcggaattaccgatatcgaatttattacccaatatctggtgttgcgctacgctcatgaaaaaccgaagttaacgcgctggtcagacaacgtgcgcattctggaactactggcgcaaaacgacattatggaagagcaggaagcgatggcgctgacccgtgcgtatactacgctgcgcgatgaacttcatcatctggcattacaggaattgccgggccatgtgccggaggattgcttcaccgcagagcgtgaactggtgcgggcaagctggcagaagtggctggtggaagaatgaagtatggtattatcgcgcgcaaattttgaatctctcaggagacaggaatgaaagtaacgctgccagagtttgaacgtgcaggagtgatggtggttggtgatgtgatgctggatcgttactggtacggtcccaccagccgtatctcgccggaagcgccggtgcccgtggttaaagtcaataccatcgaagaacgtccgggcggcgcggctaacgtggcaatgaacatcgcttctctcggtgccaatgctcgcctggtcgggctgacgggcattgacgatgcggcgcgtgcgctgagtaaatctctggccgacgtcaacgtcaaatgcgacttcgtttctgtaccgacgcatccgactatcaccaaattacgggtactttcccgcaaccaacagctgatccgcctggattttgaagaaggtttcgaaggtgttgatccgcagccgctgcacgagcggattaatcaggcgctgagttcgattggcgcgctggtgctttctgactacgccaaaggtgcgctggcaagcgtacagcagatgatccaactggcgcgtaaagcgggcgttccggtgctgattgatccaaaaggtaccgattttgagcgctaccgcggcgctacgctgttaacgccgaatctctcggaatttgaagctgttgtcggtaaatgtaagaccgaagaagagattgttgagcgcggcatgaaactgattgccgattacgaactctcggctctgttagtgacccgttccgaacagggtatgtcgctgctgcaaccgggtaaagcgccgctgcatatgccaacccaggcgcaggaagtgtatgacgttaccggtgcgggcgacacggtgattggcgtcctggcggcaacgctggcagcgggtaattcgctggaagaagcctgcttctttgccaatgcggcggctggcgtggtggtcggcaaactgggaacctccacggtttcgccgatcgagctggaaaatgcagtgcgtgggcgcgcagataccggctttggtgtgatgaccgaagaggaactgaagcttgctgtagcggcagcgcgtaaacgcggcgaaaaggtggtaatgaccaacggtgtctttgacatcctgcacgccgggcacgtctcctatctggcaaatgctcgcaaactgggtgaccgtctgattgtcgctgtgaacagcgatgcctccaccaaacggctgaaaggggattcccgccccgttaacccgctcgaacagcgtatgattgtgctgggcgcactggaagcggtcgactgggtggtgtcgtttgaagaagacacgccgcagcgcttgatcgccgggatcctgccagatttactggtgaagggcggcgactataaaccagaagagatcgccgggagtaaagaagtctgggccaacggcggcgaagtgctggtgctcaacttcgaagacggttgctcgaccactaacatcatcaagaagatccaacaggataaaaaaggctaaccggaaagcggttcacagatctcgcttcgtagcaggcaggcctattgacgctgttgttttttcaacctaaagtaaaggaacaagggtaagggaggatttctcccccctctgatcagttgttagtaagtcgggaaacttaacagtaacaacacaaccagtatgatgacgaacttcatcataaccctttccttctataaggccccttcctcgggaggggctttcccgtttcagccccttgctgactccccgattgttgatgagcgccggaccccgcgcaacgctttccctgaagcagttttgccttccccgagcggtcacgcaaaacgctgcaacgtcctgagcatttgcaccttttagcggaacgcagatataaaaaatccccggctttttgggccagggatatgtgttaatgaaaccttcttgacgctgattttttttcaacctaaagtaaaggaacaagggtgagggaggatttctccccctctgattggctgttaataagctgcgaaacttacgagtaacaacacaatcagtatgatgacgagcttcatcataaccctttccttctgtaaggccccttcctcgggaggggctttcccgtttcagccctttgctgactccccgattgttgatgagcgccggacctcgcgcaacgctttcccagaggcagttttgccttccccgagcggtcacgcaaaacgttgcaacgacctgatcatttgcagtttttagcggaacgcagatataaaaaatccccggctttttgtgccagggacgttcatagctgaaaatttattctacgttttcggcgacgggagttgttgaggttaagggtgaagtcaatgccgccagtgagccgcctgaaacgccaatttcattgagcaaggagtcaatcagcggtgcctgtgtgcggtaagagagagcggctgataatgcttgttccgccaggtttccgccccccacattacccgtgtttgcatcacccgcagcgctgccacgattcagaccatcgacctgaataatcttgataccgtcaatagatttcatcggctcaacggatttttctattaccgcaggtagcgcctgcaacaaggccagtttgaatttaaggctggtttgttcatcagaaagtacgttgatagcatcgttcagcgcacgttgtgcttctgcttccgccagaccctttttacgtgtagcttcggctaactcaacgatagccgccgcctgcatctctgcggcttctttttctgctttcgcccgcacggtcagttcaaccgctttggtttctgcatcctgcgcggcagcgattagggcaacttgtttagcacgatcggcttctgcggtctggcgagtggtttctacgttttgttgcgcacttactgcttctgcgagtgcaaggttagcacgcgcttctgcctgggactgttgttccgatttggcggcaatagcgatcgatttcgtctggttggcgatttcggtgacctgctgttgttcgatctctttaatacgaacttcacgttcagcctcaacctttcttgagcggacggcctgctcgcgctcgatctccgtttcctgaatttgtcgttcagccagaattcgcgtctgctctgcttcacgacgacgttcagcttcaaaagccgcaatacgtgcattctgttcggcagtacgggttttaacctgctgctcctgctcaagcgtcataaacgcttcttgttgttcaatctccaacttgcgcgaaagtgcatcacggtttttctcacgcaccgcaacttctacatcctgttcaacttcgttacgttcgcgacgacggcgctccgtctcctgagtcagtttggttaaaccttcggcgtcaaaggcattgttcggattgaaatgttctttcgaggtctggttaaagttggtaagtgaaacgctttccagctcaagaccgtttttcgacaggtcttctgcgacagtattttgtactccctgcacgaagttctcgcgggtatcctgtaactcatgcatggtcatttgtgcagctgttgcacggagggcatcgacaaatttatcttcaaccaacatacgtaagtcttctggtgatagcgtgcgttgccccaacgtctgcgccgcagtggcgatgccttctacagacggttttacccgtacaaagaaagcgactactacatcaacacgcatacgatctttcgtaatcaggctatcaatggttgagcggctgacttccagcttcagagtattcatattgatggggattatttcatgaaagatcggcatcacgattgcgccaccgctcatcaccactttttgcccacctaaaccagtacgaacaaaagcttgctctgccgaagcgcgacgatagagcctggcgaaaataattccaataataaacagaatgcatacggcaataatcgcggtaaacatccaggagggcacagaattaacaatatcatccattattaaatttccttttgattaataaattacaatatttgtggccagggattgttttccgccaaatatcgcgttgcagaaagtcggcaaataattaacactttgtctcctttagtgaaaaattttccttcttcaggctccagtagtaaataatgtatttggccaaattgatcggtgagttttccttcgcagggattacctgaagtggcttgatgaccggtaattaatgccatgctaccaatatattcttcttctgtaatagctgaactatggtcgcgtggaatccagggcgcaactattttaccggtataatgcaccgcaataatcgtaaacagtaaactgacaggaaccacgaacaggttcgacagtggtgattgccagaccatgatgcaggcatgctgcaacaggatgccaataagaccaaaaaaaccagccagcaagcagagaacgacgagagctggcaatcttccgatattgagataatgaagtgcctggctaatatgacctgtggttatggaatcataatggtcaagatgtgcatcaagagcaccggagagcatgtgaccgcagataagcgctaaaatttctaaaaggccgatcaacagtacaaaggaaatagcgaaaagataaggggtattatagtcggcgaataaaatcatatgtcactccaatgtccatttagtgacgcaatatttactttgggatagtttccttgcttacatttatctttgttaataataacacatgttagagaagttctggaagagaaagttttttaatatggttttttatttttcactaaaaagtgtgatcggggacaatatatttacgcacgttatgtttaaaggcactacactgattggggaatactgaaatcagaaaaagcatatggccttaaaaggtatgcgataaccggaggatgtgcttatggatcatagtcttaattctttaaataatttcgatttcctggcgcgtagttttgccagaatgcacgcagaaggtcgcccggtcgatattcttgccgttactggtaacatggatgaagaacatagaacctggttttgcgcacgttatgcctggtattgtcaacagatgatgcaggcaagagagctggagttagagcactgatataacgggcctgatggcccgttttagtgtttgtattagatgctagttataggtgattttgaggatgacgtctttactaaacggtccctcaacaacagtctctgccggattcgcactaagttctgccctgaatggtgcggtgaccgaaggtgcactagacgatgaaaaagaagcaaattgtgagaagcggttaaattccgttgctgttccatctttatgaaatatcttcaatagcagtccattacccatatccagatggctataatcactcaaaatatccgtagtgaaaaagctccctaaaatattgaattgctcagtacaggccgcaccaggatcttttgtcatgactacactaaacgtctcactaacgctggtatttttaattgttcgggaatttattttaccaaagtcaacaacgccatcagctggttccagtgcgacattaacaaagcagtcaaggacatgaatattatttaatccacgaatcctgaaggtcaaatttttgtctacttctatagctcctgcgccactcatacctttaaactctagagcgatatattcatcaggtaacaccaggtttttattaactctattggcattttttgctaatttaatatagagttgtacgcgagctggaaaggttactgataattgaggctcaggacctccactacagacagcggggtttttatagtgattattaaaggtacccgctccttttatatcaatgcattctggtgctgcgatagcattaggggcagtcgaatcataatcaactccattgtatgttacgccaaaaatataggagttctgattataaaagtcctgaccgcctggtaaaaacatcattatattagtccaggctgatgggtattcttctccaggtgatggggcaggtaatgcattattacagaagacattcataaaatactcactgctttgccagatcttatcaccttttttaccattactggggatagaaattcttggtacgtaaccaatgactacggtatttcccccttcatgttcagcatagcagtccattgcccatacaggtaatgcactaaaacctataataaatataattacaattaataagtagcgcatattatttatctcgtttggctacggaaacattacaagagttattaaccgtcgggcagtttatttcataaaaacttaatccaccaaaatcattgatataaccaacctgaaaagctgacggaacatttttaaactgcgtatctgcatggctataaggggttaccattaaactttgcgtttgtggcaacattgtgattccgtttgttccgatataacccagcgtaacgtgataaggcatcttattgttaaagcggatcgaaccatcatttctacggatgatttcaactttttcgtaagacattaccccatcatcttctaattcaatagcttttggtcgccagaatagtttcaatgcgtgctgcatagtgacttgcatcacattttttttatctgtttttggcggtatttctcgcacgttaaaatagaagagcgtttctctgtcattaggcagttgagcaattttttcctgacttatcattcttatttgaatttgctcactgggatttaaacgtaccatagggggaaccgtgacaataaagtcacgtgatttattgcctttcgtatcttctatccatgtttgcgccagatagggtagatttttgctttgattagtaagttttaatgcttcccctttatctgactcattcattatgatacgggtacggtccgggatgatggcaccccaggcaatgctgctcatgcaggcgagtaatactcctgctgcaatgagattctttgtgtttaagtagcgcattagtttcatcctgaattaattttggctaatacacggtaaaataaccgttccggtggttaagttgctgctattgggtggttgaataaaacaggatttatcaccccagcgtaaagtaagtttgctgtcatcctgaatgccgttgaggtatacaaagccgccatcagcaaccagtcctaattctttatggctggttttatcttttacgctaatccccagtggtgggtgactaccatctgccaggcgaataacccccatgatttgatagcccttgcgggtatcaagtttggcgtagccaatagcaccttcggttaaggtggtggtgataaccgagttttcgatatccacattttctggaagatttcgggtatcaacgcttaatgatgttgttatgtaactgctgactgatggaataactccgatgccataccgattagttaccgcgcgtttattgttcaacggaatatcttctgcaccatctgcgtcgatcataaaacgcgagtcagcactaccactatagtcatggaaagcggctccgtgacgagtcgccgtgaatgaaccattccaactggcattcagagaataataactgtctcgctgtgatgtcccggagagatagagacgaccgttctcggtattatgctgataactggcgcgtagtgacgctttcatatctttgaattcatcattgtcgcctgaagcagaaacgctccaggaattatttcgatcggaagagtcataccacgaagcagtatgcgaaatcttgttatcctgatttcgttgcataccatagctcaatgttctactggttccccagggaatcgaaatatttaggtacagttgatcctggttgtcttcttcccagtttattcggctaaatgttagagaagtggagacgttttttaatggcccgatatcaaaatcgcggctaagtgataatgaataattcacattactgctggcgtcccagtaagtattacgagccaaacttacgtatgtatttaaccttaatgattcaagatactggttaaacgtgacaatataactctctttttcattctgataattcgtgtaatggttagtgtcattgatatattcattcattgtcacaaagtttttatcagagaaacggtaaccagcgaaagtgagctggctaccggtagattcaaaacgttttgaatagttagcgcggtagctataacccgtttctttatcctgattatgcaactgagcatcagatcgtgtgacatcaaaagataatgaacccaatgagttaaggttaaagccaacgccggcagccagagattgataatcacggtttgttaaaactgaaccaccatacagggatacattgttcagccaaccccatgagaattcaccagtccagaagaagggttgttgtaaggaatgagctggccccctgaaataccagacagtagatgtatcttaaaataagagataggcttggatatatgtctaacactagttctaattttgagatggctggcgttttgttaggaaaagaggtgcgtaaa

SEQ ID NO: 69 - DNA, 37300 bp, Escherichia coli
  source 1..37300: mol_type = genomic DNA
tctgaggcagcacctggcacggctgggacggaagtcgctgtcgttctcaaaatcggtggagctgcatgacaaagtcatcgggcattatctgaacataaaacactatcaataagttggagtcattaccgttttcccggagcaattgaaggattaaaagccctcaaaatgcgcggaactggtatatcaatgccgaacaaacaactggcgtgtgaatatgttgatgaattaacgccagcagccaaactggtgggtgccatcaacaccatcgttaatgatgatggctacctgcgcggctataacaccgacggcacgggccatattcgcgccattaaagagagcggttttgatatcaaaggcaaaacaatggtgctgttaggggccggaggtgcctcaacggcgattggcgcgcagggggcaattgaaggtttaaaagaaattaaactctttaaccgtcgggatgagttcttcgataaagccctcgccttcgcgcagcgggttaacgaaaacaccgattgtgtcgtcacggttaccgatctcgccgatcagcaagcctttgctgaagccctggcttccgccgacattttaaccaatggcacaaaagtgggtatgaaaccccttgagaatgaatcattagttaatgatatcagtctgttacatccgggactgctggtcactgaatgcgtgtataacccgcatatgacgaagttattgcagcaggcgcaacaagctggttgcaaaacgattgatggatacggcatgttgttgtggcaaggggctgaacagttcacgttatggactggcaaagatttccctctggaatatgttaaacaggtcatggggttcggtgcctgacaggctgaccgcgtgcagaaagggtaaaaaatgaaaaccgtaactgtaaaagatctcgtcattggtacgggcgcacctaaaatcatcgtctcgctgatggcgaaagatatcgcccgcgtgaaatccgaagctctcgcctatcgtgaagcggactttgatattctggaatggcgtgtggaccactttgccgacctctccaatgtggagtctgtcatggcggcggcaaaaattctccgtgaaaccatgccagaaaaaccgctgctgtttaccttccgcagtgccaaagaaggcggcgagcaggcgatttccaccgaggcttatattgctctcaatcgtgcagccatcgacagcggcctggttgatatgatcgatctggagttatttaccggcgatgatcaggttaaagaaaccgtcgcctacgcccacgcgcatgatgtgaaagttgtcatgtccaaccatgacttccataaaacgccggaagccgaagaaatcattgcccgtctgcgcaaaatgcagtccttcgacgccgatattcctaagattgcgctgatgccgcaaagtaccagcgatgtgctgacgttgcttaccgcgaccctggagatgcaggagcagtatgccgatcgtccaatcatcacgatgtcgatggcaaaaactggcgtaatttctcgtctggctggtgaagtatttggctcggcggcaacttttggtgcggtaaaaaaagcctctgcaccagggcaaatctcggtaaatgatttacgcacggtattaactattttacaccaggcataagcaataatatttcggcgggaacaccctccccgccgaacttaaaaaatatatttaaccgtatttaataaaaatatttcgtgagtctctgtgcgctaattctccatctggcgtagggaaaatcacatctgaatcaggaattaacaatgaaacctgtaaaaccacctcgtattaatggacgagtgccggtcctgtcggcacaggaagcggtgaattatattcccgacgaagcaacactttgtgtgttaggcgctggcggcggtattctggaagccaccacgttaattacagctcttgctgataaatataaacagactcaaacgccacgtaatttatcgattattagtccgacagggcttggcgatcgcgccgaccgtggtattagtcctctggcgcaagaaggtctggtgaaatgggcattatgtggtcactggggacaatcgccgcgtatttctgaactcgcagaacaaaataaaattattgcttataactatccacaaggtgtacttacacaaaccttacgcgccgccgcagcccaccagcctggtattattagtgatattggcatcgggacatttgtcgatccacgccagcaaggcggcaaactgaatgaagtcacgaaagaagacctgattaaactggtcgagtttgataacaaagaatatctctattacaaagcgattgcgccagatatcgccttcattcgcgctaccacctgcgacagtgaaggctacgccacttttgaagatgaggtgatgtatctcgacgcattggttattgcccaggcggtgcacaataacggcggtattgtgatgatgcaggtgcagaaaatggttaagaaagccacgctgcatcctaaatctgtccgtattccgggttatctggtggatattgtggtggtcgatccggatcaaagccaactgtatggcggtgcgccggttaaccgttttatttctggtgacttcacccttgatgacagcaccaaacttagcctgcccctaaaccaacgtaaattagttgcgcggcgtgcattattcgaaatgcgtaaaggcgcggtggggaatgtcggcgtcggtattgctgacggtattggcctggtcgcccgggaagaaggttgtgctgatgactttattctgacggtagaaacaggtccgattggcggaattacttcacagggtatcgcctttggcgcgaacgtgaatacccgcgccattctggatatgacgtcccagtttgatttttatcacggtggtggtctggatgtttgttatttgagttttgctgaagtcgaccagcacggtaacgtcggcgtgcataaattcaatggcaaaatcatgggtaccggtggatttattgatatcagtgccacctcgaagaaaattattttctgcggcacgttaactgcgggcagtttaaaaacagaaattgccgatggcaaattgcatatcgtccaggaaggacgggtaaataaatttattcgggaactaccggaaattacttttagcggaaaaatcgcgctcgaacggggactggatgttcgttacatcaccgaacgtgctgtattcacgctgaaagaagacggcctgcatttaatcgaaatcgcccctggcgtcgatttacaaaaagatattctcgacaaaatggacttcaccccagtgatttcgccagaactcaaactgatgaacgaaagattatttatcgatgcggcgatgggttttgtcctgcctgaagcggctcattaacaggagtataatgatggatttttctttaactgaagaacaagaactgctgctggccagtattcgcgaactgattacgactaactttccggaagagtatttccgcacctgcgatcaaaacgggacatatccgcgtgagtttatgcgggcgctggcggataacggtatttccatgcttggcgtgccggaagaatttggtggtatccctgcggattacgtcacccaaatgctggcgctgatggaagtgtcaaaatgcggtgctccggcatttttgatcaccaacggtcaatgtattcacagtatgcgccgtttcggttctgcagagcagctacgtaaaacggcagaaagcaccctggaaacgggtgatcccgcctatgccctggcgttgacggaaccaggtgctggctcagataacaacagtgccactaccacttacacgcgtaaaaacggcaaggtctacatcaacggacaaaaaacctttattaccggtgcgaaagagtacccgtatatgctggtgttggcgcgcgatccgcaaccgaaagatcccaaaaaagccttcaccctgtggtgggtcgactccagtaagcccggcattaagattaacccgctgcataaaatcggctggcatatgctcagcacctgcgaagtctatctcgacaacgtggaggttgaagagagcgacatggtgggcgaagaaggaatgggtttcctcaatgtgatgtacaactttgagatggagcgcctgatcaacgccgcgcgcagcaccggctttgccgaatgcgcctttgaagatgccgcccgctatgccaaccaacgtatcgcttttggtaagcccattggtcataaccagatgatccaggaaaaactggcgctgatggcgattaagatcgacaacatgcgcaacatggtgctgaaagtggcatggcaagccgatcagcatcagtcactgcgcaccagcgcggcgctggcaaaactgtattgcgcacgtaccgcaatggaagtcattgatgatgcgattcaaatcatgggcggtctgggctataccgatgaagcgcgcgtctcccgcttctggcgtgatgtccgttgtgaacgtatcggcggcggtacagacgaaattatgatttacgtagcaggtcggcagatcctgaaagactatcagaacaaataatctgcaggcggcgcagcttcttaacaaactgcgccgccagatttatccaacaagacttaccggttgaggaaattcagataggatttcttgttccgcaaaacagtttttaaattgtctacggtaatcgctgggcgaacaaccgacatggcgcaaaaacagtttggcaaagtgatcgacattttcataacccacacgccaggagatctctgcctgtgataattcagtattagtgagtgaccattttgcttccgtcatacgccgttgaataacatagttaataggggaaatacgatactctttggtaaattcatggcaaatataactgacgctggcacgaaattttttcgataactgttctaaagtgattttttcgcgataattattattcagatagaaaagaatatcttttatcagaacatcttttttaatatacccctgctccgaacgataagcatttttaaaattttcgtagtaaagaatggctaacgtataggcaaatgcatcccataacgaagatgtttggctatttttactttgcggcaaaatcacacttagctcattaaataaggtttttatgacttcttttccctgccccgcggcaattaccggacaagaatgcggttgcagtagctgattttcctcagccccctgaaactgaaagccgtacagcgcacaggtacacgtcgttgccggatcgttaacgtcagaggccaccgcatgcagcctgccgcgttctatcaccacaatgtcatccgcatgtgcgacatataacgaagaatcgatggtaaaccttgcaacccctttcttgacgtaaatcaactcggtttcattgtcatgaacgtgatgtccggactcccattttggatcatcgctaaatgcaaaacgtgaaagccgtggcgttttaccggcgacaaacagcgtttcactggcgttatcaaaacagcgttgatacatgacaacctccctattccatgagcaagcaaaaacaatatatgccggataaaatacggcgtgtattgcggttatacaaccgcgtttagcgagagctaaacaagattatttacactgaatgcaagattgtacggtcatggaataactatattgccgcaaattgcacttttgttttagcgatcgcattttttttgcaagattgttggcaaggaaaacagcttgctccgtcgaaaaccccgcaccgctatcgcacactattttcaggccatttttaccttccatcggagatggttccgtatgcgactcacaggagaaatcatgaaaataataacctgctttaagctggtgcctgaagaacaggacattgttgtcactccagaatacaccctgaatttcgacaatgccgacgccaaaatcagccagttcgatctcaatgccattgaagctgcaagccagctcacaacagatgacgatgagatagccgcgctgaccgttggcggctcattgttgcagaactcgaaagtgcgcaaagacgtgctatcccgcgggccgcacagcctgtatttggtgcaggatgcgcaacttgaacatgcactgcctctcgataccgcaaaagcgctggcagcagcaattgaaaagatcggcttcgatttactgatctttggtgaaggttccggcgacctttatgcccagcaggttggcttgctggtcggagaaattctgcaacttccggtgattaatgcagtgagtgctattcagcgtcagggcaatacactggtgattgaacgcacgcttgaagatgatgttgaagttattgaactctctgttccagccgtgctctgcgtcacctccgatattaacgtgccacgcattccttcgatgaaagccattctcggcgcgggtaaaaaaccggtaaatcagtggcaggcaagtgatattgactggagccagagcgcgccacttgctgaactggtcggcattcgcgtaccgccgcaaacagaacgtaagaacatcattatcgataacgattcgccggaggccattgccgagctggcggaacatctgaagaaagccctgaactgaagcctacggagaagaaacgatgagtcaattaaacagcgtctgggtctttagcgataatcctgaacgttatgctgaactgtttggcggcgctcagcaatggggccaacaggtgtatgccattgtacaaaataccgaccaggcgcaggcagttatgccttatggtccaaaatgtatttatgttcttgagcaaaacgacgcgctacaacgcactgaaaattacgccgaaagcattgctgccctgctgaaagataaacaccccgctatgttgctgttggccgcgacgaaacgtggtaaagctctggcagcacggttaagtgtgcaactgaatgcggcgctggtgaacgatgccacggcggtggatattgtcgatggtcacatttgcgccgaacaccggatgtatggcgggttagcgttcgctcaggaaaagatcaacagcccgctggcgatcattacccttgcacccggtgttcaggaaccgtgcaccagtgatacctctcatcagtgcccgacagaaacggtaccttatgttgctccgcgtcatgaaattctctgtcgcgaacgccgtgcgaaagccgcaagcagcgtggacctgagcaaagcaaaacgtgtggttggcgtcggtcgtggtcttgcggcgcaggatgacctgaaaatggtccacgaactggcggcggtgctgaatgctgaagtcggctgttcacgtccaattgccgaaggcgagaactggatggagcgtgaacgttatatcggtgtctccggcgtgttgctgaaatctgatctctacctgacgctggggatctccgggcagatccaacatatggttggcggcaacggcgcaaaagtgattgtcgccatcaataaagataaaaatgcgccaatcttcaactatgccgactacggtctggtgggcgatatctacaaagtcgtccctgccctgattagccagttgagccgctaattcccctttcaaccacatctcccgctgtaaacgcagcgggaagggagcataacgcatgtcggatgacaaatttgatgccattgtggtcggtgcgggcgttgctggtagcgttgccgcactggtcatggcacgagccgggctggatgtcctggtgatagaacgcggcgacagtgccggatgtaaaaacatgaccggcgggcgtctttatgcccacacacttgaagcaatcattccaggctttgcagcgccggtagaacgcaaggtcacacgcgagaaaatctccttcttaaccgaagaaagcgccgttaccctcgattttcaccgcgagcagccagatgttccgcaacacgcatcttataccgtattgcgtaatcgtctggacccgtggttgatggaacaagccgagcaggcgggcgcgcagtttatcccaggcgttcgcgtcgatgcgctggttcgtgaaggaaacaaggtaactggcgtgcaggctggggatgatattctcgaagcgaatgtggtgattctggctgatggcgttaactcgatgcttggccgctcgctgggaatggttcccgcttccgatccgcatcattacgctgttggtgttaaagaggttattggcctcacgccagaacagatcaacgatcgctttaatattacgggcgaggaaggtgccgcctggctgtttgccggttccccttctgacggcctgatgggtggcggattcctctataccaacaacgattccgtatcgttggggctggtttgtggattgggtgatatcgcccatgcgcaaaaaagcgtgccgcaaatgctggaagattttaaacaacaccccgccattcgcccactaattagcggcggtaaactgcttgaatattccgcgcatatggtgccagaaggcggtctggcaatggtgccgcagctggttaacgatggcgtgatgatcgttggtgacgccgcaggcttctgcctgaatttgggttttacagttcgtggcatggatttagccattgcatcggctcaggctgccgccacaacggtgatcgccgccaaagaacgcgaggatttctccgccagcagtctggcgcaatacaaacgtgagctggaacaaagctgcgtcatgcgcgatatgcagcatttccgcaagatcccggcgctgatggaaaacccgcgcctgtttagccaatacccacgaatggtcgccgacatcatgaacgagatgttcaccattgacggcaaaccaaaccagccggtacgcaaaatgatcatgggacatgcgaagaaaattgggctgatcaacttgctgaaagatggcattaagggagcaaccgcgctatgagccagaacgctacggttaacgtcgacatcaaattaggcgtcaataaattccatgttgatgagggccacccgcatatcattctggcggcaaatcccgatatcaatgaattccgtaaattaatgaaagcctgccctgccggactttataagcaggatgacgccggcaacattcattttgattctgccggttgtctggagtgcggcacctgtcgggtgctgtgcggtaacactattctcgaacagtggcaatatcccgcaggcaccttcggtattgattttcgctacggctaatcatgcatcccacaggcccgcatctcgggcctgatgttctgtttcgagagtccaacatgaaagtgacattaacgttcaacgaacaacgtcgtgcggcgtatcgtcagcaagggctatggggcgatgcttcgctggccgattactggcagcagaccgctcgtgcgatgccagacaaaattgccgtggtcgataatcatggagcatcgtacacctatagcgcgctcgatcacgccgcgagctgtctggcaaactggatgttagcgaagggtattgaatcaggcgatcgcatcgcatttcaactgccaggctggtgtgaatttaccgttatctatcttgcctgcctgaaaaccggtgcggtttccgtgccgctgttgccttcctggcgggaagcagaactggtgtgggtgctcaataagtgtcaggcaaaaatgttctttgcaccgacgttgtttaaacaaacgcgtccggtagatttaatcctgccgctgcaaaatcagcttccacaactacaacaaattgtcggtgtggacaaactggctcccgccacctcttccctctcattaagtcagattatcgccgacaatacctcactgaccacggcgataacgacccacggcgatgaattagctgcggtgctgtttacctccggaaccgagggtctgccaaagggcgtgatgctaacgcataacaatattctcgccagtgagcgggcttattgcgcgcgactgaatctgacctggcaggatgtctttatgatgcctgcgccacttggtcacgcaacgggctttctgcatggcgtaacggcaccattcttaattggcgctcgcagcgtgttgttagatattttcactcctgatgcgtgtctcgcgctgcttgagcagcagcgttgcacctgtatgctaggcgcaacgccgtttgtctatgatcttttgaatgtactagagaaacaacccgcggacctttcagcgctgcgtttctttctttgcggcggtaccacaatccccaaaaaagtggcacgtgaatgccagcagcgcggcattaaattattaagtgtttatggttccacagaaagttcgccgcatgcggtggtgaatctcgatgatcctttgtcgcgctttatgcacaccgatggttacgctgccgcaggtgtagagattaaagtggtcgatgacgcacgcaagaccttaccgccaggttgcgaaggtgaagaagcctcgcgtggccccaatgtgtttatggggtattttgatgaacctgaattaaccgcccgtgcgctggacgaagaaggctggtattacagcggcgatctctgccgtatggatgaggctggctatataaaaattaccggacgcaaaaaagatattattgtccgcggcggcgaaaatattagcagccgtgaagtggaagatattttattgcagcatcctaaaattcacgatgcctgtgtggttgcaatgcccgatgaacgtttaggtgaacgatcatgcgcttatgtcgtgctgaaagcgccgcatcattcattatcgctggaagaggtggtggctttttttagccgtaaacgggtcgcaaaatataaatatcctgaacatatcgtggtaatcgaaaaactaccgcgcactgcctcaggtaaaatacaaaagtttttgttaagaaaagatattatgcggcgattaacgcaggatgtctgtgaagagattgaataagtttcatcttcggggatcacataaacccggcgacaaaacgccgccgggtatttattttatttcttcagttcagccaggcttaaccaggtttgcaccacggtgtccggattcagagacaggctatcgatcccctcttccatcaaccatgcggcaaaatcttcgtggtcggacggaccctgaccgcaaatcccgacatatttgccctgtttcttcgcggcacggatagccatcgacagcaatgctttcaccgcatcgttgcgctcatcgaacagttcagacaccacgccggagtcacgatccagaccgagcgccagctgcgtcatatcgtttgagccaattgagaagccgtcgaaatattcgaggaactgctctgccagcaaggcgttggacgggatttcacacatcatgatgattttcagcccgttctcgccacgtttcagcccctgacgcgccagttcttcaaccaccgctttcgcctgatctacggtacgcacgaacgggatcatgatctcaacgttggtcagccccatgtcgttgcgcacacgtttcactgcttcacactccagcgcgaaacagtcgcggaagctgtcggaaacatagcggcccgcgccacggaagccgagcatcgggttctcttcatctggctcgtaacgctcaccaccgaccaggttggcatattcgttcgatttaaaatcagagagacggacaatgacgcgcttcggataaaacgcggcacccagcgtcgcgatcccttcagtcagacgaccaacgtaaaattcacgcggagaatcaaaacctttcatcatctcgcggatttcgttttgcaactgcggttcctgatcgtcaaactcaagcagtgcgcgtgggtggacgccaatcatacggttgatgataaattccagacgcgcaaggcccacgccttcgttcggcaggcaggcgaagtcgaaagcacggtccgggttaccgacgttcatcatcactttcaacggcagatccggcatcgtttctacgctggagcttttcacgctaaattccagcaactccgcatagacgtaaccggtatcaccttcggcacaagaaacagtgacgttctcaccgtctttcatccgttctgttgcatcaccacagcccactaccgccggaatgcccagttcacgagcgatgatcgccgcgtgacaggtacgaccgccacggttggtgacgatggcagatgctttcttcatgatcggttcccagtccgggtcggtcatgtcagtgaccagcacgtcgccaggttcgatgcggttcatttcgctgatgtcatggatgactttcaccggacccgcgccgatgcgatgaccgatagcacggccttcggcgataatcttaccctgtgaatgcagcgtataacgctccatgacctgaccgcgtgagcgcacggtttccggacgcgcctgcacaatgaacagtttgccggtgtggccatctttcgcccactcaatatccatcgggcgaccgtagtgtttctcaatttgtacggcctgttttgccagttcctgcacttcttcgttggtcagcgagaagatgtcacgctgttcctgcggtacgtcttcgattttaacctgcttgccgtgctcctgggtcggcgcgtaaaccatgcggatttttttcgaccccatggtgcgacgcacgatagccgggcgattcgctgcaagtgtcggtttatggacgtaaaactcatccgggttaaccgcgccctgcacgaccatttcaccaaggccccatgcggaagtgataaacaccacctggtcaaagccggattcggtatcaatggagaacatcacgccagaagatgcgaggtcagagcgcaccatccgttgaacaccggcggagagcgccacaccacggtgatcgtaaccctggtgcacacgataagagatggcgcgatcgttaaacagagaagcaaatacatgtttcactgccacgagaacggcgtcaaaaccctgaacgttgaggaaggtttcctgctgaccggcaaaggaagcgtccggcatatcttctgcagtagcggaggagcgcaccgcaaaagaggcgttttcgtcatcggcggaaagctgtgcataagcttcgcggatggcattttccagctcaggctggaagggagtgtcgataatccactggcggatttgcgcgcccgctttcgcaagctgggtaacatcgtcaatatccgttttatccagcagttcataaatgcgctggtttacgccgctttggtccagaaactggttaaacgcgtcggcggttgtggcgaaaccattcggaacggaaacacccattccggaaaggttagtaatcatttcacccagggaggcatttttgcccccaaccctgtctacatcattcatgccgagttggttataccaaagcaccagcggtgacgagccattgttggacatcgaacaatccttttgtgataaatgaacggtttgagaaacacatttctgcgcatttatctttgcatatttaaccggatgaaaaaaacggtgaatcgttcaagcaaatatatttttttactttttaagactgatcccagcgttgcgcaaacctgctctattcgacaatttccacataaaccatcggtataaacgaaaccataaaaatgaaatgctgttttcataaaaaataaaattgaaggttcattttataaaccagacattacgtcctacgcttctgtgcgtttttaatttatgctttcatagaattatgtctgcatcacgggaagaacaaaatggataatgctgttgatcgccacgttttttatatttctgatggtacggcaataactgcggaggtattaggacacgcagtaatgtcacaatttcccgtcactatcagcagcattacgctgccgtttgtcgaaaatgagagccgtgcacgggcagtgaaggatcagattgacgcaatttatcaccagacaggtgtgcgcccgctggtcttctactccatcgtgttgccggagattcgcgccatcatcttgcaaagtgaaggcttttgccaggatattgttcaggcgctggttgccccgctacaacaagagatgaaactggatccaacaccgattgctcatcgtacccatggccttaaccctaataatctcaataaatatgatgcgcgcattgcggcgattgattacaccctcgcccacgatgacggcatttcgttgcgcaatctggaccaggctcaggtgatcctgctcggtgtttctcgctgtggtaaaacccccaccagtctgtatctggcaatgcagtttggtatccgcgcggcaaactacccctttattgccgacgatatggacaatctggtgctacccgcgtcgctcaaaccgcttcagcataaattgttcggcctgactatcgacccggaacgtctggcggcgattcgcgaggaacgtcgggagaacagccgctatgcctcgcttcgtcagtgcaggatggaagtcgcggaagtagaagcgttgtaccgtaaaaatcagatcccgtggattaacagtaccaattattcggtagaagagattgccaccaagatcctcgatatcatggggcttagccgccgaatgtactagagaactagtgcattagcttatttttttgttatcatgctaaccacccggcgaggtgtgacacacctcgcacttgaaatcagctgcgattggtttatcgtgatgcgcatcacttcccggtagtcctgccgtagaagcaacaaatttctgagacttgtaatgaacagaactgacgaactccgtactgcgcgtattgagagcctggtaacgcccgccgaactcgcgctacggtatcccgtaacgcctggcgtcgccacccatgtcaccgactcccgccgcagaattgaaaaaatactgaatggtgaagataagcgactgttggtcattattggcccctgctcgatccacgatctcaccgctgcaatggagtacgccacccgtctgcagtcgctgcgcaaccagtaccagtcacggctggaaatcgtaatgcgcacctattttgaaaaaccacgaactgttgtcggctggaaagggctaatctccgatccggatttaaacggcagctatcgggtaaatcacggtctggagctggcgcgcaaattacttttacaggtaaatgagctgggtgtccctaccgcgactgagttcctcgatatggtgaccggtcagtttattgctgatttaatcagttggggcgcgattggcgcacgtactaccgaaagtcagatccaccgtgaaatggcttcggcactctcctgtccggtaggttttaaaaatggtaccgatggcaacacgcggattgccgtggatgctatccgcgcagcccgcgccagccatatgtttctctcgccagacaaaaatggtcagatgaccatctatcagaccagcggcaacccgtatggccacattattatgcgtggcggcaaaaaaccgaattatcatgccgatgatatcgccgcagcctgcgatacgctgcacgagtttgatttacctgaacatctggtggtggatttcagccacggtaactgccagaagcagcaccgtcgccagttagaagtttgtgaggatatttgtcagcaaatccgcaatggctctacggcgattgctggaattatggcggaaagtttcctgcgcgaaggaacgcaaaaaatcgtcggcggtcagccgctcacttacggtcaatccattaccgacccgtgtctgggctgggaagataccgaacgcctggtcgaaaaacttgcctctgcggtagatacccgcttctgaatgcgtgcccattcctgatgggatgggcatttctgcgcaacttgttgtcttctcagcacattactgcttgctctggtcagccataatattgataataagaatcattgttatatcaattattattaatttttatgcgttatacggatagcagaaaactcacgcctgaaacggatgccaatcacaagaccgcttccccgcagcctattcggcgaatttccagccagacactgttaggtccggatggcaaactgattatcgatcatgacgggcaagaatatctgctccgtaaaactcaggctggcaagctgctgttgaccaagtagcctttaactcgagcagctgacttccagccgtttaccccagtcaggtggacgactgacatagtcatcagctctgtcgctgaaaggatttcgcaacgcctcatgcaggcggtgcaattccgtcatatcacccttttctgccgcttcaatcgcccgttgcgccaaccagttgcgcaacaccagagctgggttaacgctttgcatcagctgctgacgctcactatcgctaacctcgtcttgttgcaaacgcccccgataacgggcaaaccagtcatcaaatgccgcacgatcaataaactcatcacgtagcggtgacgccgcgctgtgctgctcggtcagactcagcatgcggaatgtgcgggtataatcgctgcgctctcgcgccatcagactgaataattcattcagtagcgcgttatcctctttttgctccgtcatgaagcccagtttctgccgcatccgttgtccataatgcgtcaacaaaacctgctgatagctgtccagggcctcattcagggcatctacggcaacaaatggtgacaatgtctgcgccagacgctgtaaattccacaacgcgacggcaggttgattatcaaagctgtaacgcccttgatgatccgagtgattacaaataaaaccgggttcgtaatcatcaagaaaaccaaacggcccgtaatcaagcgtcagccccagcagcgacatgttgtcggtattcatcaccccatgagcaaagccgaccgtctgccattgggcaattaacgatgcggtacgtgcgacaacatcgttaaaccagagacggtatttgtcctcatcatcttcaagatgtgaccagtaatgacgaatggcaaagtcagctaactgacgaaccttttccggctcgcggcgatagtaaaaatgttcgaaatgaccaaagcgcagatgacttggtgccacacgtatcagcatcgcgcctggctccaccgtttcccgatacactggcgaatcgctggtgacgatacttaacgcgcgggtcgtcggaatgcccagataatgcatcgcctcactggcgagactttctcgtatcgtcgaacgtaaaaccgcccgtccatcacccattcgcgaataaggcgtcaggccagcacctttcagatgccagtccattgtagtgccatcagcaagcagttgttcgccaagtaaaatgccgcgcccatcacccagttggcccgcccagacgccgaactgatgaccactgtaaacctgcgccagtggtgacataccaggcagtagggtttcgccgccccagacacctgcagcatttttaaacagcgacgatggaatactcagcgtgttagcgagttcggtattatgccaaatcagccgggcattatttaaaggcgtaggggaaagtgctgtataggtttctggcaattcatcgcgccagcgggtaataaaagacagggtcatagatcctcctgtttgatagtgtagacggttactctcgtcttaaacaccagcaaacagaagggttatcgctgaaccaacgtcgttatctgatttatgggaacggcaggccacaggcatccctggagagcatggaaatcgaagggggtaatctgtgccaatatttctgccgtatcaatgcctcccgcaatgatgcaattgcaacaaggggaaatttgcgactggatcgcacgaataaacggttcgaaggagcggtgcgtgatttgttgctgaataaaacttttatccagcatgacgcgggtgaaaagaccatcaaaaaccgctttcattgtgctattgcctgctcccaaattacctaacacaaggggatacacttgcgataaggataaaagaccgcgattatcttttccttcattgagatgcgggtaattctcattaatcaacagttcaataaacggatattttaatagttcgcctgcgtaattatccctctctaataataatgtagccacttgtggcgttaaattaagccaggcaaagagtttatgttgaataaaaaaatgttggcatgattttagtaattccaactgctctgaaaataattgccaatgttgctcctcggtaagttgcgctataacccgactcgtcgggatacgcaccgtgccatcttcactggagaaatgggtaattaactcaacgccgacaaggagttgctggttatctcttatcggcaggaaatagcaatcagaatgataaagattctccaaaaaaatcttcatggtaaccgtccctctcgaaggatgtttttcagtatccggctaaaagggatgaggccataagacataacaattacagaaggagtaactttcatttgttccatgttaaccactttttcaggggtcctttttttagattatcctgattataaacgaataatccatttacggaatttttgtctgcaaaatactactgtattcaggagtaaatggacggcgatgtatcatcgccgtccatttttcgacatactagattcgtctcgcctgccagaaatttttctgccaatagacattatcaagtgaggaacgcatcactcccttgctggtagaggcgtggataaattggttgttggtatcgtaaatacctacatgcaaaccattttgtccggaccccgttttgaaaaagaccaggtcaccaggcagcaactcgtctttatcaatttgcgtgccgatagaggcttgttctttggtttctcggggcagctgcaaatcgaaacgatcgcgcatcgttacaaccacaaatcccgaacagtccacaccgcgccgcgtcatgccaccataacgatacggcgtgccatgccagctttgtagctggtcgttcaaaccggcaataacggtaatcgaatcagaaagtctggcatttggcggcggtgctttatggtggctacacccggccagaaacagtgctgtgatcaaaataaggcagaaacgcattccgtacggttcctctgttttttattcttgcattaatttagcgtcgtaattacccgattttcaagatactaatgaaatcagatggtcgaaatcagcattctgtgaccttcgatatccagacggcgaaaattcatcccataggcctgcgccagatttggcggcgtgagcacctcttctctgcgtccactggccagcatttttccaccttttagcaaccacgcccgatgcgcatgacgcaatgtgtggttgagatcgtgactgctcatcacaatcgccagtccttgctgacacagagcgctcagaattttgtctaacgcactttgttgcgcaacatcaagactgttcatcggctcatcaagaagcagcaattgacctgcgggattggcttgtggtgtgatttgcagcaccaccgcagcaagacgtacgcgttgccattcaccgccggaaagttgattggtgctacgtccgagtttgtcatcaagagccagcgcccctgcgacatcattcagtagttcggtacgcgttttatcgtgctgatgcagtgtcaggtagtgccagaccggcattgcaaacggcggcgtctgctgttgtgaaagataggcgcgatgcagcgcgagttttgttgcggaccatgcttccaggggttgccccgcgaactgaatgcttcccttaccgctggtcattccggccattcgtgcaagcaaggtactcttacccgcgccattcggccccaccaggtgcaggatctccccagcccgaacctcgccagaaagtggccccaggcgggtagattccgcaacatcctgtaactgcatcacaatagacattattttgccaacgccagtttaatgctttccatcacaatggggtcttccggcgtcatatccggggaaaaacgctggatgaccaatccgtccctgccaactaaaaatttctcaaaattccataaaatatcatcagggtacagcggtgcacgacctttgctgaccatacgggcatagaatccgctctcttccggcgcgactgcggtcggcgctgcggcaatcaatttttgatacagcggatggcgtccttcgccattaacttcaatcttactgaacatcgggaacgtcaccccccatgtggtggtacagtaagttttaatctcttcatcgctgcccggttcttgttccagaaactggttgcacgggaatcccagcaccacaaaacctcgatcggcccaggctttctgaatattctccaactgctcatattgcggcgttaagccacactttgaggcgacattgacaatcaacagcacattaccggcgtacttctccagcgtggtcacttcaccgtcgatatctttcactacggtcgtcagaatggaatcttgcatcgtttctcctgggtgtggtcagtaaaaatcttagcttttaatcatagaccgtctttttgcggctaacgtcctgcttttaacaataaccagataaacaccggcgcacccaacgttgcggtgaccacgccaataggcagctctgcggcagctaatgccaagcgcgctacaacatcggccagcagcaatgcgctcgcccctgccagcgcgcagccgggaagtaatacgcgatgatcggttaaaccacacaaccgaagaatatgtgggatcaccagaccaataaagccgatagcacccgccagcgccacactgacgccaaccatccagccggtcgctgccaccagcacattgcgccagaaccacaggggtaaacccagttgccgcgccgagatctcgccaagtgctaacatattcatcggcctggactgacaacagatccacaacaacacggggatcaatgccagcatcagccagctttgccgccagtctacgccgccaaaaccgcccatcatccagtacatcagctgacgtaaatcaacagaggtggaaaagtagatagcccacgtcattagtgcgctacagataatccctaatgcaacgccagccagcaataaccgactggtcgaaagatgacgacgggcgaaacgtaagagtattaaagtgatgataagcgcgccagcaatcgcacacagccctagtgcccagtttgggagttgcccttgcccaagcaataccgcggcgataagccctacgcctgcgccgttagagacgccaagtagtccaggttctgccagaggattttcaaacaacgcctgcattactgcgccggatatagccagcgccgcaccaaccagcaatacagccagcgtacgtggcaggcgaatctgccagacgaacagttcgccacgaggagaaaaccagtcacctggcgagatccattgttcaccggcgcaaaggcttaagagaagcgccagcagcatcaaaactgacaggcataataaccagcgaatattttgtcgctgttgttggcgggcaagtgtcagcatggtatccgttctgctgaagtgtcatggcgttgattttacggtgactcttcgacagtgaaaagaaaaaaggccgcagagcggcctttttagttagatcagattactcgtctttgggcgaagcgttttcgacccggctttttaacttctgcccgggtctgaaggtcaccacgcgccgtgctgtaatgggaatatcctcgcccgttttcgggttacgtcccgggcgttgattcttatcacgcagatcgaagttaccaaaaccagagagtttcacctgttcgccgttttccagagcgcgacggatctcttcgaaaaacagttcaaccagttctttggcatcccgcttgctaagcccaagcttatcaaacagatattctgacatttcagcttttgtaagcgccataggttcaatccctcaatgatgcctggaatcgctcttttaatgcctctacacatttggcgacggtagcggcaatctcctcttcttcgagtgtacggctggtatcttgcaggatcaggcttatggcgaggctcttatacccctccgcaacacccttaccgcggtacacgtcaaataagtttacgccaactacctgatttacgccaactttcttacattcggataaaatatccgctgcgggaacgttttctgcgaccaccaccgcgatgtcacgacggttcgccgggaagcgagaaatctcgcgcgcctgaggcaccacgcggtctgcgagcttgttccactccagttcgaacaccagagtgcgaccgttaagatccagtttacgttccagttcaggatgaacaaccccaacaaaaccaatacgttcacctttcagataaatcgctgcggattgccccggatgcagtgccggattcgcttctgcacggaactcaacctcattcagtttaccggtcaggtcgagaacggattcaagatcgcctttcaaatcatagaaatcaacggtctcttttgccaggttccagtgctcttcgtaacggttaccgcaaatcacaccggctaacatcagatcctgacgaatgcccaacggtgcctgagtatctggtacgaaacgcagaccgctttcgaaaatgcgcacacggttctgctgacggttctggttgtacaccacggttgccagcaggccggtccacagagaaagacgcattgctgacatttcaacagagatcgggcttggcagcagtaaggcttcaacgcctggatggatcatctgctgcactttcggatcaacgaagctgtaggtgatcacttcctgatagcctttgtcgttgagcagcgttttcacgcgcttgagcgacaggtcagcttcacggtgagtacccataatcaggcttgcctgtaccggctcatccgggatgttgttgtagccgtaaacacgcgcgacttcttcgaccagatcttcttcaatctccatatcgaaacgccagctcggcgcaactgcctgccactcgtctttgccttcggtcacttcgcagccgagacgacgcagaatgtcagttacctgctcatccgcaatatgatggccgatcaggcgatccagtttgctacgacgtaaagtgatggttgcacgcttcggcagcgttgcttcgttggtgatatcaattaccggaccagcctcaccaccgcagatgtcgatcagcagacgggtcgcacgttccatcgctttgtgctgcagtgccggatcaacgccacgctcataacggtgagacgcatcagtatgcaggccatgacgacgagcacgaccggtgatagacagcgggctgaagaaagcgcattccagcaagacgttttgcgtttcgtcattcacgccagagtgttcgccaccaaagatgccgcccatcgccagcgccttgttgtggtcggcgatgaccagagtgtcagcattcagcttcgcttcagtgccatcaagcagtaccaacgtttcgccctctttcgccatccgcaccacaatgccgccttcaatgcgatctttatcgaaagcgtgcatcggctggcccagttcgagcagtacatagttggtgacgtcaacaactgcatcgatagaacggatcccgcaacgacgcagtttttctttcatccacagcggagttggcgctttaacgttaatgccttttaccacacggccaagataacgcgggcaggcttccggcgcttcgactgtaatcggcagcgtgtcgtcgatggtcgcaccaaccggaacgatttccggttcaaccagcggcagctgattcagcacggcaacgtcacgcgcaacaccaatgatacctaaacagtcggcacggtttggcgtcacgctgatttcgatggtgttgtcatcaagtttcaggtattcacggatgtcggtgccaatcggcgcatccgcaggcagctcgataatgccgctatgatcgtcagaaattcccagctcagaaaaggagcacagcatcccttcagacggttcaccacgcagtttcgccgctttaattttgaaatcacccggcagaacagcaccaatggtagctaccgccacacgcaggccctgacggcagtttggcgcaccgcagacgatgtccagcaggcgatcgccgccaacattcacttttgtcacacgcagtttgtcagcgttcggatgctgcgcacactcaaccacttcaccaacgaccacgccgtggaagctaccggcaaccggttctacaccgtcaacttccaggcccgccatagtgatttgattcgccagcgcatcgctatcaatcgccgggttcacccattcgcgtaaccacagttcactgaatttcataatctattcctgccttatttaaactgtttgaggaaacgcagatcattttcgaagaatgaacgcaggtcggtgacgccgtaacgcaacatagtcagacgctccatccccatcccgaaggcgaaaccagagtaaacttccgggtcgatgccaacgttacgcagcacgttcggatgcaccatcccgcaacccagcacttccagccatttaccgtttttacccatgacgtcaacttctgcagaaggctcggtgaacgggaagtaggaaggacggaagcgaatctgcaaatcttcctcaaagaagttacgcaggaaatcgtgcagagtgcctttcaggttggtaaagctgatgttggtatcaacaatcagaccttccatctgatggaacatcggcgtgtgagtctggtcgtagtcgttacgataaacgcggccaggcgcgatgatacgaatcggtggctgctgggctttcatggtgcggatctgtacgccagaggtctgggtacgcagcaggcgggtagtgtcaaaccagaaagtgtcgtggtcagcgcgcgccgggtggtgaccaggaatgttcagagcatcgaagttatgataatcgtcttcgatttccggcccggttgccacggtaaagccaagctcaccgaagaaactttcgatacggtcgatggtacgggtaaccggatgcagaccgccgttttcaatgcgacgacctggcagggagacatcaatcgtttccgccgccagacgcgcattcagcgctgcgctttccagttccgctttacgcgcattcagcgcctgctgaacctgctctttcgcttcgttgataaccgcaccagctgccggacgctcttctggcggcagctcacgcagggtcgtcatctgaagggttaagtgcccttttttacccaaatattcgacgcgcacattatctaacgcggcaacatctgacgcctggctaatggccgccttcgcactggcaaccagttctgcgagatgtgacatggttttcctcattgtgtcagtggtgacaatggttcgttggacttagagcctatcccatcaggctattttacttgccattttggtcccgggcagtgctcgaaattctcacgtacttaaatacgctccggtttctccgcgctggccgtgtccagactggctgcgacaattacgcctgatagactggctttttatttttcaaaacgcgcatacaaaaaaagcctccactgggaggctttcaggcgctgttttccgtttctcttctcacgcgctagcctcctggattcaggtgctaaagtaaaaaaagaagcggaaaatagcagcattcattgcttgcgttaccttttggtactcttcaaaagacctttattgaaaaggctacggcgataaaagtcaatgttttgatggcgttgaaacgaaaagagggagactagctccctctttcaactggcttatgccagagctgctttcgctttttcaaccagagcggtgaacgctactttgtcgaatactgcgatatcagccaggatcttacggtcgatttcaacagaggcttttttcaggccattgatgaatttgctgtaagaaataccgttctgacgtgctgctgcgttgatacgcgcaatccacagttgacggaactgacgcttacgttgacgacggtcacggtaagcatactgaccagctttgataacagcctggaaggcaacgcggtatacgcgagaacgcgcaccgtagtagcctttagcttgtttcaaaattttcttgtgacgtgcgcgtgcaataacaccacgttttacgcgagccatatgtgctctcctgtatctatattctaattaaaaagttaaaaacgttaacggcttatgcgtacggcaggcacgcgattaccaggcccagatcgcctttggaaaccatggcttttggacgcaggtgacgtttacgtttggtcgcttttttggtcagaatgtgacgcaggttagcgtgcttgtgcttaaaaccacctttaccggtttttttgaagcgcttagcagcaccgcgtacggtcttaatttttggcattttaataacttccacttcgcattgttaataaacgaaacaaaggcgaacaaagcctgtgaagcccgaaggctccacagacagtgctacttgaaggccttactgtttcttcttaggagcgagcaccatgatcatctggcggccttcgatcttcgttgggaaggattcgaccactgccagttcttgcaaatcgtctttcacgcgattaagcacttccataccgatttgctggtgcgccatctcacgaccgcggaaacgcagcgtgattttggctttatcaccctcttcgagaaagcgaatcaggctgcggagttttacctgatagtcgccttcatctgtaccaggacggaatttaatttccttaacctggataactttttgctttttcttctgttccttagaagacttgctcttttcatagaggaatttgccgtaatccattatacgacaaaccggcggctcggcgttagggctgatctcgactaagtctactccggcttcttctgctttctccagagcttctctcagactcacaataccaagctgctcgccttccagacctgttaagcgaacttcctgggcgcgaatttcgccattgatacggttagggcgcgccgtttgaactcgttttccgcctttaataccttattcctccaattgtttaagactgcggctgcgaatctcttgttgcagcttctcgatcacttcatttacgtccatgcttcccaggtctttaccacggcgggtgcgaacggcaactttgcctgattccacctctttatcaccacagaccagcatatatgggacgcgacgcaaagtgtgctcgcggattttaaagccaatcttctcatttctcaagtctgctttaacacgaatgcccgcatttgatagtttttgcgtcaattcgttaacgtaatcagactgtgaatcggtaatattcatgataacaacctgaaccggcgcaagccaggtcgggaagaaaccagcgaattcttcggtcaggataccgatgaaacgttccatcgacccaagaattgcgcggtgaatcattaccggtaccttacgctcgttgtcttcgcccacataggaggcgctcagacgagacggcaaggagaagtccagctgtactgtaccgcactgccatgcacgatcgaggcagtcatacagggtaaattcaattttcggaccgtagaaagcgccttcacccagttgatattcaaacgggatgttgttttcttccagcgcaaccgccaggtccgcctcagcacgatcccacatttcgtcgctgccaatacgtttttcaggacgagtggagagtttgacgacgatcttctcgaagccaaaagtgctgtacatatcatagactaaacggatacatccgttaacttcatcgcgaatttgttcttcagtacagaagatatgcgcgtcatcctgggtaaatccacgcacgcgcatcaggccatgcagcgaacctgacggctcattacggtggcagctaccaaactcggccatacgcagcggcagatcgcgataagacttcagcccctggttgaaaatttgtacgtgacccgggcagttcatcggcttaatgcagtattcacggttctcagaagacgtggtgaacattgcatctttgtagttgtcccagtgaccggttttttcccacaggacacggtccatcatgaacggacctttaacttcctgatactggtactctttcagtttagaacgaacaaacacttccagttcacggaagatggtccagccgtcgttgtgccagaataccatacccggcgcttcttcctgcatatggtacaggtcgagctgtttaccgattttacggtggtcgcgtttcgcggcttcttccaggcgctgcaggtaagcgttaagcgcttttttgtctgcccacgccgtaccgtaaatacgttgcaacattttgttgttgctgtcgccacgccagtaagcccctgccgttttcattagtttgaaatgatggcagaaacgcatgttcggtacgtgcggaccgcggcacatatcgacatattcttcatggaagtacagacctggcttgtcatcatgggcgatgttttcgtcaagaatggagactttgtagctctccccacggttggcgaaagtttcacgcgcttcgtgccagctgactttcttcttaatgacgtcgtagtttttctcagcaagctcatgcatccgcttctcgagtgcttcgacatcttcctgggttaacgtgcggtcaagatcaacgtcgtaataaaaaccgttgtcaataaccgggccgattgccattttggtatgcggccaaagttgtttaatcgcgtgccctaacaggtgcgcacaggagtgacgaatgatctccagaccgtcttcgtctttggcggtaatgatggacagttgtgcgtcgttttcaatcagatcgcaagcatcaaccagttcgccattaacgcgccctgcgatacaggctttcgccagacctggaccaatgtccagcgcaacatccatggggcttacagcgtggtcgtaatggcgttggctgccatcaggaagagttataacaggcattttatatccttatttgcagtggtgacccacacgaaagatcacatacaaagaaaaatttgtttattaacagttcattgcgaaaccatctagccaacaaatgctaaattggttcgcaatcaggtacacaaatgaaagacattaacctctcaccttccacccggttgagcgatgttaacactaaaaaaagggagattgtacctttccgtttcacattgattcgattcgcaattcgtttgtagtgagtacaccagcaaaacgcttaaagaaccactgataacatcacggtgcgtctgaaaggtttactgcgagcggatttacagcagcataaactgaatccagcaaagttcgttgcgtgatttggcggtagtattttaaacgctcatgagattaatgacgaagtggtcatatcacaatgataaaagtgacacaattcttataacaatttttcgtgcacatttcgttctggcgataataattaatcatcattctcaaaacctccagatatatataaggcgaatagattatgagtcaaaacgatatcattatcagaactcattataagtctcctcatagattgcacatcgatagcgacataccaacaccttcatcagagcctattaataaatttgcgcgccagctcatcaccctacttgatacctctgacttaagttcgatgctgtcatactgtgttattcaggaatttaccgcaaactgtcgaaaaatatcacaaaattgttattccactgccctttttaccattaactttgccacttcacccatccatgcagaaaatatactcattacattacactataaaaaagatttcatttccttattactggaaaccacgcctattaaagctaaccatttgcgaagcatactggattatattgaacaggaacagttaactgctgaagatcgtaaccattgtatgaaactgtctaaaaaaatccatagagaaaaaactatacacccaacagtaaatctcaatggtagtgcatgttttttgcaatctccttctgacgctattttttgtcgccatctgtcattgcaatacgcccttgattcattgagaaatggaaaaggcaaagtcaacctgattaaacattactcctccgttgaatccatacagcagcatatccccttagtccgggatgcggagttcagagcattacttcgccatcctcctgcagggagtcgcgttatcgcgagtaaggattttggcttcgctttagatattttcttttgtcgaatgatggcaaacaatgtcagtcatatgtccgcgattttatatatagacaatcatactttgtcagtaaggctacgaataaagcagtcagtgtatggacaattaaattatgttgtgtctgtttacgacccgaacgataccaacgttgccgtcagaggcacccacaggacagcacggcgctttctctcgcttgataagttcatcagttcagctcccgatgctcagacctgggctgataggtatgttcgcaactgtgcaattgctattcttcctctattacctgagggagttccagttgctattttagcgggtatcacgacacgaatgccatttgcccctatacatccatcggcaatgttgttaataatggccacaggccagactcaatagcttattacactattcaaacagttgcccatactccctgaaaaagaaatcattgaaataataactgcgcagaatagcgttggtacacctgctttatttctggctatgatgaacggacaaactgacaacgtaaaaatatttatgcaagaaatccagtcactggtatacaatcatatcattcatgaagataatctggttaaattactgcaaactaaaagtgctaacgaaacacctggactctatatctccatgttgtatggattcgatgaaataatcgatatctttctgaatgcattaaccactccaatagcacaagaactttaaaaaaaaatggtgatggatattttagccatgaaaacacgtgatggtgaaccagggttatttgctgcaatggaaaataatcaccctttgtgtgtcacacggttcctctctaaagtttatgggatcgccgttaaatataaactcagcaaaatcaacatcatggacttattaaaaggcgcgacagcacatggaacccctgctttatacatcgccatgagcaagggtaataaagacgtcgtgttatcttatatatcaacactgagtacttttgcaaaaaaatattcttttagtcaacgtcaattattcacactgttggccgctaaaaatcatgaaaacatgtcagctgttcatatagccattcatcataatcattataaaactgtagaaacatattatgctgctattaatgcaatcagccaaagcctgagttttagtgctgatgaactaaaaacgtatttataaccagctatttatgatatttgtatatcgatacataattttatttttttcataaaacgcagaaacagtgatcaggtgtacaacgccacccgacggctgtaataacaaaaaatcccttgatgtctgtcccttttgttacactccgttatcacgcacaagagatatgcaggacactggtatgccgactaaacgctttgataaaaaacactggaagatggtggtggtgctactggcaatctgtggcgctatgttgttgctacgttgggcagcaatgatttggggctgagcagtgacaaaagaagacagccagaccgcataacacggtccggcagataattttacatgctgtagcccagcgataaggttgtccgacgatcggtatgttccggtgcagactctggaggttcagagttccatgtgacgttgtaagccactttcagtccaaaatgttcattaatagcaacatttaatgcgctttcggagttcagcgttgtgtcttccgcgccaaagacggaaacaccctgcgtaaatttagcgttgtcagtcaactgccatgcataagcaccggaggcatagcccagcggctgagtttcactggcattgtcggtatatttgtcgtaacgcacacctggaccgaattcaaagcggaaactgtgtaccgggccattcaaaaactgacgaccataacccgcggtcaacacatcgcgctctcgatagccgttataacggtctgtcagccagcttgcctgaccaaataaatagtcataatcagttaaattaaaacggctacgcccgcccgccgcatatttttctgaagaacgctcatcattagaagaagtattactggcgttcccccacagcgaccaggcagtggtttgtccataccaggtcatggtggtgtcagccgtaagtgaggagcttttcgtattgcctgattgtgcaagatatcctgcgttcagattaccttcgaaaggttttttagcgctggcaggatcgtccatgacagtaaaaacggaatcatcggcagctgcattcagtgacgcaaacatgccccccgccaacataacgatggcaggaactgtcttcaaaagcttcatttatcaagagtccgtacaacaaaaaaagagaccatcgcggtcccggaaactttcttaaggatcaaagattagcgtccctggaaaggtaacgaattataaaaaggcgcgaataacttagcaatgtattcttatttcattttttgaataagcatgtggcgaaaacagatttttatttatatatatttatctgcaaaattttaaataaagctctaataaatcatattgttaatttcttcactttcggctgattcggtgccagactgaaatcagcctataggaggaaatgatggtacgtatctatacgttgacacttgcgccctctctcgatagcgcaacaattaccccgcaaatttatcccgaaggaaaactgcgctgtaccgcaccggtgttcgaacccgggggcggcggcatcaacgtcgcccgcgccattgcccatcttggaggcagtgccacagcgatcttcccggcgggtggcgcgaccggcgaacacctggtttctctgttggcggatgaaaatgtccccgtcgctactgtagaagccaaagactggacccggcagaatttacacgtacatgtggaagcaagcggtgagcagtatcgttttgttatgccaggcgcggcattaaatgaagatgagtttcgccagcttgaagagcaagttctggaaattgaatccggggccatcctggtcataagcggaagcctgccgccaggtgtgaagctggaaaaattaacccaactgatttccgctgcgcaaaaccaagggatccgctgcatcatcgacagttctggcgaagcgttaagtgcagcactggcgattggtaacatcgagttggttaagcctaaccaaaaagaactcagtgcgctggtgaatcgcgaactcacccagccagacgatgtccgcaaagccgcgcaggaaatcgttaatagcggcaaggccaaacgggttgtcgtttcccttggtccacaaggagcgctgggtgttgatagtgaaaactgcattcaggtggtgccaccaccggtgaaaagccagagtaccgttggcgctggtgacagcatggtcggcgcgatgacactgaaactggcagaaaatgcctctcttgaagagatggtccgttttggcgtagctgcggggagtgcagccacactcaatcagggaacacgtctgtgctcccatgacgatacgcaaaaaatttacgcttacctttcccgctaacaaaaacattcccccagcattgggggaatcaccaccaacctgtcggcaacgcgtttctccgactatgctcaaaagtcatgtgataacaaaggggtgaactatggccagtggcgatcttgtccgttatgtcataaccgtcatgttgcatgaggatacattgactgaaattaacgagttgaataattacctgactcgcgacggttttttgctcaccatgacggatgatgagggaaatatccatgagctggggactaacacttttggacttatcagtacccaaagtgaagaagaaattagagaactggtttcggggcttacccaaagtgcaaccggcaaagatcctgaaatcaccatcacgacctgggaggaatggaatagcaacagaaaataaatggtttttgggcaataatcagtctgtggtgtgcgttagctcgtgtttttacaccgcattcttgcgctaaccttatgatctggcagacaacatgggagagacatcatgtggcaggcaatcagtcgtcttttgagcgagcagttaggtgaaggcgaaatcgaactgcgtaatgaactgcctggcggagaagtccatgccgcatggcatttgcgctatgcaggacatgactttttcgtcaaatgtgatgaaagggaactgcttcccggttttaccgccgaagccgaccaactggagttactgtcgcgtagtaaaaccgtcaccgtgcctaaggtttgggcagtaggcgctgaccgtgactacagttttctggtgatggattatctcccacctcgtccgctggatgcgcatagcgcatttattcttggtcagcaaattgcgcgtttacatcaatggagtgaccaaccacaatttggcctcgattttgataactcgctctccacaactccacagcccaacacctggcaacgtcgctggtcaacgttttttgctgaacaacggattggctggcagttggaactggcagcagagaaagggatcgctttcggcaatatcgacgccatcgtcgagcatattcagcagcgtctggcctcgcatcaaccgcagccttctctgttgcacggcgatttatggtccggcaactgtgcgctgggtccggatggcccgtacattttcgaccctgcctgctactggggtgaccgagagtgcgacctggcgatgttaccgctgcatactgaacagccgccacaaatctatgacggctatcagtcagtatccccgctacctgccgatttccttgaacgtcaaccggtttaccaactctacacgctgttaaatcgtgcaagattatttggcggtcagcatttggttattgctcagcagtcattggatagattattagcagcatgatatgggttgaggataatggccgctccgtgcggccttttgattaaataaacccaagcagagaaaagaacacataacctgcagcaatacaaataaccggcaggatatatagtgagaaaaactgcaggaaaatagtatggtgcggaacaacaatacgggactcaatttgttcacgcgttagcccctcttcccctttggctttttccagaatgagttgatcttcaacaccttcccgcaagaagcgcgcctggcgactcatccgggcaccggaatcctgcaacgccagtccgacaaaaatcaggatgaaaatcacccagaacataacgttcacgccaccattaaaattaggggtcggggagttataccagaacagattcaaaaaaggcgtattcgcctgcatcatatcgatcatgacatgagtaaagtcgagcatgaccgcattaatgccttcctggttttcctgccgggtattcataaatttcagcaaagaaatcaatgtagagatcaatgcaggtataaaaatcacccaacccaaaatccttttcaaaacagcaatgcgtccagcttgttgatacgtcatgagttctccttgattaagacgcgtcgtttcacttagtttacctgtagatatctgttttcgcccattctttaaaggcgatatgataggcgcttaatcataagcacggcttaataccttacacataatgctctaaaggagaggttgtaatgtcaaccccgcgtcagattcttgctgcaatttttgatatggatggattacttatcgactcagaacctttatgggatcgagccgaactggatgtgatggcaagcctgggggtggatatctcccgtcgtaacgagctgccggacaccttaggtttacgcatcgatatggtggtcgatctttggtacgcccggcaaccgtggaatgggccaagccgtcaggaagtagtagaacgggttattgcccgtgccatttcactggttgaagagacacgtccattattaccaggcgtgcgcgaagctgttgcgttatgcaaagaacaaggtttattggtgggactggcctccgcgtcaccactacatatgctggaaaaagtgttgaccatgtttgacttacgcgacagtttcgatgccctcgcctcggctgaaaaactgccttacagcaagccgcatccgcaagtatatctcgactgcgcagcaaaactgggcgttgacccactgacctgcgtggcgctggaagactcggtaaatggcatgatcgcttctaaagcagcccgcatgcgttccatcgtcgttcctgcgccagaagcgcaaaatgatccacgttttgtattagcaaacgtcaaactctcatcgctgacagaactcaccgcaaaagaccttctcggttaatgaccaggggcagtgatcacgctgcccctggttctttatctgaatttgcattcaactgacggattaatcgtcaatttaagagaaagagttacaccgtcaccacttccgtgcactgtataaaaatcctatactgtacgtatcgacagtttagtgagttttatcatgacggcggaaggtcaccttctcttttctattgcttgtgcggtatttgccaaaaatgccgagctgacgcccgtgctggcacagggtgactggtggcatattgtcccttccgcaatcctgacgtgtttgttaccggacatcgatcacccaaagtcgtttcttgggcagcgattaaaatggatatcaaaaccgatcgcccgcgcttttgggcatcgtggttttacccacagtctgctggcggtatttgcgctgctggcaaccttttaccttaaggttccggaaggctggttcattccggctgatgcgctacaaggaatggtgctgggttatttgagccacatacttgccgatatgctgacacccgccggtgttcccctgctctggccatgccgctggcgtttccgcttgcctatcctggttccccaaaagggcaaccaactggaacgttttatctgcatggcattatttgtctggtcggtatggatgccccattcattacccgagaacagcgctgttcgttggtcatcgcaaatgatcaataccttgcagatccagtttcatcggcttattaagcatcaggttgaatactaaaaaggcaaaaatcacctttctggaataagcaattccatttgaatataagagccagctcacagttctgttaatcttgcgccaacactatgactgctacgcactgagagatcccctcataatttccccaaagcgtaaccatgtgtgaataaattttgagctagtagggttgcagccacgagtaagtcttcccttgttattgtgtagccagaatgccgcaaaacttccatgcctaagcgaactgttgagagtacgtttcgatttctgactgtgttagcctggaagtgcttgtcccaaccttgtttctgagc

SEQ ID NO: 70 - DNA, 35798 bp, Escherichia coli
  source 1..35798: mol_type = genomic DNA
aatccggtagcggcgtaaaaatcgcggaagggatgaaaaaaacagcgcctgacggcgctgtgtctggcatgcctgcaatccgggaaaccggaccaggaaaaaacttgcaggccataacagtatctacgtgaattctgcaatatattgaatctgcatgcttttgtaggccggataaggcgttcacgccgcatccggcattgactacaaacttaacgctgctcgtagcgtttaaacaccagttcgccattgctggaggaatcttcatcaaagaagtaaccttcgctattaaaaccagtcagttgctctggtttggtcagccgattttcaataatgaaacgactcatcagaccgcgtgctttcttagcgtagaagctgatgatcttaaatttgccgttcttctcatcgaggaacaccggcttgataatctcggcattcaatttcttcggcttcaccgatttaaaatactcatctgacgccagattaatcaccacattatcgccttgtgctgcgagcgcctcgttcagcttgttggtgatgatatctccccagaattgatacagatctttccctcgggcattctcaagacggatccccatttccagacgataaggctgcattaaatcgagcgggcgcagtacgccatacaagccggaaagcattcgcaaatgctgttgggcaaaatcgaaatcgtcttcgctgaaggtttcggcctgcaagccggtgtagacatcacctttaaacgccagaatcgcctggcgggcattctccggcgtgaaatctggctgccagtcatgaaagcgagcggcgttgatacccgccagtttgtcgctgatgcgcatcagcgtgctaatctgcggaggcgtcagtttccgcgcttcatggatcaactgctgggaattgtctaacagctccggcagcgtatagcgcgtggtggtcaacgggctttggtaatcaagcgttttcgcaggtgaaataagaatcagcatatccagtccttgcaggaaatttatgccgactttagcaaaaaaagagaatgagttgatcgatagttgtgattactcctgcgaaacatcatcccacgcgtccggagaaagctggcgaccgatatccggataacgcaacggatcaaacaccgggcgcacgccgagtttacgctggcgtagataatcactggcaatggtatgaaccacaggcgagagcagtaaaatggcggtcaaattggtaatagccatgcaggccattatgatatctgccagttgccacatcagcggaaggcttagcaaggtgccgccgatgaccgttgcgaaggtgcagatccgcaaacaccagatcgctttagggttgttcaggcgtaaaaagaagagattgttttcggcataaatgtagttggcaacgatggagctgaaggcaaacagaataaccacgagggtaacaaactcagcaccccaggaacccattagcacccgcatcgccttctggataagctgaataccttccagcggcatgtaggttgtgtcgttacccgccagtaatatcagcatggcgcttgccgtacagatgaccagggtgtcgataaaaatgccaatcatctggacaatcccttgcgctgccggatgcggaggccaggacgccgctgccgctgccgcgtttggcgccgaacccattcccgcctcattggaaaacatactgcgctgaaaaccgttagtaatcgcctggcttaaggtatatcccgccgcgccgcctgccgcttcctgccagccaaaagcactctcaaaaatagaccaaatgacgtggggaagttgcccgatatttattacgcaaatcaccatgctggtcagcacccagattatcgccatcaacgggacaaacccctgcatgagccgggcgacgccatgaagaccgcgagtgattgccagcagagcaaagacagcgagaataatgcctgtcaccagcgggggaaaatcaaaagaaaaactcagggctcgggcaacggcgttcgcctgaactccgctgaaaattatgccgtaggcgatgagcaaaaagacggcgaacagaacgcccatccaacgcatccccagcccgcgcgccatataccatgccggtccgccacgaaactgtccattgacgtcacgttctttataaagttgtgcaagggaacattcggcaaacgaggtcgccatgccgataaacgcggcaacccacatccaaaagacggctccaggtccaccggcggtaatagccagcgcaacgccggccaggttgccgctacccacgcgcgccgcaagactggtacacaatgactgaaatgaggttaaaccgcctggctgtggatgaatgctatttttaagacttttgccaaactggcggatgtagcgaaactgcacaaatccggtgcgaaaagtgaaccaacaacctgcgccgaagagcaggtaaatcattaccgatccccaaaggacgctgttaataaaggagaaaaaatctggcatgcatatccctcttattgccggtcgcgatgactttcctgtgtaaacgttaccaattgtttaagaagtatatacgctacgaggtacttgataacttctgcgtagcatacatgaggttttgtataaaaatggcgggcgatatcaacgcagtgtcagaaatccgaaacagtctcgcctggcgataaccgtcttgtcggcggttgcgctgacgttgcgtcgtgatatcatcagggcagaccggttacatccccctaacaagctgtttaaagagaaatactatcatgacggacaaattgacctcccttcgtcagtacaccaccgtagtggccgacactggggacatcgcggcaatgaagctgtatcaaccgcaggatgccacaaccaacccttctctcattcttaacgcagcgcagattccggaataccgtaagttgattgatgatgctgtcgcctgggcgaaacagcagagcaacgatcgcgcgcagcagatcgtggacgcgaccgacaaactggcagtaaatattggtctggaaatcctgaaactggttccgggccgtatctcaactgaagttgatgcgcgtctttcctatgacactgaagcgtcaattgcgaaagcaaaacgcctgatcaaactctacaacgatgctggtattagcaacgatcgtattctgatcaaactggcttctacctggcagggtatccgtgctgcagaacagctggaaaaagaaggcatcaactgtaacctgaccctgctgttctccttcgctcaggctcgtgcttgtgcggaagcgggcgtgttcctgatctcgccgtttgttggccgtattcttgactggtacaaagcgaatactgataagaaagagtacgctccggcagaagatccgggcgtggtttctgtatctgaaatctaccagtactacaaagagcacggttatgaaaccgtggttatgggcgcaagcttccgtaacatcggcgaaattctggaactggcaggctgcgaccgtctgaccatcgcaccggcactgctgaaagagctggctgagagcgaaggggctatcgaacgtaaactgtcttacaccggcgaagtgaaagcgcgtccggcgcgtatcactgagtccgagttcctgtggcagcacaaccaggatccaatggcagtagataaactggcggaaggtatccgtaagtttgctattgaccaggaaaaactggaaaaaatgatcggcgatctgctgtaatcattcttagcgtgaccgggaagtcggtcacgctacctcttctgaagcctgtctgtcactcccttcgcagtgtatcattctgtttaacgagactgtttaaacggaaaaatcttgatgaatactttacgtattggcttagtttccatctctgatcgcgcatccagcggcgtttatcaggataaaggcatccctgcgctggaagaatggctgacatcggcgctaaccacgccgtttgaactggaaacccgcttaatccccgatgagcaggcgatcatcgagcaaacgttgtgtgagctagtggatgaaatgagttgccatctggtgctcaccacgggcggaactggcccggcgcgtcgtgacgtaacgcccgatgcgacgctggcagtagcggaccgcgagatgcctggctttggtgaacagatgcgccagataagcctgcattttgtaccaactgcgatcctttcgcgtcaggttggtgtgattcgcaaacaggcgctgatccttaacttacccggtcagccgaagtctattaaagagacgctggaaggtgtgaaggacgctgcgggtaacgttgtggtacacggtatttttgccagcgtaccgtactgcattcagttgctggaagggccatacgttgaaacggcaccggaagtggttgcagcattcagaccgaagagtgcaagacgcgacgttagcgaataaaaaaatccccccgagcggggggatctcaaaacaattagtgggattcaccaatcggcagaacggtgcgaccaaactgctcgttcagtacttcacccatcgccagatagattgcgctggcaccgcagatcagcccaatccagccggcaaagtggatgattgcggcgttaccggcaatgttaccgatcgccagcagggcaaacagcacggtcaggctaaagaaaacgaattgcagaacgcgtgcgcctttcagcgtgccgaagaacataaacagcgtaaatacgccccacagacccaggtagacaccaaggaactgtgcatttggcgcatcggtcagacccagtttcggcatcagcagaatcgcaaccagcgtcagccagaaagaaccgtaagaggtgaatgcggttaaaccgaaagtgttgccttttttgtactccagcagaccagcaaaaatttgcgcgatgccgccgtagaaaatgcccatggcaagaataataccgtccagagcgaaataacccacgttgtgcaggttaagcagaatggtggtcatgccgaagcccatcaggcccagcggtgccggattagccaacttagtgttgcccataattcctcaaaaatcatcatcgaatgaatggtgaaataatttccctgaataactgtagtgttttcagggcgcggcataataatcagccagtggggcagtgtctacgatcttttgaggggaaaatgaaaattttccccggtttccggtatcagacctgagtggcgctaaccatccggcgcaggcaggcgatttgcagtacggctggaatcgtcacgcgataggcgctgccgctgaccgctttaaccccatttagtgccgcacctacagggcctcccagccccgcgccgcgcagcaaaccatgcccaagtacgctcattgctgcgtgggtgcgtaaaatgcgggtcagttggctggaaagcaaatgcgacacgccttttgccaataatttgtctttcatcagcagcggcagcagctcttccagctcattcaccctcgcatcgaccgcgtgcagaaactcctgtttatgttcctcgtccatattcttccaggtgttacgcagaaattgttccagtaactgttgctcaatctcaaacgtagacatctctttgtcggctttcagcttcaatcgttttgaaacatcgagcaaaatggcccgatacaatttaccgtgtccgcgcagtttgttggcgatactatcgccaccaaaatgctgtaattctccagcaatcagctgccagttgcggcgatgttgctcgggatgcccttccatcgatttaaacagttcgttgcgcatcagtacgctggagaggcgagttttgcctttttcattatgggtgagcaatcgggcgaaatttgccaactgttcctcactgcaatgctggagaaaatccagatctgaatcattcaggtaattaacattcattttttgtggcttctatattctggcgttagtcgtcgccgataattttcagcgtggccatatccgatgagttcaccgtatgaccggaaaaggtgatttttgagacgcagcgtttattgtcgttatcgctgttaatgttgatccagtcagtggtttgcccttcttttatttctgaaggaatattcaggctctgactggcgctacgggcggctttgaaataaaccgatgcaccgcttaactgtaaatcgccatggtcggcagagagttgtatgcgtttaacaattcggcaaacaggaagtttcagcgccagatcgttggtttcgttacgtggcatcgcaatgacgccgaggattttatggtcgtttgcctgcgccgtgcagcacagcatcagactaatcgccaggctggcggaaatcgtaaaaacggatttcataaggattcacttagtggggagaggtagggggatggatacccactagtttactgctgataaagagaagattcaggtgcgtaatgttttctttttattacaattttttgatgaatgtcttggctgcgattcattctttatatgaataaaattgctgtcagtttcacgtcttgtcctgctatatcgcgaaatttctgcgcaaaagcacaaaaaatttttgcatctcccccttgatgacgtgggttacgaccccatttagtagtcaaccgcagtgagtgagtctgcaaaaaaatgaaattgggcagttgaaaccagacgtttcgcccctattacagactcacaaccacatgatgaccgaatatatagtggagacgtttagatgggtaaaataattggtatcgacctgggtactaccaactcttgtgtagcgattatggatggcaccactcctcgtgtgctggagaacgccgaaggcgatcgcaccacgccttctatcattgcctatacccaggatggtgaaactctggttggtcagccggctaaacgtcaggcagtgacgaacccgcaaaacaccctgtttgcgattaaacgcctgattggccgccgcttccaggacgaagaagtacagcgtgatgtttccatcatgccgttcaaaattattgctgctgataacggcgacgcatgggtcgaagttaaaggccagaaaatggcaccgccgcagatctctgctgaagtgctgaaaaaaatgaagaaaaccgctgaagattacttgggtgaaccggtaactgaagctgttatcaccgtaccggcatactttaacgatgctcagcgtcaggcaaccaaagacgcaggccgtatcgctggtctggaagtaaaacgtatcatcaacgaaccgaccgcagctgcgctggcttacggtctggacaaaggtactggcaaccgtactatcgcggtttatgacctgggtggtggtactttcgatatttctattatcgaaatcgacgaagttgacggcgaaaaaaccttcgaagttctggctaccaacggtgatacccacctgggtggtgaagacttcgacagccgtctgatcaactacctggttgaagaattcaagaaagatcagggcattgacctgcgcaacgatccgctggcaatgcagcgcctgaaagaagcggcagaaaaagcgaaaatcgaactgtcttccgctcagcagaccgacgttaacctgccgtacatcactgcagatgcgaccggtccgaaacacatgaacatcaaagtgactcgtgcgaaactggaaagcctggttgaagatctggtaaaccgttccattgagccgctgaaagttgcactgcaggacgctggcctgtccgtatctgatatcgacgacgttatcctcgttggtggtcagactcgtatgccaatggttcagaagaaagttgctgagttctttggtaaagagccgcgtaaagacgttaacccggacgaagctgtagcaatcggtgctgctgttcagggtggtgttctgactggtgacgtgaaagacgtactgctgctggacgttaccccgctgtctctgggtatcgaaaccatgggcggtgtgatgacgacgctgatcgcgaaaaacaccactatcccgaccaagcacagccaggtgttctctaccgctgaagacaaccagtctgcggtaaccatccatgtgctgcagggtgaacgtaaacgtgcggctgataacaaatctctgggtcagttcaacctggatggtatcaacccggcaccgcgcggcatgccgcagatcgaagttaccttcgatatcgatgctgacggtatcctgcacgtttccgcgaaagataaaaacagcggtaaagagcagaagatcaccatcaaggcttcttctggtctgaacgaagatgaaatccagaaaatggtacgcgacgcagaagctaacgccgaagctgaccgtaagtttgaagagctggtacagactcgcaaccagggcgaccatctgctgcacagcacccgtaagcaggttgaagaagcaggcgacaaactgccggctgacgacaaaactgctatcgagtctgcactgactgcactggaaactgctctgaaaggtgaagacaaagccgctatcgaagcgaaaatgcaggagctggcacaggtttcccagaaactgatggaaatcgcccagcagcaacatgcccagcagcagactgccggtgctgatgcttctgcaaacaacgcgaaagatgacgatgttgtcgacgctgaatttgaagaagtcaaagacaaaaaataatcgccctataaacgggtaattatactgacacgggcgaaggggaatttcctctccgcccgtgcattcatctaggggcaatttaaaaaagatggctaagcaagattattacgagattttaggcgtttccaaaacagcggaagagcgtgaaatcaaaaaggcctacaaacgcctggccatgaaataccacccggaccgtaaccagggtgacaaagaggccgaggcgaaatttaaagagatcaaggaagcttatgaagttctgaccgactcgcaaaaacgtgcggcatacgatcagtatggtcatgctgcgtttgagcaaggtggtatgggcggcggcggttttggcggcggcgcagacttcagcgatatttttggtgacgttttcggcgatatttttggcggcggacgtggtcgtcaacgtgcggcgcgcggtgctgatttacgctataacatggagctcaccctcgaagaagctgtacgtggcgtgaccaaagagatccgcattccgactctggaagagtgtgacgtttgccacggtagcggtgcaaaaccaggtacacagccgcagacctgtccgacctgtcatggttctggtcaggtgcagatgcgtcagggattcttcgctgtacagcagacctgtccacactgtcagggccgcggtacgctgatcaaagatccgtgcaacaaatgtcatggtcatggtcgtgttgagcgcagcaaaacgctgtccgttaaaatcccggcaggggtggacactggagaccgcatccgtcttgcgggcgaaggtgaagcgggcgagcatggcgcaccggcaggcgatctgtacgttcaggttcaggttaaacagcacccgattttcgagcgtgaaggcaacaacctctattgcgaagtcccgatcaacttcgctatggcggcgctgggtggcgaaatcgaagtaccgacccttgatggtcgcgtcaaactgaaagtgcctggcgaaacccagaccggtaagcttttccgtatgcgcggtaaaggcgtcaagtctgtccgcggtggcgcacagggtgatttgctgtgccgcgttgtcgtcgaaacaccggtaggcctgaacgagaagcagaaacagctgctgcaagagctgcaagaaagcttcggtggcccaaccggtgagcacaacagcccgcgctcaaagagcttctttgatggtgtgaagaagttttttgacgacctgacccgctaacctccccaaaagcctgcccgtgggcaggcttgggtaaaattagggtgcgttgaagatatgcgagcacctgaaaagtggcggggatcactccccgccgttgctcttactcggattcgtaagccgtgaaaacagcaacctccgtctggccagttcggatgtgaacctcacagaggtcttttctcgttaccagcgccgccactacggcggtgatacagatgacgatcagggcgacaatcatcgccttatgctgcttcattgctctcttctccttgaccttacggtcagtaagaggcactctacatgtgttcagcatatagggggcctcgggttgatagtaaaatatcactcggggcttttctctatctgccgttcagctaatgcctgagacagatagcctcaagcacccgccgctattatatcgctctctttaacccattctgttttatcgattctaatcctgaagacgcctcgcatttttgtggcgtaattttttaatgatttaattatttaactttaatttatctatttatcgcaattattgacgacaagctggattatttttgaaatattgtcctaacaaataacgccgactgacaagaaattaattattacttttcctaattaatccctcagaaatcctgaccttaagctatgattatcagggcttagggtcacccgttagcgcttacagccgtcaaaaactcatctcaccgctgatggcgcaaatcctttaattgctcgtaaaaaacgagttattcctacactataatctgattttaacgatgattcgtgcggggtaaaatagtaaaaacgatctattcacctgaaagagaaataaaaagtgaaacatctgcatcgattctttagcagtgatgcctcgggaggcattattcttatcattgccgctatcctggcgatgatgatggccaacagcggcgcaaccagtggatggtatcacgactttctggagacgccggttcagctccgggttggttcactcgaaatcaacaaaaacatgctgttatggataaatgacgcgctgatggcggtatttttcctgttagtcggtctggaagttaaacgtgaactgatgcaaggatcgctagccagcttacgccaggccgcatttccagttatcgccgctattggtgggatgattgtgccggcattactctatctggcctttaactatgccgatccgattacccgcgaagggtgggcgatcccggcggctactgacattgcctttgcacttggtgtgctggcgctgttgggaagtcgtgttccgttagcactgaagatctttttgatggctctggctattatcgacgatcttggggccatcattatcatcgcattgttctacactaatgacttatcgatggcctctcttggcgtcgcggctgtagcaattgcggtactcgcggtattgaatctgtgtggtgtacgccgcacgggcgtctatattctggttggcgtagtgttgtggactgcggtgttgaaatcgggggttcacgcaaccctggcgggggtaattgtcggcttctttattcctttgaaagagaagcatgggcgttctccagcgaagcgactggagcatgtgttacacccgtgggtggcgtatctgattttgccgctgtttgcatttgctaatgctggcgtttcactgcaaggtgtcacgctggatggcttgacctccattctgccattggggatcatcgctggcttgctgattggcaaaccgctggggattagtctgttctgctggttggcgctgcgtttgaaactggcgcatctgcctgagggaacgacttatcagcaaattatggcggtggggatcctgtgcggtatcggttttactatgtctatctttattgccagcctggcctttggtagcgtagatccagaactgattaactgggcgaaactcggtatcctggtcggttctatctcttcggcggtaattggatacagctggttacgcgttcgtttgcgtccatcagtgtgacaggacggtttaccggggagccataaacggctcccttttcattgttatcagggagagaaatgagcatgtctcatatcaattacaaccacttgtattacttctggcatgtctataaagaaggttccgtggttggcgcagcggaggcgctttatttgacaccacaaaccattaccggacagatccgggctctggaagagcgcctgcaaggcaaattatttaagcgcaagggacgtggtctcgaacccagcgagctgggagaactggtctatcgctatgccgataaaatgttcaccttaagccaggaaatgctggatattgtgaactatcgcaaagaatccaatttattgtttgacgttggcgtggctgatgcactttccaaacgcctggtcagtagcgtgctgaatgctgcagtggtagaaggcgagcccattcatcttcgctgcttcgaatccacccacgaaatgctgctggagcaattaagtcagcataaactggatatgatcatttctgactgtccgatagactctacgcagcaggaaggcctgttctccgtgagaattggcgaatgtggcgtgagtttctggtgtacaaatccaccaccagaaaaaccgttcccggcttgtctggaagaacggcgacttttgattcctgggcgacgttcaatgttagggcgcaaattgcttaactggtttaactcccagggattaaacgtagaaatcctcggcgagtttgatgatgccgcgttgatgaaagcttttggtgcgatgcacaatgcaatcttcgttgccccaacgctttatgcatatgacttttatgccgataaaactgtcgtagaaattggtcgcgtcgagaatgtgatggaagagtaccatgctatttttgctgagcggatgattcagcacccggcggtacagcgaatctgcaatacggattattctgcgctttttagtccagcggcgcgttaatcggcacctccccccaaagttaaggtgggggagatagattagttgtacataaccacgattttgactcggctcattatttgcccgcttgagacattatttccatatgtacgcgggcgaataaatagaggaatctgattacttccttcatggggatgctgaaaagagtagtaattgcttttaccatactggatttcattcgtaccatcattggagagttgaaagcctatttgacccgcaccgtcctcactgttttctaactcattttttaatatgctggttcctgactcctgtatcgtcactggttcaaagtaatattcaacatcactgggttcaaaaactaattcaccttgctcgccctggatgcagtcaaatcttatatgatgaaactgataattttcattattgatacgagacagtacaaatcgtccagtgtcgatggattgatcttcaaaaccacaggtcattaaatttacctgtaaaatagtatttaaattataattaaagcggacgctattacaattagtattattccctgtacatgaactcacttcaatttcgaacaacaaaggaaaaggagttcctggaaaaatgtctgcggtgttagaactatctgatacagatgcgatagaatatggaatggtgaaatttatcgcagatagcatttcttctaaattataagatgacttccctggaagctctatttttttaccgtcagattcaaaggggaaattaataatataatgacgacttccgactttaaaccttaaagcgttctgtgttaaaaaatgaactttaatggcgttggttgtctcttgcaagtctgtacactcaatgatatttccggtgttttcaattttttcggcggttagattacctttcatactcagtggcttgagtatatatgttccacgttgttcaccgacattggtcaatgcacagggagcactttgcacaataaaagaatatagactcaaggtgattaataaaagccacttcatagtaaactccttttactggcatatatatgttttgttttcatcgataacgtgttgaaaagtaatagtacagaataagttctgttcatcattgagagcaacttttattccagtgggaatttcatctacgcgaataaaaaggcgactaccctggccaacgactccaatattattttcctggagatccagtacgtcatagccaaaggttaatggcgaaccatcgggacgcagtgcctgtatataccagggcttacgttggtcagttgtaaactgcacataagaaactgctccacggtaaggtgcaataatttgacgattgccctgcaattctgtttcactttcactgtttgctatatcaagtaccagatggttttcacgatgaggtattatcaggtcgtaaacaacctggcctttgctgtttgttcgattgtatttttgtccattaatatgtgcaccttctaacccaggcgcatccagaattgcaaatgtatcggataactggttagtgatattaataccaccgggccagacaactaatccactactaatacttccaccactttgctaggcgtttttagaatgactatagctgccatctattatggcgatgggagttctccagcttaaattcgtaccaagcgaggtatcattattttgttgttgctgattaacatatataccataatttaactgatcatgttcaccggctatgccagtaattccagtattgttggaggaatagccatctttggaaaatgaggtcgaattcgataagttaatttggtgacgtgttttggcaatatcatccccccagtagaaaggaatggagataaacagattaaaacgctcctcttctttattattttcatcataagattggctggcagagaaagtataactaatgtgttgccagttattggagtaactgaattggtaatctttagcatttccacttcgcccccagtaattccgccaaagcgcacttaatgatacatttcccagattattggataaaggttgcataatattagcagaaaggctattttttctgccaatatcataaaaatcatcataatcactctgatgatagtgtttatcattttcgtaaagatggtcgctgaatgtcctgtaatcctgcgaagcataacgccaggcggccacgctaaatcgagtggctgtttgtactagatatttattataggcgacctgatagctcgtaccttcgtgtctggtatcattatttaacttactactcgatcgggcagcgtaaaaagagatggcacccagcggtgtattccaaccatttcccagagttatagcattatagttatcggataaaatcgtacccgattatgtgatcaggttgttattatttagattaatgtttaaaatttttaatttcttgatgtgaagttgatgaaagtttaatattcttaattattcccttctttataagaagagcaaggtgccattattagagtgagagagtaggatgtttcagagtatgcttcagattattttttattcctctgtagtgaattaataatcatcacagttaatttcattctgaaattacttcttttttgagattttttaattttgatgagctatgtttttcataaggaacatacactcgttgatgcttttaaggtattttctcatttctgatgatgttttgtcgtaatcgtgcataaacttattaagttctttatacacatcattatttagctttacattgtcgcgaactaaagtttgtaccaatggtatcaaaatttcgaaacgggacggtttgtcatcaatacttgccagggttttgaatactcctgtgtatctgtaacctaagtgcttattgacaagttgagtggtccatcgaccaggcataatatcttcacagagcaaattttttattctggtattagtgaatgatgctccaaatatgttgctttttttaatgaagagattattaatttctccatttgaaaagatggtgtttgataagtcgctttcaaaacataatatattgggtaatacacaaccaaaataatacccatatgaaaggtcgctcttttctattgttatatttgatagcaacattttatgtatattaatattaagggcagtcaaatactggatgttttgctcgttaagttcatgcatctccagagatttattatagggtaataaaagtataaattcctttacattatttccgcagtaagaaaagacaacatcaaatttattggtgattgtgttttcagttgagcagtaagctgatttttttattaatcgactgggtatgcttttaaataaagataattttttacatagttgtgaatatgcaatattgctagttttaaagttctgccacattattccctggttatcatctatcgatgaggaggggattttattgcattgctcattgtatagctcagggaaaatattttttttaataagctttttgatttcctggttaagatgactttttttcttgtctattgcactgtattttgcgttttgtgacgtttcctgatgatcataaaatgactggagatttctgcaggcctcataaaatatttcaggagtatatagctgtgggtatatttcttggttgaagtttgcctttaaaaaattaacgaatttttcatggcattcttggtatatcttaatctcttcagaaagacattcgcttgttctgtcatcaaaaacatccaatctaagtaatgtgatacctttgtgtttaaaaaaataaaattgaactgtatgttctatgagtttacatctataaaaatatgcatctctcagatgagtatattgaaaaaaatgatgaaggactggagatggtttaggcaagttatggcttctaaaaagtcatcaaacaaaattaagaactctgttttatactcgcaaaatacttttactaactcattttgtcttgttttatttattattacatcatctactatatttgatttataaagacaatgtggcgaagttgagataccatttgtcattatcagtccttgaagttgatgaatttttattaatttaatttatgagtgaatgtgactactatcaaaaatagctcattaattttatgaagtagaatataaataggtatttaacctgtgttgattgttgttaattatttacaagatctaataaggagatatttatgaatggttaaagtgtataggaatttaattcaaaaatagagtggtcttaagtttaatatctcaatgtgtatcacgatatccacattctttgtaggggagtctggagattgagtagatattcttgttcagaatgtatcagccgatggttctacgattcttaagccacgaagagttcagaaagtgtaacggcatgtctgtaaaagccagcatcttttgactatctggcaaccggtagtgtgttctctcacgcatcataaaagcagcaggcataaaaaaacccgcttgcgcgggctttttcacaaagcttcagcaaattggcgattaagccagtttgttgatctgtgcagtcaggttagccttatgacgtgcagctttgtttttgtggatcagacctttagcagcctgacggtccacgatcggttgcatttcgttaaatgctttctgtgcagcagctttgtcgccagcttcgatagctgcgtatactttcttgatgaaagtacgcatcatagagcgacggcttgcgttgtgcttacgagccttttcagactgaatggcgcgcttcttagctgatttgatattagccaaggtccaactcccaaatgtgttctatatggacaattcaaaggccgaggaatatgcccttttagccttcttttgtcaatggatttgtgcaaataagcgccgttaatgtgccggcactcgttacgtagtgatggcgcaggattctaccagcttgcggggtgtgaatacagcttttccgcgataaaaattgcagcaggcggtcactttcttcccgtgatttgcgccatggcaatgaaaagccacttctttctgatttcggtactcaatcgccggttaaccttgaccgctgtacaaggtatactcggacgattttcactgttttgagccagacatgaagctgatacgcggcatacataatctcagccaggccccgcaagaagggtgtgtgctgactattggtaatttcgacggcgtgcatcgcggtcatcgcgcgctgttacagggcttgcaggaagaagggcgcaagcgcaacttaccggtgatggtgatgctttttgaacctcaaccactggaactgtttgctaccgataaagccccggcacggctgacccggctgcgggaaaaactgcgttaccttgcagagtgtggcgttgattacgtgctgtgcgtgcgtttcgacaggcgtttcgcggcgttaaccgcgcaaaatttcatcagcgatcttctggtgaagcatttgcgcgtaaaatttcttgccgtaggtgatgatttccgctttggcgctggtcgtgaaggcgatttcttgttattacagaaagctggcatggaatacggcttcgatatcaccagtacgcaaactttttgcgaaggtggcgtgcgtatcagcagcaccgctgtgcgtcaggcgctggcggatgacaatctggctctggcagaaagtttactggggcacccgtttgccatctccgggcgtgtagtccacggtgatgaattagggcgcactataggtttcccgacggcgaatgtaccgctacgccgtcaggtttccccggtgaaaggggtttatgcggtagaagtgctgggcctcggtgaaaagccgttacccggcgtggcaaacattggaacacgcccaacggttgccggtattcgccagcagctggaagtgcatttgttagatgttgcaatggacctttacggtcgccatatacaagtagtgctgcgtaaaaaaatacgcaatgagcagcgatttgcgtcgctggacgaactgaaagcgcagattgcgcgtgatgaattaaccgcccgcgaattttttgggctaacaaaaccggcttaagcctgttatgtaatcaaaccgaaacacggaaccgagaatctgatgagtgactataaatcaaccctgaatttgccggaaacagggttcccgatgcgtggcgatctcgccaagcgcgaaccgggaatgctggcgcgttggactgatgatgatctgtacggcatcatccgtgcggctaaaaaaggcaaaaaaaccttcattctgcatgatggccctccttatgcgaatggcagcattcatattggtcactcggttaacaagattttgaaagacattatcgtgaagtccaaagggctttccggttatgactcgccgtatgtgcctggctgggactgccacggtctgccgatcgagctgaaagtagagcaagaatacggtaagccgggtgagatattcaccgccgccgagttccgcgccaagtgccgcgaatacgcggcgacccaggttgacggtcaacgcaaagactttatccgtctgggcgtgctgggcgactggtcgcacccgtacctgaccatggacttcaaaactgaagccaacatcatccgcgcgctgggcaaaatcatcggcaacggtcacctgcacaaaggcgcgaagccggtacactggtgcgttgactgccgttctgcgctggcggaagcggaagttgagtattacgacaaaacttctccgtccatcgacgttgcttttcaggcggtcgatcaggatgcactgaaagcaaaatttgccgtaagcaacgttaacggcccaatctcgctggtgatctggaccactacgccgtggactctgcctgcgaaccgcgcaatctctattgcacctgatttcgactatgcgctggtgcagatcgacggtcaggccgtgattctggcgaaagatctggttgaaagcgtaatgcagcgtatcggcgtgaccgattacaccattctcggcacggtaaaaggtgcggagcttgagttgctgcgctttacccatccgtttatgggcttcgacgttccggcaatcctcggcgatcacgttaccctggatgccggtaccggtgccgttcacaccgcgcctggccacggcccggacgactatgtgatcggtcagaaatacggcctggaaaccgctaacccggttggcccggacggcacttatctgccgggcacttatccgacgctggatggcgtgaacgtcttcaaagcgaacgacatcgtcgttgcgctgctgcaggaaaaaggcgcgctgctgcacgttgagaaaatgcagcacagctatccgtgctgctggcgtcacaaaacgccgatcatctttcgcgcgacgccgcagtggttcgtcagcatggatcagaaaggtctgcgtgcgcagtcactgaaagagatcaaaggcgtgcagtggatcccggactggggccaggcgcgtatcgagtcgatggttgctaaccgtcctgactggtgtatctcccgtcagcgcacctggggcgtaccgatgtcactgttcgtgcacaaagacacggaagagctgcatccgcgtactctcgaactaatggaagaagtggcaaaacgcgttgaagttgacggcatccaggcgtggtgggatcttgatgcgaaagagatcctcggcgatgaagctgatcagtacgtgaaagtgccggacacattggatgtatggtttgactccggatctacccactcttctgttgttgacgtgcgtccggaatttgccggtcacgcagcggacatgtatctggaaggttctgaccagcaccgtggttggttcatgtcttccctaatgatctccaccgcgatgaaaggcaaagcgccgtatcgtcaggtactgacccacggctttaccgtggatggtcagggtcgcaagatgtctaaatccatcggcaataccgtttcgccgcaggatgtgatgaacaaactgggcgcggatattctgcgtctgtgggtggcatcaaccgactacaccggtgaaatggccgtttctgacgagatcctgaaacgtgctgccgatagctatcgtcgtatccgtaacaccgcgcgcttcctgctggcaaacctgaacggttttgatccagcaaaagatatggtgaaaccggaagagatggtggtactggatcgctgggccgtaggttgtgcgaaagcggcacaggaagacatcctcaaggcgtacgaagcatacgatttccacgaagtggtacagcgtctgatgcgcttctgctccgttgagatgggttccttctacctcgacatcatcaaagaccgtcagtacaccgccaaagcggacagtgtggcgcgtcgtagctgccagactgcgctgtatcacatcgcagaagcgctggtgcgctggatggcaccaatcctctccttcaccgctgatgaagtgtggggctacctgccgggcgaacgtgaaaaatacgtcttcaccggtgagtggtacgaaggcctgtttggcctggcagacagtgaagcgatgaacgatgcgttctgggacgagctgttgaaagtgcgtggcgaagtgaacaaagtcattgagcaagcgcgtgccgacaagaaagtgggtggctcgctggaagcggcagtaaccttgtatgcagaaccggaactgtcggcgaaactgaccgcactgggcgatgaattacgatttgtcctgttgacctccggcgctaccgttgcagactataacgacgcacctgctgatgctcagcagagcgaagtactcaaagggctgaaagtcgcgttgagtaaagccgaaggtgagaagtgcccacgctgctggcactacacccaggatgtcggcaaggtggcggaacacgcagaaatctgcggccgctgtgtcagcaacgtcgccggtgacggtgaaaaacgtaagtttgcctgatgagtcaatcgatctgttcaacagggctacgctggctgtggctggtggtagtcgtgctgattatcgatctgggcagcaaatacctgatcctccagaactttgctctgggggatacggtcccgctgttcccgtcgcttaatctgcattatgcgcgtaactatggcgcggcgtttagtttccttgccgatagcggcggctggcagcgttggttctttgccggtattgcgattggtattagcgtgatcctggcagtgatgatgtatcgctcgaaggccacgcagaagctaaacaatatcgcttacgcgctgattattggcggcgcgctaggcaacctgttcgaccgcctgtggcacggcttcgttgtcgatatgatcgacttctacgtcggcgactggcacttcgccaccttcaaccttgccgatactgccatctgtgtcggtgcggcactgattgtgctggaaggttttttgccttctagagcgaaaaaacaataataaaccctgccggatgcgatgctgacgcatcttatccggcctacagattgctgcgaaatcgtaggccggataaggcgtttacgccgcatccggcaaaaatccttaaatataagagcaaacctgcatgtctgaatctgtacagagcaatagcgccgtcctggtgcacttcacgctaaaactcgacgatggcaccaccgccgagtctacccgcaacaacggtaaaccggcgctgttccgcctgggtgatgcttctctttctgaagggctggagcaacacctgttggggctgaaagtgggcgataaaaccaccttctcgttggagccagatgcggcgtttggcgtgccgtcaccggacctgattcagtacttctcccgccgtgaatttatggatgcaggcgagccagaaattggcgcaatcatgctttttaccgcaatggatggcagtgagatgcctggcgtgatccgcgaaattaacggcgactccattaccgttgatttcaaccatccgctggccgggcagaccgttcattttgatattgaagtgctggaaatcgatccggcactggaggcgtaacatgcagatcctgttggccaacccgcgtggtttttgtgccggggtagaccgcgctatcagcattgttgaaaacgcgctggccatttacggcgcaccgatatatgtccgtcacgaagtggtacataaccgctatgtggtcgatagcttgcgtgagcgtggggctatctttattgagcagattagcgaagtaccggacggcgcgatcctgattttctccgcacacggtgtttctcaggcggtacgtaacgaagcaaaaagtcgcgatttgacggtatttgacgcgacctgtccgctggtgaccaaagtgcatatggaagtcgcccgcgccagtcgccgtggcgaagaatctattctcatcggtcacgccgggcacccggaagtggaagggacaatgggccagtacagtaacccggaagggggaatgtatctggtcgaatcgccggacgatgtgtggaaactgacggtcaaaaacgaagagaagctctcctttatgacccagaccacgctgtcggtggatgacacgtctgatgtgatcgacgcgctgcgtaaacgcttcccgaaaattgtcggtccgcgcaaagatgacatctgctacgccacgactaaccgtcaggaagcggtacgcgccctggcagaacaggcggaagttgtgttggtggtcggttcgaaaaactcctccaactccaaccgtctggcggagctggcccagcgtatgggcaaacgcgcgtttttgattgacgatgcgaaagatatccaggaagagtgggtgaaagaggttaaatgcgtcggcgtgactgcgggcgcatcggctccggatattctggtgcagaatgtggtggcacgtttgcagcagctgggcggtggtgaagccattccgctggaaggccgtgaagaaaacattgttttcgaagtgccgaaagagctgcgtgtcgatattcgtgaagtcgattaagtcattagcagcctaagttatgcgaaaatgccggtcttgttaccggcattttttatggagaaaacatgcgtttacctatcttcctcgatactgaccccggcattgacgatgccgtcgccattgccgccgcgatttttgcccccgaactcgacctgcaactgatgaccaccgtcgcgggtaatgtctcggttgagaaaaccacccgcaacgccctgcaactgctgcatttctggaatgcggagattccgctcgcccagggagccgctgtgccgctggtacgcgcaccgcgtgatgcagcatctgtgcacggcgaatcgggaatggctggctacgactttgttgagcacaaccgaaagccaatcgggataccagcgtttctggcgattcgtgatgccctgatgcgtgcaccagagcctgttaccctggtggccatcggcccgttaaccaatattgcgctgttactttcacaatgcccggaatgtaaaccgtatattcgtcgtctggtgatcatgggcggttcttctggtcgcggcaactgtacaccaaatgccgagtttaatatcgctgccgatccagaagcggctgcctgtgtcttccgtagcggaatcgaaatcgtcatgtgcggtctggatgtcaccaatcaggcaatattaacccctgactatctcgctactttgccggagttgaatcgcaccggaaaaatgcttcatgcactgtttagccactaccgtagcggcagtatgcaaagcggtctgcgaatgcacgatctctgcgccatcgcctggctggtgcgcccggacttattcaccctcaagccgtgttttgtcgcggtagaaactcaaggcgaatttacctcaggcacgacggtggttgatatcgacggttgcctgggcaaaccagccaatgtaaaggtggcattggatctggatgtgaaaggcttccagcagtgggtggctgaggtgctggctctggcgtcgtaacctgtcacatgttatcggcatgcagtcattcatcgactcatgcctttcactgatatccctccctgtttatcattaatttctaattatcagcgtttttggctggcggcgtagcgatgcgctggttactctgaaaacggtctatgcaaattaacaaaagagaatagctatgcatgatgcaaacatccgcgttgccatcgcgggagccggggggcgtatgggccgccagttgattcaggcggcgctggcattagaaggcgtgcagctgggcgcggcgctggagcgcgaaggatcttctttactgggcagcgacgccggtgagctggctggtgcagggaaaacaggcgttaccgtgcaaagcagcctcgatgcggtaaaagatgattttgatgtgtttatcgattttacccgtccggaaggtacgctgaaccatctcgctttttgtcgccagcatggcaaagggatggtgatcggcactacggggtttgacgaagccggtaaacaggcgattcgtgacgccgccgccgatattgcgattgtctttgccgccaattttagcgttggcgttaacgtcatgcttaagctgctggagaaagcagccaaagtgatgggtgactacaccgatatcgaaattattgaagcacatcatagacataaagttgatgcgccgtcaggcaccgcactggcaatgggagaggcgatcgcccacgcccttgataaagatctgaaagattgcgcggtctacagtcgtgaaggccacaccggtgaacgtgtgcctggcaccattggttttgccaccgtgcgtgcaggtgacatcgttggtgaacataccgcgatgtttgccgatattggcgagcgtctggagatcacccataaggcgtccagccgtatgacatttgctaacggcgcggtaagatcggctttgtggttgagtggtaaggaaaatggtctttttgatatgcgagatgtacttgatctcaataatttgtaaccacaaaatatttgttatggtgcaaaaataatacatttaatttattgattataaagggctttaatttttggcccttttatttttagtgttatgtttttaaatattctataagtgccaaaaattacatgttttgtcttctgtttttgttgttttaatgtaaattttgaccatttggtccactttttcctgctcgtttttatttcatgcaatcttcttgctgcgcaagcgttttccagaacaggttatatgatctttttgtcgcttaatgcctgtaaaacatgcatgagccacaaaataatataaaaaataccgccattaagttgacttttagcgcccatatctccagaatgccgccgtttgccagaaattcgtcggtaagcagatttgcattgatttacgtcatcattgtgaattaatatgcaaataaagtgagtgaatattctctggagggtgttttgattaagtcagcgctattggttctggaagacggaacccagtttcacggtcgggccataggggcaacaggttcggcggttggggaagtcgttttcaatacttcaatgaccggttatcaagaaatcctcactgatccttcctattctcgtcaaatcgttactcttacttatccccatattggcaatgtcggcactaatgacgccgatgaagaatcttctcaggtacatgcacaaggtctggtgattcgcgatctgccgctgattgccagcaacttccgtaataccgaagacctttcttcttacctgaagcgccataacatcgtggcgattgccgatatcgatacccgtaagctgacgcgtttactgcgcgagaaaggcgcacagaatggctgcattatcgcaggcgataacccggatgcggcgttggcgttagaaaaagcccgcgcgttcccaggtctgaatggcatggatctggcaaaagaagtgaccaccgcagaagcctatagctggacacaagggagctggacgttgaccggcggcctgccagaagcgaaaaaagaagacgagctgccgttccacgtcgtggcttatgattttggtgccaagcgcaacatcctgcggatgctggtggatagaggctgtcgcctgaccatcgttccggcgcaaacttctgcggaagatgtgctgaaaatgaatccagacggcatcttcctctccaacggtcctggcgacccggccccgtgcgattacgccattaccgccatccagaaattcctcgaaaccgatattccggtattcggcatctgcctcggtcatcagctgctggcgctggcgagcggtgcgaagactgtcaaaatgaaatttggtcaccacggcggcaaccatccggttaaagatgtggagaaaaacgtggtgatgatcaccgcccagaaccacggttttgcggtggatgaagcaacattacctgcaaacctgcgtgtcacgcataaatccctgttcgacggtacgttacagggcattcatcgcactgataaaccggcgttcagcttccagggtcacccggaagccagccctgggccacacgacgcagcgccgttgttcgaccactttatcgagttaattgagcagtaccgtaaaaccgctaagtaatcaggagtaaaagagccatgccaaaacgtacagatataaaaagtatcctgattctgggtgcgggcccgattgttatcggtcaggcgtgtgagtttgactactctggcgcgcaagcatgtaaagccctgcgcgaagagggttaccgcgtcattctggtgaactccaacccggcgaccatcatgaccgacccggaaatggccgatgcgacctacatcgagccgattcactgggaagtagtacgcaagattattgaaaaagagcgcccggacgcggtgctgccaacgatgggcggtcagacggcgctgaactgcgcgctggagctggagcgtcagggcgtgttggaagagttcggcgtgactatgattggtgcgaccgccgatgcgattgataaagcagaagaccgccgtcgtttcgacgtagcgatgaagaaaattggtctggaaaccgcgcgttccggtatcgcacacacgatggaagaagcgctggcggttgccgctgacgtgggcttcccgtgcattattcgcccatcctttaccatgggcggtagcggcggcggtatcgcttataaccgcgaagagtttgaagaaatttgcgcccgcggtctggatctctccccaaccaaagagctgctgattgatgagtcgctgatcggctggaaagagtacgagatggaagtggtgcgtgataaaaacgacaactgcatcatcgtctgctctatcgaaaactttgatgcgatgggcatccataccggtgactccatcactgtcgcgccagcccaaacgctgaccgacaaagaatatcaaatcatgcgtaacgcctcgatggcggtgctgcgtgaaatcggcgttgaaaccggtggttccaatgtccagtttgcggtgaacccgaaaaacggtcgcctgattgttatcgaaatgaacccacgcgtgtcccgttcttcggcgctggcgtcgaaagcgaccggtttcccgattgctaaagtggcggcgaaactggcggtgggttacaccctcgacgaactgatgaacgacatcactggcggacgtactccggcctccttcgagccgtccatcgactatgtggttactaaaattcctcgcttcaacttcgaaaaattcgctggtgctaacgaccgtctgaccactcagatgaaatcggttggcgaagtgatggcgattggtcgcacgcagcaggaatccctgcaaaaagcgctgcgcggcctggaagtcggtgcgactggattcgacccgaaagtgagcctcgatgacccggaagcgttaaccaaaatccgtcgcgaactgaaagatgctggcgcagagcgtatctggtacatcgccgatgccttccgtgcgggcctgtctgtggacggcgtgttcaacctgaccaatattgaccgctggttcctggtacagattgaagaactggtgcgtctggaagagaaagtagcggaagtgggcatcactggcctgaacgctgaattcctgcgccagctgaaacgcaaaggctttgccgatgcgcgtctggcaaaactggcgggcgtgcgcgaagcggaaatccgcaagctgcgcgaccagtatgacctgcacccggtttataagcgcgtggatacctgtgcggcagagttcgccaccgacaccgcttacatgtactccacttatgaagaagagtgcgaagcgaatccgtctaccgaccgtgaaaaaatcatggttctcggcggcggcccgaaccgtatcggtcagggtatcgaattcgactactgctgtgtacacgcctcgctggcgctgcgcgaagacggttacgaaaccattatggttaactgtaacccggaaaccgtctccaccgactacgacacttccgatcgcctctacttcgagccggtaactctggaagatgtgctagaaatcgtgcgtattgagaagccgaaaggcgttatcgttcagtacggcggtcagaccccgctgaaactggcgcgcgcgctggaagctgctggcgtaccggttatcggcaccagcccggatgctatcgaccgtgcagaagaccgtgaacgcttccagcatgcggttgagcgtctgaaactgaaacaaccggcgaacgccaccgttaccgctattgaaatggcggtagagaaggcgaaagagattggctacccgctggtggtacgtccgtcttacgttctcggcggtcgggcgatggaaatcgtctatgacgaagctgacctgcgtcgctacttccagacggcggtcagcgtgtctaacgatgcgccagtgttgctggatcacttccttgatgacgcggtagaagttgacgtggatgccatctgcgacggcgaaatggtgctgattggcggcatcatggagcacatcgagcaggcgggcgtgcactccggtgactccgcatgttctctgccagcctacaccttaagtcaggaaattcaggatgtgatgcgccagcaggtgcagaaactggccttcgaattgcaggtgcgcggtctgatgaacgtgcagtttgcggtgaaaaacaacgaagtctacctgattgaagttaacccgcgtgcggcgcgtaccgttccgttcgtctccaaagccaccggcgtaccgctggcaaaagtggcggcgcgtgtgatggctggcaaatcgctggctgagcagggcgtaaccaaagaagttatcccgccgtactactcggtgaaagaagtggtgctgccgttcaataaattcccgggtgttgacccgctgttagggccagaaatgcgctccaccggggaagtgatgggcgtgggccgcaccttcgctgaagcgtttgccaaagcgcagctgggcagcaactccaccatgaagaaacacggtcgtgcgctgctttccgtgcgcgaaggcgataaagaacgcgtggtggacctggcggcaaaactgctgaaacagggcttcgagctggatgcgacccacggcacggcgattgtgctgggcgaagcgggcattaatccgcgtctggtgaacaaggtgcatgaaggccgtccgcacattcaggaccgcatcaagaatggcgaatatacctacatcatcaacaccacttcaggccgtcgcgcgattgaagactcccgcgtgatccgtcgcagtgcgctgcaatataaagtgcattatgacaccaccctgaacggtggtttcgctaccgcgatggcgctgaatgccgacgcgaccgaaaaagtaatttcggtgcaggaaatgcacgcgcagatcaaataatagcgtgtcatggcggatatttttcatccgctaatttgatcgaataagtaatacggttctctgatgaggaccgttttttttgcccattaagtaaatcttttggggaatcgatatttttgatgacataagcaggatttagctcacacttatcgacggtgaagttgcatactatcgatatatccacaattttaatatggccttgtttaattgcttcaaaacgagtcatagccagacttttaatttgtgaaactggagttcgtatgtgtgaaggatatgttgaaaaaccactctacttgttaatcgccgaatggatgatggctgaaaatcggtgggtgatagcaagagagatctctattcatttcgatattgaacacagcaaggcggttaataccctgacttatattctgtcggaagtcgcagaaataagctgcgaagttaagatgatccctaataagctggaaggacggggatgccagtgccagcgactggtaaaagtggtcgatatcgatgagcaaatttacgcgcgcctgcgcaataacagccgggataaattagtcggcgtaagaaagacgccgcgtattcctgccgttccgctcacggaacttaaccgcgagcagaagtggcagatgatgttgtcaaagagtatgcgtcgttaattttatctcgttgataccgggcgtcctgcttgccagatgcgatgttgtagcatcttatccagcaaccaggtcgcatccggcaagatcaccgtttaggcgtcacatccgtcgtcccctgcaaacgggggcgattttcctccatttgcctcagtggctgtgtttcatgtaacgatgcatgacagcgcccgacaagatcctgatactctttggtattcaaccgtttccagtgtaactcgtcgtcactaacactgcgtacagcgcgggctggcgtacccatcaacaactggcgtttctcgccgtgaaagcctgctttgacaaagctcatggcggcaacaatgctctcttcgccaatgaccgcgccatccataatcacgctgttcatcccgaccaatgcatcgcgaccaatcacacaaccatgcaggatcgctccgtgcccgatatggccgttttccccaacgatggtgtcagtgtcgcagtagccatgcataatgcagccatcctgaatattggctcccgcttgcacgatcaaccgcccgtagtcaccacgcagtgaggcgagtgggccgatgtagacaccggctcccacaatcacatcgccaatcaagacggcactgggatggacaaacgccgtcgggtgaaccaccggaattaacccctcaaaggcgtaatagctcacggttgttaacgtcctttccacaccggatcgcgcttctcggcaaacgccagcggcccttcaatggcatcctccgaatgcagaaccgacggatagtgtttcaacacgccgctgcgaatatagcgatacgcttcttctaccggcatttcgctggtggtgcggaagatctctttcagcgccgcaatcgccagcggggcgctgttaaccagctgctgcgccagttcgcgggcgttatccatcagttccgcctggctaaccacgcggttgactatcccccaacgcagcgcctcttctgcgcccattcgtctgccggtcatcaccatttcattgacgatggcaggcggcaggatcttcggtagacgcagcacgccgccgctgtcaggaacgatgcccagcttggcttccggcagggcgaagctggcgttatcggcacaaacaataaaatctgccgccagcgccagttcgaaaccgccgccaaaggcatagccgttcacagctgcgataaccggtttgtcgagattgaaaatttcggttaatcccgcaaatccacccgggccaaagtcagcatccggtgcttcgccttctgctgccgcttttaaatcccagcccgcggaaaagaacttctctccggcaccggtaataatggcgacacgtaattgcggatcgtcacggaaatttagaaatacttcgcccatttcaaagctggtttttgcatcaatagcattcgcttttggacgatcaagggtaatttccagaattgatccattgcgggtcagatgtaatgattcactcattccttttctccatttttgctttttcagggacgacaacatccctgcaaaaaatgcatattgttttatagcgtgattattagctggcagggtagttccctgctgtttcatttatttcagattctttctaattattttccccgagcaattacgtggcagatcttttctgatctccagataagagggcactttaaatttcgccatattttgttcgcagaagcggaaaaattcctcttcgctcaatgtttcaccttcattcagcaccacaaatgctttgatggcttcatcgcgaatcgaatctttaatacccacaaccacgatatcctgaatttttggatgggtggcgatgatattttccagctccacgcaggagacattctcgccaccgcgtttgatcatattgcagcggcgatcgacgaaataaaaaaagccctcttcgtcgcagtatccggtatcgccggtatgtagccagccgtcggcttccagcactttcgcagtggctttcgggttgagaaaatactctttgaagatggttttccctggtacgcctttaatacagatttcaccgatctcacctgccgggagcgggcgattgtgatcgtcgcggatctccgcttcgtagcaaaaccccgcccgaccaatcgacggccagcgtcgtttatcgccagggcgatcgccgataatgcccacaatggtttccgtcatcccataagacgtcagcaagcgaacgccgaagcgttcacaaaacgcatctttttcctgctccgacaagttgagataaaacatcacttcccgcaggcggtgttgacgatcgttcgctgaaggcggctgcaccatcaacgtacggatcatcatcggaatacattcggtaatggtggcgcggtacttctgcacctgtccccagaaggcgcgggcgctgtatttctcgaccagcacaaaggtggccccggcagaaaacgccgccatcgccgcagtacactggcaatcgatatgaaacgcaggcattaccgtcaggtagacgtcatcgtcacgcagtgcacactgccaggcggagtaatatccagcgaagcgcaggttgtaatgggtaatcaccacacctttcggtcgggaggtggtgccggaggtgaagagaatttccgccgtatcgtcagtcgatagcggcggtgcatagcacaaggtggcaggttgttgatttttcagttgagtaaacgaactcacgccatcatcagcgggaagtgccacatctgtcaggcaaatgtgccgcaattgagtggcatcttcctgctgaatctgttgatacataggatagaattgcgcactggtcaccagcaggcacgcctggctattttgcaggatccacgcgctttcctcgcgtaacaggcgggcgttaatcggcaccataatcgcgccaatttttgccagcccgaaccagcaaaagataaattccgggcagttgtcgagatgtagtgcaaccttgtcgcctttgcgaatccccagcgtataaaacaggtttgccgtgcggttaatctcctgatttaactcaagataactataccggttaacgactccgccgctggattcacaaatcagcgccgttttatgaccgtaaacgtccgccagatcgtcccacatttgacgtagatgttgtccgccaatgatatccattgcacctctatccatttttgttcgtttgttattgggcgggcgctagtcaggcaagccgactgacgccacgcgtttagtcctcaactttggccagacctttgctgaccaactcctgaatgtcgttttcgctgtagccgatatttttcaaaatggcagccgtgtccatgccatgtgagggcattccgcgccagatttgtccggggttatttttgaatttcggcatgatgttcggccctttgcaggtgcgaccatccatcgtttgccactgagtgattgattcacgggcaacatactgtggattgctttccagttccggtacggtcagtactttggcacaggcgatattcagttcggcaaagcgttctttaacttctgcgatggtatgtgccgccagccaggcatcgagtttttcttctaccagtgggccgtaagggcattcgatacggtggataagctgagtgccttccgggatttccggcgtactgagtagatgtgcgaggccaatatctttaaagcactcttcaatttgggtaatgcccaccagttccatcacgatgtagccgtcggcacatttatacagaccgcaaccggcgtagtagggatctttacctttgctcatgcgcgggcacatttcgccgccgttgaagtaatccatcatgaagtactggcccatacgcagcatcacttcatacatggcgatgtcgatactttcgcctttaccggtttcacgcgctttatgcagtgctgccagcgccgccgtggtggcggtcaggccagaaaagtaatcggcggtatacgggaaggcaggcattggctggtcaacatcaccgttctgaatcaggtaaccactgaaggcctgggcgatggtgttataggccggaagattggtgtactcctcggtgccgtactgaccaaaaccggacaggtgagcgataaccagtttcgggttgtgctgccacagtacttcatcggtaatgccacgacgggcaaaggccggacctttgctggcttcgatgaagatatcggtggtttccattaatttcagaaacgcttcgcggccttcatctttgaaaatatttaacgacagcgcgtgcaaattgcggcgggagagctgcgggtagttcggttgaacgcgaatggtgtcggcccaggcgacgttctcgatccagataacttccgcaccccattctgcgaacatttgcccggcgaacggcccggcgatttcgataccggagaagacaacgcgcaatccggccaacggcccgaatttcggcatgggtagatgatccattattagctcctgaaaaatttatgtagcgcatgactgccggatgcggcgtaaacgctttatccggcctacattcgtgctcccgtagatactgttatggcctgcaagttttttcctggtccggtttcccggattgcaggcatgccagacacagcgccgtcaggcgctgtttttttcatcccttccgcgatttttacgccgctaccggatt

SEQ ID NO: 71 - DNA, 34212 bp, Escherichia coli
  source 1..34212: mol_type = genomic DNA
aagaacggcattgcataaccttgcagtggcgatcgagcattacaatgaaaaccatccgcatagtgcgttgggttatcgctctccgcgagaatatcgacgtcagcgggtaatgttaacttaagatacaacccctgtctggaaataagggggcaagaacattgtgataattttatcaagattatgatgaatgctgcagtatatctaacatgctgcagttaactcaatttgtattatcgctaatatttttaataacaaggatgtttattgcttttttatttgagagtgaacgtctaaccattgttgttcttagttctcatggagagattggagcttaaaatacgcaatgttttgaaatcagcgcaactatattccgtaattgttctttgtcgttcttgcgtggcacggtgatacacctctcatgtcggttgtttttttgaacgcagaaacataaaacaaaggcgaccgggatggtcgccagtggcataacactaaaattgagcgtattcagaataccaagtgtcggctggtggacaatggaatcagttcaatatttaggtggttcaacaagagcgtttatcattgctctcaaattatcgcgaacacttatccaagtctgttctgctcgttctaactcattagtgtacagctttaatgttttatctatgccatatgtggctattaaatttatagcttcttgtaacttttcgggattattccttcttgggggagtgaatataccgcggatttttccggtaattaaagctttacggtgtctacatagaatacctttacttcctgctggacaattacaagtcatgattagcgagccagaatcgtttgatacagtgactatgtatacatccaaactactgctacttgttgcgaagaattcgtatttcatgtgttagctccttgacttcaattattcttatccttttggttcaataccgcgccgtagcagctctttgcgccctaactctttaagccagttggcaaggcttaccccatcgttactggcttcgttatcaaactgctccttcaattcaggaactatgcgcatatggaacggtggggcctttcctgtgcctttttgttttttatcgcgcttaataaccgttgacatgtgtacacctatagcgttatgtttttattcgataggtgtacaccttaacatgtgtgcatttaaaaacgcaacgccccgcagtgcgggaacacatgcagggcgtctaaccaccaacgatagcaacagtatcgaggtagctatgagaaatcataccacacacccgcaagggcgggactcgcacaacctgaataaattcacttggcgctttatcgccctgagtgcggctaaaccgcgcatgcttaccatcgtggtcaccagcgagcaggaagaccgccagcaatccccaactggctgcgtgatgatattcgccgcccgtattcgtcaggaggtgtgccatgaatgatctttattttaaagtgctgacacatgctgaaaacgcgctcgtttgtggcaaaaatatgcgagaaatcttatcaacctggcttgatgggacaacaaatgcggaacacgatgaacgggatgctaatttagctggagcgttaattacgttacttgatcctgtcatcaaagagctggatgaagctataaaaatacacgaccagagctataccggagaataaaaaatgaaaaataaattttctggctttattgccagcggtcaaactcattcaaaaatcagccttggggatattttcaaagacagctatggctatcgggtaaagattatttcggttgatgatcgtcgtgtctcttatttgcgtgatggttatgattttgaatgtgttatgccgcgtcagcagttcgaaagagatttcattctggtaaaaaattgcaagacagataatcagaggcgtgccgcaggctatatccgtaaaattcgggcaatgttagttgccggaggtaacaaatgaaacgtgctccgaacttaaaataccaaccgcgcgacaaaatgacggaagtcatcatttttgctggcagtgatgcctggagccatgcaaaagaatggaatgaatgggcaggtaagcatattgcagcagatgatacaccaccagtcattctgggtacggaacaactggaaaacctggatgatatgcaaattatcgatgaaggccgtcattatgtgcgtgtttatcgtgccggaaagattgcagagaaaagtctgacgaaggttgcgacattacttgctattgcaggcgtaaaggaagcacgttgttaccgtagctttgttgatcgagagcctgaagactggactccgcgccttgtcggcctaaaagctgaagcggagcatggggaaagtctggtgattgaactgccagtgaagaaggcagagcgcaaaaatgacgagcgtgcttcatctttggcgttgaatcagatgggggccagccagcgcggtgaagttctccttgcacattacggcggcgaactggcaatcaatgccgactctgacaccgttcatcattacaacggcgttgtatgggagccggttcaggataaagagttacagcgtgctatggcgcagattttcattgatgcggagatcagctattcgcagaacgctattaaatcggcggtagataccatgaagttaagtttgcctgtaatggggaatacagcccgtaacctgattggattcagtaacggggtatttgataccagaactggtaattttcgggagcataacaaaaacgactggttgttaattgccagtgaattacctttcagcccaccagcagagggggaaacgctggcaacacatgcgccgaatttctggaagtggttgcgccgttcggtggctgagaatgaccgcaaggcagatcgcgtactggcggcattattcatggtgctggcgaaccggtacgactggcagttattcattgaggtaacagggccggggggaagtggtaaaagtgtgatggcggagatttgcaccatgctggcgggtaaggctaatacagtatcagcaagcatgaaggcgctggaagatgcaagggaacgtgcgttagtggttggcttttcgctgattatcatgccggatatgacccgctacgctggtgatggggcagggattaaggccattacaggcggtgacaaggtggcaattgacccgaaacacaaagccccctattcaacgcgtattccggcagtagtgctggcggttaacaataacgccatgtcattcagtgaccgcagcggggggatctcacgtcgtcgggtgatattcaatttttcggaagttgtaccggagaacgaacgcgattcgatgctggcggaaaaaatagaaggtgagctggcggtagtgattcgccatctgcttacacggtttgctgatcaggacgaagccagacgcctgttatatgagcagcagaaatctgaagaagcactggcgataaagcgagagggggattcgctggtggacttctgcggctatctcatggcatcggtaatgtgtgatggcctgttagtgggtaatgctgaaattgtgccattcagcccacgcaggtatctctatcatgcctatctggcttatatgagggcacatgggtttggtaaacctgtaacactgacgcgcttcggtaaagatatgccgggggcaatggcggaatatggcagggagtatatgaaacggaaaacgaagcacggtttgcgttcaaacgtgacactgacggaggaatcagaagactggatgccatcatgtgtatcggtcactaatgacgatagcaaaaattaaacttatggaataactgttcaccactgttcaccctgtcataaatatcttttatatcagtatattatagggtgaacagttatttatgaactgttcaccaaactattcactgttcacctttttgattgtttattgagcttcaagggtgaacagtggtgaacagttggtgaatagtttttgtgaaactgttcacccattaacattatgaattaaaagagaaaatatcaaaaggtgaacaggtgaagggttaaaacgcaaaaattttaatttactgctgtgagataaagcctatgacagcgaagcacacaaaaaaatcacaatcgcacgcccttgatttgacggaacactggttaagggtgtcgataaaaatcatcgaccgcaacgccggggaaggatacgcgaaagcacatcccgaactgattagcgcattcatgacaacggcggctgcaaactttgccactctgaccgaacgggagattgctgaagcggaggaagtgacaacaatcaatattaagtccggagagcaggcagcatgacggcgcaaatatcagtttacgggcggttggtggacgacccgcagacaaaacagaccagcaagggcacccccatgacgctggcgcgtatggcggtatcactgccctgcagtcagtcggatgacggtcaggcgacgatgtggttatctgtcctggcgtttggcagacaagccgacgcgctggcaaagcatcacaaaggcgaactcctgagcgtggcgggtaatatgcaggtgagccagtggactggacagaacggtgaaacgcggcagggctggcaggttatcgcagacagcgtaatcagtgcgcgaacggtgcgaccgggcggcaaaaaaggtcaacagggtcaggctactgacgcactgaacagagcaaaacaacaggcagatcagcaaggaagccatccaccagtgggagataatgaacaatggggagatgatattccgttttaaatattgccaataaaaaaggccggaaaaaaataaattttccggcatgctacataaatcccgaccaaagggagtgaagatattaacactaattatccgcgctgaagttgttatcccaaaactttatacaacattgcactcggttgcatgtattcgcatgacaaatatcggtgatagcatatatccacaattatttttaatgaatgcaaagaggatgcgtatggttgatttatattcgcctacccagcttgtacaggtggttaatgctgtagatgtacaaaaacaactaaatgcgttgtttaccagtttgttttttactcgctcggtaatgtttgaatcgcgcgatattattcttgatacaatcgacgatccaaatatcccaattgcagcgttttgttctcctatggtgggtagtaaagtttcacgtgacgaagggtacgaatcaaaaacaattcgtccaggctatatgaagccgaaaagcagcattgatccaaataagttagctgtgcgccctgctggtgtatcacctgagcaatacaatgcttttggagcgcgtaatattaaagttaaacaggcgattgtaaatcaggctaaagctattcgtgcacgtattgaatggcttgccgttcaggcaatcacaacggggaaaaatatcattgagggcgatggtattgaacgttatgagctggactggaatattaaaccacaaaatatcatcactcagtctggcggtgctgagtggtcaggtaaggataaagaaacttttgatccaaatgatgatattgagagctacgcagaatttagtgagggcgtcactaatatcatcattatgggcggtaatgtatggaagaaataccgttcattcagagcgataaaagaggctctggatacccgtcgtggttctaattccgaactggaaacggctcttaaagaccttggtgattcggtgagttttaaagggtatatgggcgatgttgcgattgttgtatacagcgggcgttataccgacgaggacggaactgaaaaacatttccttgatcctgatttgatggtgcttggcaatacggctcttcaggggattgtcgcctatggcggtattcaggatccggagctaatccgaatggggctgactaaagccgaacttgcaccgaaaaactatattgtgcctggtgatccggctattgaatatgtgcagacacattcagcaccacagccaataccggcccgcatcaatcgttttgttaccgttcgcattggctaagggggagcaatggctactcattacactgaactcatggctggcactgaagcactggtgactacgctggggatattttcagctaataaaggggtaattcctgcatttacgccactgatgcaggaagatgcaacaggtgcactggtggtatgggatggttcgagcgtaggtaaagcggtttatgtttccgctgtacaaatcgacaccgcgaaaaaaacacaggctcaggtctataagacaggtgtcttaaatgttgatgctctgaactggcctgagtctgtaaaagaactgtcagtaaagattgcagcgtttgttggctcaggtatttctgttcagccgctggctcgtgtgtaaagggggatacaatgcagaatgattacaatgaccttaagccaattgccgaaatgatgtacccgaatccagctgtagaggaattaaaagctatcgctgacaaaatgtgtttaagcgagcgccttgttgatatgaatcaggtgatggaaattacaaccctgagtcggcgtacactgctaaaccttgaggctagtggagagttcccggagcgtgtgcaggttacggaagggcgtaaggcctggtatttaagtgaagtgatcgactggataaataatattcctcgcgcttctgaatattgccgcgtacctgtcccaaaaaagccagatgcggcgctatgcctcaagattgagcgtgtacgccgcaatgcacgggatggtcgctataagctgattggttgatgaaattagggcccgctctggctggcgggtcctttccggcgatctgacaggctacggggcgtcaggcgcgcagtttttctctatttatggaaattttccggtttaaggcatttccgttcttcttcgccgtaactttatgtttttatttaaaataccccctgaaaagaaaggaaatgacaggcgctgaaaacgggcattttggcctctgtcgtttcctttctctgtttttgtccgtggaatgaacaatggaagtcaacaaagatcagctggctgacattttgggcaagagttgtgcaatacttttgtcagacgtaaatatttttgaggaacattattatatttatgtaattagagatatgtttgataggactagaaataaagcagacgccttagttatgtcaattgctgaaataataaaggaaaatagcaatgataaatagaaaaaagcggtcacgcgaccgcttttattatttgcaagttatttttttggctggagataaactattactgttcaccaatttgctctctaaactgtgtactgaacgtatctagttgagagacaaatgaatgtgcatttaaaaatttattataaatctcttcagctgtgctttctaatacaaaagtagcataattattatgtgctaatttatttcttagctctccgatttccataaaatcagagatagacttggtcaactctgtgcttgattttaccttctcaatcataaactctttaaattttgggccaaaaaaggaaaaaaactggtttgcattcctttttttccaatcaaagagtgtatgatactgcctggttagggccttattatcgataaaatcgtgcgtaagattacattggcttgggttaagcatacaatgtatcttagttacaactaaagtttcaaaatagctagcacatgctaatagcattacttttgaaaattgtgatttgtaatcattagcaaaactaatctcattatgagttagaagaaaatcataataacacttatagttattaaacatactttcaatagaagtatatcccatatcctccattattttacattccctccaaaattgttcttgcacgttctagacgtccaattacatgctctcttcttgttgttttatcagtactaaatgtcagaaattcaggatcatttttaagcttatcgatgtaattcaccgtcacttgtcttatttttagatctttatctttaaatgagtcataagttgcagcataaaaaattgactcaaataaagttatactcatacgattcccaccagttctgaaattgatttcatcaattccatcaacactatccataaattcattccatatattactaaataaagttatgtctttagtgtcgtagttttttgcataatttgagaaattgttcaaaaaaccgctaactgagcttttgtattgagatgtaaaaagggacatagcaaatgtgcgcaatatcgcttcaatatcactcaatcgcatgtcaacaacattttttgaaagaatttttctccatgtcttgttttcattcaatgaaacaagatttgaaagaaagtctgagtgatataaactcatacgaatttcttgaggagaaaggttcattcccccactatttaggcggttaaatatttcaaacattgcaccatcttccgaatcttgtgcaaccggtttgattaccatatttcgtatggttgccagatttaaagtggtttgaaattcgtttaatgtttcatagtttttcccattaaacttgtttttttgggtgtctgatagaccatcaagttttaggttgaactttgtgaagtattcatcattgtgaagaatgttttctggaatgtttccattatcttcaaagatttttctcagttcagaacgtttctcttttctagggaatacaccatttacaaagtaataaagggtcattaatctctgctgaccatctatcactaaaaattcatttttatcttgttcatataaaaatatttgaggtataggaaggcctattaaaagagattcaatgagttttgatgctcgtttgatatcccaaacataatgcctttgaaagttagggattttaaaaacttttgatttaataaaacttataattgtgattatattaaaatcattgggcgtagtagtaagttgaaactcatcaattggataggattctggctcatcctcgtattgcttttcttcataatcttctggttgcatcgtgtcatcctttttcttcgtgaatatggtttttagacaagtcctcactacacatatctgtattgcagaaagtattgcagtgataggagttgcgtagatatataaaccacaaagctaagtgaaatcaaatagttctttcgggattgactcatgtagccgaagcatgaggtgaatccgcagatgaccctgcgtcgcctgccggatgaagatccgcagaatctggcggacccggcttaccgccgccgtcgcatcatcatgcagaacatgcgagacgaagagctggccattgctcaggtcgaagagatgcaggcagtttctgctgtgcttaagggcaaatacaccatgaccggtgaagccttcgatccggttgaggtggatatgggccgcagtgcggcgaacaacatcacgcagtccggtggtacggagtggagcaagcgtgacaagtccacgtatgacccgaccgacgatatcgaagcctatgcgctgaacgccagcggagtggtgaatatcatcgtgtttgatccgaaaggctgggcgctgttccgttccttcaaagccgtcaaggagaagctggatacccgtcgcggctctaattccgagctggagacagcggtaaaagacctgggcgaagcggtgtcctataagggaatgtatggcgatacggcgatcgtcgtgtattccggacagtacgtagaaaacgacgtcaaaaagaacttcctgccggacaacacgatggtgctggggaacactcaggcacgcggtctgcgcacctatggctgcattcaggatgcggacgcacagcgcgaaggtattaacgcctctgcccgctacccgaaaaactgggtgaccaccggcgatccggcgcgtgagttcaccatgattcagtcagcaccgctgatgctgctggctgaccctgatgcgttcgtgtccgtacaactggcgtaatcatggcccttcggggccattttctctctgtggaggagtccatgacgaaagatgaactgattgcccgtcttcaggtgctgggtgagcaactgaaccgtgatgtcagcctgatggggacgaaagaagaactggtgctccgtgtggcagagctggaagaggagcttgatgacacggatgacgctgccggtcaggacacatctgtcagcccggaaaatgcgctgaccggacatgaaaatgaggttgtatcagcgcagccggataccgtgactgatacggctgatctggtcacggttgtggcactggtgacgctgcatactgatgcacttcacgccacgcgggatgaggctgtggcatttgtgctgccgggaacggcgttccgtgtctctgccggtgtgtcagctgaaatgacagagcgcggcctggccagaatgcaataacgggaggcgctgtggctgatttcgataacctgttcgatgctgccattgcccgcgccgatgaaacgatacgcgggtacatgggaacgtcagccaccatgacatccggtgagcagtccggtgctgtgatacgtggtgtttttgatgaccctgaaaatatcagctatgccggacagggcgtgcgcgttgaaggctccagcccgtccctgtttgtccggactgatgatgtgcggcagctgcggcgcggcgacacgctgaccatcggtgaggaaaacttctggatagaccggatttcgccggatgatggcggaagctgtcatctctggcttgggcggggcgtaccgcctgccgttaaccgtcgccgctgaaagggggatgtatggccataaaaggtcttgagcaggccgttgaaaacctcagccgtatcagcagaacggcggtgcccggtgccgccgcaatggccattaaccgcgttgcttcatccgcgatatcgcagtcggcgtcacaggttgcccgtgagacaaaggtacgccggaaactggtaaaggaaagggccaggctgaaaagggccacggtcaaaaatccgcaggccagaatcaaagttaaccggggggatttgcccgtaataaagctgggtaacgcgcggattgtcctgtcccgacgcaggcgtcgtaaaaaggggcagcgttcagtcctgaaaggtggcggcagcgtgcttgtggtgggaaaccgtcgtattcccggcgcgtttattcagcaactgaaaaatggccggtggcatgtcatgcagcgtgtggccgggaaaaaccgttaccccattgatgtggtgaaaatcccgatggcggtgccgctgaccacggcgtttaaacaaaatattgagcggatacggcgtgaacgtcttccgaaagagctgggctatgcgctgcagcatcaactgaggatggtaataaagcgatgaaacatactgaactccgtgcagccgtactggatgcactggagaagcatgacaccggggcgacgttttttgatggtcgccccgctgtttttgatgaggcggattttccggcagttgccgtttatctcaccggcgctgaatacacgggcgaagagctggacagcgatacctggcaggcggagctgcatatcgaagttttcctgcctgctcaggtgccggattcagagctggatgcgtggatggagtcccggatttatccggtgatgagcgatatcccggcactgtcagatttgatcaccagtatggtggccagcggctatgactaccggcgcgacgatgatgcgggcctgtggagttcagccgatctgacttatgtcattacctatgaaatgtgaggacgctatgcctgtaccaaatcctacaatgccggtgaaaggtgccgggaccaccctgtgggtttataaggggagcggtgacccttatgcgaatccgctttcagacgttgactggtcgcgtctggcaaaagttaaagacctgacgcccggcgaactgaccgctgagtcctatgacgacagctatctcgatgatgaagatgcagactggactgcgaccgggcaggggcagaaatccgccggagataccagcttcacgctggcgtggatgcccggagagcaggggcagcaggcgctgctggcgtggtttaatgaaggtgatacccgtgcctataaaatccgcttcccgaacggcacggtcgatgtgttccgtggctgggtcagcagtatcggtaaagcggtgacggcgaaggaagtgatcacccgcacggtgaaagtcaccaacgtgggacgtccgtcaatggcagaagatcgcagcacggtaacagcggcaaccggcatgaccgtgacgcctgccagcacttcggtggtgaaagggcagagcaccacgctgaccgtggcattccagccggaaggcgcaaccgacaagagcttccgtgcggtgtctgcggataaaacaaaagccaccgtgtcggtcagtggtatgaccatcaccgtgaaaggtgttgctgcaggcaaggtcaacattccggtcgtatctggtaatggtgagtttgctgcggttgcagaaatcaacgtcaccgccagttaatccggagagtcagcgatgttcctgaaaaccgaatcatttgaacataacggtgtgaccgtcacgctttctgaactgtcagccctgcagcgtattgagcatctcgacctgatgaaacggcaggcagaacaggcggagtcagacagcaaccggaagtttactgtggaagacgccatcagaaccggcgcgtttctggtggcgatgtccctgtggcataaccatccgaagaagacaaagctgccttccatgaatgaagccgttaaacagattgagcaggaagtgcttaccacctggcccacagaggcaatttctcatgctgaaaacgtggtgtaccggctgtccggtatgtatgagtttgtggtgaatgatgctcctgaacaggcagaggacgccgggtctgcagagcctgtttctgcgggaaagtgttcgacggtgagctgagttttgccctgaaactggcgcgtgagatggggcgacccgactggcgcgccatgcttgccgggatgtcatccacggagtatgccgactggcaccgcttttacagtacccattattttcatgatgttctgctggatatgcacttttccgggctgacgtacaccgtgctcagcctgtttttcagcgatccggagatgcatccgctggatttcagtctgctgaaccggcgcgaggctgacgaagagcctgaagatgatgtgctgatgcagaaagcggcagggcttgccggaggcgttcgttttggcccggacgggaatgaagttatccccgcttccccggatgtggcggacatgacggaggatgacgtaatgctgatgacagtatcagaagggatcgcaggaggagtccggtatggctgaaccggtaggcgatctggtcgttgatttaagtctggatgcggccagatttgacgagcagatggccagagtcaggcgtcatttttccggtacggaaactgatgcgaaaaaaacagcggcagtcgttgaacagtcgatgagccggcaggcgctggctgcacagaaagcggggatttccgtcgggcagtataaagccgccatgcgtatgctgcctgcacagttcactgacgtggccacgcagcttgcaggcgggcaaagtccgtggctgatcctgctgcaacagggtggtcaggtgaaggactccttcggcgggatgatccccatgttcagggggcttgccggtgcgatcaccctgccgatggtcggggccacctcgctggcggtggcgaccggtgcgctggcgtatgcctggtatcagggcaactcaaccctgtccgatttcaacaaaacgctggtcctttccggcaatcagtcgggtctgacggcagatcgtatgctggtcctgtccagagccgggcaggcggcagggctgacgtttaaccagaccagcgagtcactcagcgcactggttaaggcgggagtaagcggtgaggctcagattgcatccatcagccagagtgtggcgcgtttctcctctgcatccggcgtggaggtggacaaggtcgctgaagccttcgggaagctgaccacagacccgacgtcagggctgacagcgatggcacgccagttccataacgtgacggcggagcagattgcgtatgttgctcagttgcagcattccggcgatgaagccggggcattgcaggctgcgaacgaggccgcgacgaaagggtttgatgaccagacccgccgcctgaaagagaacatgggtacgctggagacctgggcagacaggacagcgcgggcattcaaatccatgtgggatgcggtgctggatactggtcgtcctgataccgcgcaggagatgctgattaaggcagaggctgcgtttaagaaagcggacgacatctggagtctgcgcaaggatgattatttcgttaacgatgaagcgcaggcgcgttactgggatgatcgtgaaaaggcccgtcttgcgcttgaagccgcgagaaagaaggctgaacagcagagtcaacaggacaaaaatgcgcagcagcagagcgatactgaagcgtcacggctgaaatataccgaagaggcgcagaaagcttacgaacggctgcagacgccgctggagaaatataccgcccgtcaggaagaactgaacaaggcactgaaggacgggaaaattctgcaggcagattacaacacgctgatggcggcggcgaaaaaggactatgaagcgacgctgaaaaagccgaaacagtccggcgtgaaggtgtctgcgggcgatcgtcaggaagacagtgctcatgctgccctgctgacgcttcaggctgaactccggacgctggagaagcatgccggagcaaatgagaaaatcagccagcagcgccgggatttgtggaaggctgaaagtcagttcgcggtactggaggaggcggcacaacgtcgccagctgtctgcacaggagaaatccctgctggcgcataaagatgagacgctggagtacaaacgccagctggctgcacttggcgacaaggttacgtatcaggagcgcctgaacgcgctggcgcagcaggcggataaattcgcacagcagcaacgggcaaaacgggccgccattgatgcgaaaaaccgggggctgactgaccggcaggcagcgcgggaagccacagaacagcgcctgaaggaacagtatggcgataattctctggcgctgaataacgtcatgtcagagcagaaaaagacctgggcggctgaagaccagcttcgcgggagctggatggcaggcctgaagtccggctggagtgagtgggaagagagcgccacggacagtatgtcgcaggttaaaagtgcagccacgcagacctttgatggtattgcgcagaatatggcggcgatgctgaccggcagtgagcagaactggcgcagcttcacccgttccgtgctgtccatgatgacagaaattctgcttaagcaggcaatggtggggattgtcgggagtatcggcagcgccattggcggggctgttggtggcggcgcatccgcgtcaggcggtacagccattcaggccgctgcggcgaaattccattttgcaaccggaggatttacgggaaccggcggcaaatatgagccagcggggattgttcaccgtggtgaatttgtcttcacgaaggaggcaaccagccggattggcgtggggaatctctaccggctgatgcgcggctatgccaccggtggttatgtcggtacaccgggcagtctggctgacagccggtcgcaggcgtccgggacgtttgagcagaataaccatgtggtgattaacaacgacggcacgaacgggcagataggtccggctgctctgaaggcggtgtatgacatggcccgcaagggtgcccgtgatgaaattcagacacagatgcgtgatggtggcctgttctccggaggtggacgatgaaaaccttccgctggaaagtgaaacccggtatggatgtggcttcggccccttctgtaaggaaggtgcgctttggtgatggctattcccagcgagcgcctgccgggctgaatgccaacctgaaaacgtacagcgtgacgctttctgtcccccgtgaggaggccacggtactggagtcgtttctggcagagcacggaggctggaaagcctttctgtggacaccgccttatgactggcggcagataaaggtgacctgcgcaaaatggacgtcgcgggtcagtatgctgcgtgttgagttcagcgcagagtttgaacaggtggtgaactgatgcaggatatccggcaggaaacactgaatgaatgcacccgtgcggagcagtcggccagcgtggtgctctgggaaatcgacctgacagaggtcggtggagaacgttattttttctgtaatgagcagaacgaaaaaggtgagccggtcacctggcaggggaggcagtatcaggcgtatcccattcaggggagcggttttgaactgaatggcaaaggcaccagtacgcggcccacgctggcagtctctaacctgtacggcatggtcaccggtatggtggaagatatgcagagtctggtcggcggaacggtggtccggcgtaaggtttacgcccgttttctggatgcggtgaacttcgtcaacggaaacagtggcgccgatccggagcaggaggtgatcagccgctggcgcattgagcagtgcagcgaactgagcgcggtgagtgcctcctttgtactgtccacgccgacggaaacagatggcgctgtttttccgggacgtatcatgctggccaacacctgcacctggacctatcgcggcgatgagtgcggttatcacggtccggcggtcgcggatgaatatgaccagccaacgtccgatatcacgaaggataaatgcagcaaatgcctgagtggctgtaagtttcgcaataacgtcggcaactttggcggcttcctttccattaacaaactttcgcagtaaatcccatgacacagacagaatcagcgattctggcgcacgcccgacgatgtgcgccagcggagtcgtgcggcttcgtggtgagagcgccggagggggaaagatattttcccggcgtgaatatttccggtgagccggaggattatttccggatggctccggaggactggctgcaggcagaaatgcagggtgagattgtggcgctggtccacagccaccccggtggtctgccctggctgagtgaggctgaccggcggctgcaggtgcagagtgatttgccgtggtggctggtctgccggggggcgattcataagttccgctgtgtgccgcatctcaccgggcggcgctttgagcacggggtgacggactgttacacgctgttccgggatgcttatcatctggcggggattgagatgccggattttcatcgcggggatgactggtggcgtcacggtcagaatctctatctggataatctggaggccacagggctgtatcaggtgccgttgtcagcggcgcagccgggcgatgtgctgctgtgctgttttggttcatcggtgccgaatcatgccgccatttactgtggtgacggtgagctgctgcaccatattcctgaacaactgagtaaacgagagaggtacaccgacaaatggcagcgacgcacacactccctctggcgtcaccgggaatggcacgcatctgcctttacggggatttgcaacgatttggccgccgcatcgaccttcgtgtgaaaacgggggctgaagccatccgcgcactggccacacagctcccggcgtttcgtcagaaactgagcgacggctggtatcaggtacggattgccgggcaggatgtcagcacgtccggattaacggcgcagttacatgagactctgcctgatggcgctgtgattcatattgttcccagagtcgccggggccaagtctggtggtgtattccagattgtcctgggagcagccgccattgccggatcattctttaccgccggagccatccttgcagcatggggggcagccattggggccggaggtatgaccggcatcctgttttctctcggtgccagtatggtgctcggtggtgtggcgcagatgctggcaccgaaagccagaactccccgtacacagacaacggataacggcaaacagaacacctatttctcctcactggataacatggttgcccagggcaatgttctgcctgttctgtacggtgaaatgcgcgtggggtcacgcgtggtttctcaggagatcagcacggcagacgaaggggatggtggtcaggttgtggtgattggtcgctgatgaaaaacgtttatgtgaaaccgcctccgggcggttttgtcgtttatggagcgtgaggaatgggtaaaggcagcagtaaggggcatactccgcgcgaagcgaaggacaacctgaagtccacgcagttgctgagtgtgatcgatgccatcagcgaagggccgattgaaggtccggtggatggattaaaaagcgtgctgctgaacagtacgccagtgctggacagtgaggggaataccaacatctccggcgtcacggtggtgttccgggccggtgagcaggagcagacaccgccggagggatttgaatcctccggctccgagacggtgctgggtacggaagtgaaatacgacacgccgatcacccggaccatcacgtctgcaaacatcgaccgtctgcgctttaccttcggtgtgcaggcactggtggaaaccacctcaaagggggaccggaatccatcggaagtccgcctgctggttcagatacaacgtaacggtggctgggtgacggaaaaagacatcaccattaagggcaaaaccacctcgcagtatctggcttcggtggtggtgggtaacctgccgccgcgcccgtttaatatccggatgcgcaggatgacgccggacagcaccacagaccagctgcagaacaaaacgctctggtcgtcatacaccgaaatcatcgatgtgaaacagtgctacccgaacacggcactggtcggcgtgcaggtggactcggagcagttcggcagccagcaggtgagccgtaattatcatcttcgcggacgcattctgcaggtgccgtcgaactataacccgcagacgcggcaatacagcggtatctgggacggaacgtttaagccagcatacagcaacaacatggcctggtgtctgtgggatatgctgacccatccgcgctacggcatggggaaacgtcttggtgcggcggatgtggacaaatgggcgctgtatgtcatcggccagcattgcgagcagtcggtgccggacggttttggcggcacggagccgcgcatcacctgtaatgcgtacctgaccacacagcgtaaggcgtgggatgtgctcagtgatttctgctcggcgatgcgctgtatgccggtatggaacgggcagacgctgacgttcgtgcaggaccgaccgtcggataaggtgtggacctataaccgcagtaatgtggtgatgccggatgatggcgcgccgttccgctacagcttcagcgccctgaaggaccgccataatgccgttgaggtgaactggattgacccgaataacggctgggagacggcgacagagcttgtggaggacacgcaggccattgcccgttacggtcgtaacgtcacgaagatggatgcttttggctgtaccagccgggggcaggcacaccgcgccgggctgtggctgattaaaacggaactgctggagacgcagaccgtggatttcagcgtgggcgcagaagggcttcgccatgtaccgggcgatgtcattgaaatctgcgatgatgactatgccggtatcagcaccggtggtcgcgtgctggcggtgaacagccagacccggacgctgacgctcgaccgtgaaatcacgctgccatcctccggtaccacgctgataagcctggttgacggaagtggtaatccggtcagcgtggaggttcagtccgtcaccgacggacttaaggtgaaagtgaaccgggttcctgacggcgttgcagaatacagtgtgtgggggctgaagttgccgacgttgcgtcagcgcctgttccgctgtgtgagtatccgtgagaacgatgacggcacgtatgccatcactgccgtgcagcatgtaccggaaaaagaagccatcgtggataacggggcgcactttgacggcgaccagagcggcacggtgaatggtgtcacgccgccagcggtgcagcacctgactgccgaagtcaccgcagacagcggggaatatcaggtgccggcgcgctgggacacgccgaaggtggtgaagggggtgagctttatgcttcgcctgaccgtggcagcggatgacggcagtgagcggctggtcagcacggcccggacgacggaaaccacataccgcttcacgcaactggcgctgggacggtacacgctgacagtccgggcggtaaatgcgtggggacagcagggcgatccggcgtcggtatcgttccggattgccgcaccggtagcaccgtcgcggattgagctgacgccgggctattttcagataactgccacgccgcatcttgcggtttatgacccgacagtacagtttgagttctggttctcggaaaaacggattgctggtatcaggcaggttgaaaccacagcgcgctatcttggcacggcgctgtactggatagccgccagtatcaatatcaggccgggccatgattattatttttacgttcgcagtgtgaacaccgttggcaaatcggcattcgtggaggctgttggtcagccgagtgatgatgcatccggctatctggattttttcaaaggcgagatagggaaaacccatctggctcaggagctgtggacgcagattgataacggtcagcttgcgcctgacctggctgaaatcagaacgtccattacggatgtcagcaatgaaatcacgcagaccgtcaataagaaactggaagaccagagtgcggcaattcagcagatacagaaggttcaggttgatacaaataataacctgaacagcatgtgggctgtgaagctgcagcagatgcaggacggacgcctttatatcgcgggtattggtgccggtattgagaacacccctgacggcatgcagagtcaggtgctgctggcggcggacaggattgcgatggttaatcctgcgaatggcaacacaaaaccgatgtttgttggtcagggcgatcagatattcatgaacgacgtgttcctgaaacgcctgacggcccccaccattaccagcggtggaaatccaccggcattttccctgacaccggacggaaagctgactgctaaaaatgcggatatcagtggcagtgtgaatgcgaactccgggacgctcaacaacgtcacgattaatgagaactgtcagattaaggggaaactgtcagccaatcagattgaaggcgatattgtcaaaacggtcagcaagtctttcccccgcacgaacagttatgccagtggcaccatcacggtaagaatcagtgatgatcagaagtttgaccggcaggtcatgatacctccagtgttattccgcggtggtaagcatgagaatttcaacagtaataaccaacagtcatactggtattcaacctgccggttaagagtgacccgcaatggtcaggagatttttaatcagtccacgacggatgctcagggcgtattttcctcagttatagatatgcctgccggacaggggacactgacactgacattcaccgtatcttcatcaggagcgaataactggacaccaacaaccagtatcagcgatctgctggttgtggtgatgaaaaaatccacagcaggtatcagtatcagctgaattttataacccataacgggcgtcagaaatgacgccttttttattgcagaaaagcgagaggtaattatgcgtaaactttatgccgccattttgtccgcagccatttgtctggccgtatccggtgcgtctgcatgggcgtctgaacatcagtccacgctgagcgcggggtatcttcatgcctcgacgaacgttcccggcagcgatgatctgaacgggattaacgtgaaataccgttatgagtttacggacacactggggatggtgacgtcattcagctatgcaggagacaagaatcgccagctgacccattacagcgatacccgctggcatgaagattccgttcgtaaccgctggttcagcgtaatggcggggccgtctgtgcgcgtgaatgaatggttcagcgtgtatgcgatggcgggtgtggcttacagccgtgtgtcgactttcttcggggattatctccgcgtaactgacaacaaggggaaaacgcacgatgtgctgaccggaagtgatgacggtcgccacagcaacacgtctctggcgtggggggctggcgtgcagtttaacccgaccgaatccgtggccattgatattgcttatgaaggctccggcagtggtgactggcgcactgacggtttcatcgtgggtgtcggttataagttctgattagccaggtaacacagtgttatgacagcccgccggttcaggcgggcttttttgtggggtgaatatggcagtaaagatttcaggtgtactgaaagacggcacaggaaaaccggtacagaactgcacaatccagctgaaagcaaaacgtaacagcaccacggtggtggtgaacacgctggcctcagaaaatccggatgaagccgggcgttacagcatggacgttgagtacggtcagtacagcgttattctgttggtggaaggattcccgccgtcacatgccgggaccatcaccgtgtatgaagattctcaacccggtacgctgaatgattttctcggtgccatgacggaggatgatgcccgtccggaggcactgcgtcgttttgaactgatggtggaagaggtggcgcgtaacgcgtccgtggtggcacagaacacggcagccgcaaagaagtcagccagtgatgccagcacatctgccagtgaggcggcaacccgtgcgactgatgctgcagattcagcacgtgcagccagcacgtcagccggacaggccgcgtcgtcggctcagtcagcgtcttccagcgcaggaacggcatcaacaaaggccactgaagcctcaaaaagtgctgccgctgcagagtcctcaaaaagcgcggcggccaccagtgccggtgcggcgaaaacgtcagaaacgaatgcttcagcgtcacaacaatcagccgccacttctgcatccaccgcgaccacgaaagcgtcagaagctgccacctcagcccgggatgcgtcggcttcaaaagaggcggcaaaatcatcagaaacgagcgcagcctcgagcgccagtagtgcagcctcctcggcaacagcggcaggcaattccgcgaaggcggcaaaaacgtccgagacgaacgctaagtcttctgagacggcagcagcacagagtgcctccgcagcagcagactcaaaaacagcggctgcctcatctgccagcgccgcgtcaacaaatgccgggcaggcctcagccagtgccaccgctgccggaaagtcggcagaaagcgccgcatcatccgcttcaacagccacaacgaaggctggcgaagccactgaacaggccacggcagcagcgagttctgcttccgcagcgaagacatccgaaacgaacgcgaaagcgtcggaaaccagcgcagaatcctcaaaaacggctgccgcatcgtcagccagttcggcggcgtcatcggcatcatcggcatctgcttcaaaagatgaggcgaccagacaggcgtcagcagcgagtggcagcgccacgacggcatccacgaaggcgacagaggctgctggcagtgcggcagcggcagcacagagcaaaagtacggcagaatccgcagcaacgcgcgccgagacagcagcaaaacgggcagaggatattgcatccgctgtggcgcttgaggatgcgagcacgacgaaaaagggggtagtacagcttagcagtgcgaccaacagcacttccgagtcacaggcggcaacgccaaaagccgttaaggccgcgtatgacctggctaacgggaaatacaccgcacaggacgctacgacagcacaaaaaggaattgtccagctcagtagtgcaaccaacagcgcatctgaaacgcttgccgcgacaccgaaagcagtgaaagcagctaatgataatgcgaatggtcgggtaccttctgcccgtaaggtgaatggtaaggcgctttcagcggatataacactgacgccgaaagatattggtacgcttaactcaacaacaatgtcattcagcggtggtgctggttggttcaaattagcaacggtaaccatgccacaggcgagttctgttgtttcaattacgttgattggtggcgctggatttaacgtggggtcacctcaacaggcaggtatatctgaacttgttttgcgtgcaggtaatggtaatccgaaggggattactggtgctttatggcagcgcacatcgacagggtttacaaattttgcctgggtcaatacatctggtgatacttacgatatttacgttgcaatcggaaattatgcgactggtgtaaatattcaatgggattataccagtaatgccagcgtgacgattcatacgtcaccagcatattctgctaataagccggaagggttaacggacggtacagtttattcactctatacgccatcagagcagttttatccgcctggcgcaccaatcccgtggccatcagataccgttccgtctggttatgccctgatgcaggggcagacttttgacaaatccgcttacccgaaacttgcaaccgcttatccgtcaggcgtgatccctgatatgcgtggctggacgattaagggcaaacctgccagtggtcgggccgtattgtctcaggaacaggacggcattaaatcgcacacccacagcgccagcgcatccagtacggatttggggacgaaaaccacatcgtcgtttgattacggcactaaatccacgaataacaccggggcgcatacgcacagtgtgagcggtacagccgcaagtgccggaaaccatactcatagtgtcacaggcgcatcagcagtcagccagtggtcacaaaatgggtcagtacataaggtagtgtctgcggccagtgtgaatacaagtgctgcaggagcgcacactcatagtgtcagcggcacagctgcatctgcaggtgctcacgcacatactgtcggtattggtgctcatacgcactctgttgcgattggctcacatggacacaccatcaccgttaacgctgcgggtaacgcggaaaacaccgtcaaaaacatcgcatttaactatattgtgaggcttgcataatggcattcagaatgagtgaacaaccacggaccataaaaatttataatctgctggccggaactaatgaatttattggtgaaggtgacgcatatattccgcctcatacaggtctgccagcaaacagtacctatattgcaccgccagatattccggcaggcttcgtggctgttttcaacagtgatgagtcatcgtggcatctcgttgaagatcatcggggtaaaacggtttatgacgtggcttccggcgacgcgttatttatttctgaactcggtccgttaccggaaaatgttacctggttatcgccggaaggagagtttcagaagtggaacggcacagcctgggtgaaggatacggaagcagaaaaactgttccggatccgggaggcggaagaaacaaaaaacaacctgatgcaggtagccagtgagcatattgcgccgcttcaggatgctgcagatctggaaattgcaacggaggaagaaatctcgttgctggaagcatggaaaaagtatcgggtattgctgaaccgtgttgatacgtcaacttcacaggatattgaatggccagcactgccgtagggtaaaacatataaattctataattagatgtatctttccatttacggcaaggaagggggcttggaagacgtaaagcatctcacaccgagattattttttatatgtcaggtgtctgaagttttgctttggctcttaaaatggtttgccgcgaggttttgaattcccgggcaatggcacttatacttacacctgacttaattcgttcgaataccacctgtttctgttcttcatttaacacaggtggtcgaccaaaacgtttccctgcgccgcgggctcttactatcccggaatgagtgcgttcaagtaaaaggtctcgttcaaattcagcgactgctgaaattacttgcatcatcatttttcctgttggactggtcaggtcaatgccccccaatgctaagcaatgcactctgatacctgtttcggtcagttgttccactgttttcctgatatccattgcattacaaccaaggcgatccagttttgtcacaatcaattgatcaccacatttcaggcgagcaagcaaccggttaaaaccaggacgctcactggttgctgctgagccgctaatgtgttcttcgattatttgctgaggtttgattttaaaacctgcactttcgatttcccggcgttgattttcggtggtctgatccagcgttgatatccgacagtaagcaaaaatttgagacatagtgagactctatacgaaattggtgttcatatcataatgcatctcagaaaataattatgattatttttgtgcatatttgtatgtacacgttcgaaaataaacgaatgcgtatgcaaccccgtaattttggtgagacccaaaatcgattttgtgaaaaatggctttaactcggtttgtttttcgagttccgggcggactcaaggaagaagaatagtgttgcgtgttattttaaccagatttcaagttgtttggtcgtggaaaagtggagcaaaatgttgttaaagtggaaaaatgataaaaaagtaagtttattatattacattttaccatttaaattttggttgtctttaagaactgatatcgctgtttgtaataattctttgttatccagccatgattttttctttatgtttccttcaatgtaatcaagcaatgttctggtattgataggtcttccctgttttgctacttccactacagcatcccctaggataattcttacttcaggaagctgcgcagggaaccactttagggtgtcttttgatttcatgaagatattccttaaaatattattgattttcattgcgatattgtatgtctgattcaggatatgttgacttatacatcggttttgtctgggttattggatatgccaatccctaattttattagggcatgactaaaaatgctgaatatgataaggagagatgtgattatcagtatgctgttcatatagcctcgaattagtaatgtgttatatatgatatagttgacaatttttatcttgggtgttcttaaagttcgtagataaacattgtcgtttcaggtatacaggaatgctaacaggtggcagcaaaaatcaggcggtttatggcgcaagctgaagcggcaactgcaaactatcttatgcagagactctacacggattgggtttaaaagtatacatagataacagtttttatctgaaaaagaaaaatatcaaggtgatatagcctatatgcctttgatgcggaggaatgaatgtgatgggagtgatgtatctgaatagttgaaaaaccgcagacacgccttatgcaagaacgtgctgcggttggctggtaaatttttcgatagtgtgagtattgaatgatttccagccgttcttgattttacgcataaatccatgaaaaaactacttatctgttggggagtttttttggggcatatatgggacagaaataggccccagatagacactgagatcgaacttaggatgctttttaaaaaatgcaactatctgaaaaaacctagaaaacgccaaggaagccacaggatgggaaaaaacacctgtgaattatggatttccagttatattcgctcggcgcagcgttggtgtttcatgaaatattttttcctgaatcatcaacggcaatggcgttaattctggcaatgggaacctacggtgcaggttatgtcgcgcgtattgtcggagcatttattttcggcaaaatgggcgacagaatagggcgtaaaaaagtgctctttattaccataaccatgatggggatctgtaccaccttaattggtgtgttaccgacctatgcacagattggtgtttttgcccccatcttgctggtgacgctgcgtattattcaggggttgggtgcaggtgcggaaatttccggtgccggtacgatgctggcggaatatgcaccaaaaggtaagcgcggaattatctcctcatttgtagctatgggaactaactgcggaaccttgagcgcaacggcaatctgggcctttatgttcttcattctcagtaaagaggaactgctggcgtggggatggcgtataccgttcctggcgagcgttgtcgtgatggtctttgctatctggttacgtatgaatctgaaagaaagcccggtctttgagaaggttaatgacagcaaccaacccacagcaaaacctgcacctgctggtagcatgttccagagcaaatccttctggctggcaacagggctgcgttttggtcaggcgggtaactccgggttaattcagactttccttgcaggctatttagtgcagacgttattgtttaacaaagcaattccaacagatgcattgatgattagttcgattctcggctttatgaccattccgttccttggttggttatccgataaaattggtcgccggatcccgtatattattatgaatacctccgcgattgtgctggcatggccaatgctttctatcattgtagataaaagctatgccccgagcaccattatggttgcactgattgtgattcataactgtgcggtgctgggattatttgctctggaaaacattaccatggcagaaatgttcggctgtaaaaaccgctttacccggatggctatttctaaagaaattggtggtcttatcgcttccggttttggtcctatcctggcgggtattttctgcaccatgacggaatcctggtatccgatcgccattatgatcatggcatattcagtaattggtttaatctctgcgctgaaaatgccagaggtgaaagaccgtgatttaagtgcgctggaagacgctgcggaagatcaaccgcgtgttgtaagagctgcgcaaccttccagaagtctgtaaaccctcaatcccttctcttaccggagaggggatttttattcatataacaaaacatatagcttgccatatttaaatttaaggaattgttatgggaaataatttgttatcagcaaaagcgacactccctgtttatgatcgtaataacctggccccaagaattattcatttaggctttggtgcatttcaccgtgcgcatcagggcgtgtatgccgatattcttgctacagaacatttcagtgactggggatattatgaggtcaacttaatcggcggcgaacagcaaattgccgatttacaacagcaagataatctttataccgttgcggaaatgtcggccgatgcgtggacggctcgcgtcgttggcgtcgttaaaaaagccttgcacgtacagatggatggcttagaaaccgtgttggctgcgatgtgtgaaccgcaaatcgcgattgtctctctgacaatcaccgaaaaagggtatttccactctccggcgaccggacagttaatgctcgatcacccgatggtcgctgccgacgtgcaaaatccccaccagccgaaaacagcaacaggggtgattgttgaggcgctggcccgccgtaaagcggcaggacttcccgcatttaccgtcatgtcatgtgacaacatgccagaaaacggtcatgttatgcgtgacgttgtcacttcatacgcgaaagctgttgatgtaaaactggcacaatggatcgaagataacgtgactttcccatcaacaatggtggaccgtattgtgcccgcagtgacagaggatacgctggcgaaaatcgaacaacttaccggtgtgggcgatcctgcgggcgttgcctgtgaacctttccgccagtgggtaatagaagataactttgttgccggacgtccagaatgggaaaaagcgggagccgaactggttagtgatgtgctgccttatgaagagatgaagttgcgcatgctcaacggcagtcattcattcctggcgtatttgggttatcttgctggatatcagcacattaatgactgcatggaagatgaacattatcgttatgcggcgtatggcttgatgttgcaggaacaagcgccgacgctgaaagtgcagggcgttgatttgcaagattacgctaaccgattaattgcacgctatagcaacccggcgttacgtcatcgaacctggcagattgcgatggatggtagccagaaattgccacagcggatgttggattctgttcgctggcatctggcgcatgacagcaagttcgatctgctggcgctgggcgtcgcgggttggatgcgttatgtcggtggtgttgatgaacagggaaatccgatagaaatcagtgacccactgttacctgttattcagaaggctgtacaaagtagtgccgaagggaaagcgcgcgtccagtcattgctggcgattaaggcaatctttggtgatgatttgccagacaatagcttgtttactgcaaaagtgacggaagcgtacttgtctttattagcgcatggcgcgaaagcgaccgtggcgaaatattccgtgaagtaaaaaaagcaatgccgccatcggcggcattcacacacttagttcatgccgagacgaatcaggtccagaggtgccagtttctcttcacaaccttcaacaactacggtttttccgcggcggatttgctcagcggtcagaccttcagtatcaatcgacaggatcttgccagtgtgaccggtgccgctaaccataacacggctgccagtggtgattgcgttacggttacgatcgtaggtcgtcataggtgttttctcctttctgatttacagtcgaagcccacgtaacgggcgcaatataaatactcctgtcgagtgaaatattttttgtttttgatcaagctcacatcttttttgatgcatgcatgagccgtaaggcggggggaaaagcctctcatcccggatgggatgagagtaaatgaattactcttcgctaaaccagtcgctgttttcctggcggatctggcgcacggattcgctgatttcctgcaaatgttgcgtcattgcacgttctaccgcatcgccatcacgtttttgcagggcagagaaaatatcaagatgctggcgtaacagcatttctggtggagaaacatggtcgaaactcatatagcgcacgcgatcaacggtcgctttcaggttctcaatggtatcccacgccagttgacagtcggcaatctgcgtcaggagttgatggaagttgtcatcaagttcaaaaaaatcatccagttgcttgcgctcaatggcaatgcgttgctggtgaagattttgttccagttggtagcactggctttcggtaatcatgctcgccgcccgacgcgccaccgcgcactcaatggcctgacggataaaactgccgtttcgcacctgggccatggaaattttgttgacgtagctgccacgctgcggacgaatttgaatcaggccgttttccgccagtttaataaaggcttcacgaaccggctggcgtgacacattgaaacgaacagaaacttctttttccgacaacggtgtgcctggtgcaatcaggcaatggacaatgtcgcgacgaagaatacgataaatctgctgattgacaggctgtgtgggattaagttgcgtttcgacggtcattcgttcttgcttgtgagtgagttaactgcatgagtctaccacttttttgtgacaagcaataacccggcagttacgccgggtataaaaattactgacggtggacattcagtccggcatagctttgggtaaccggcatcatttccagggtattgatattgacgtgagcaggcagcgttgacacccaccaaacggcttcgctgacatcttctggcgtcaatgcaacggtattttgataggttttttccgctttaccgtcatcgcctttaaagcggacattggaaaactcggtgccacccaccagacccggttcgatgtcggtgacgcgcaccgccgtaccatgcaggtccgtacgcagattcaggctaaactgacgaacaaacgctttcgtcgcaccgtaaacgttaccaccggcataaggccagctacctgccgttgagccaatgttaataatatgaccatgattacgttcaaccatacccggtaagacggcgcgcgtcatatataccaggcctttgttgttggtatcaatcatcgtttcccagtcttcaacgctggctttatgcgcaggctccatgcccaacgccaggccggcattatttaccaggatatcaatattgcaccactcggcagggagcgatgccagcatctcttcaatagcggcgcggttgcgaacgtccagttgggcgatatacagattatctcccagttcgtcttttaactcctgcaaccgctcctggcgacggccagtggcgataactttatgcccttgttgaataaaacgacgagtaatgcattcaccaaaacctgccgttgctccagttactaaaacgatcatctcactgttcctcaacgcttttgtgtgtcaataacatagcacgtgatgcttaagagcgggtaatactggtttgcaagattgcactccgttatcagtaagcctacgctatggaacacctcgcgttcaggagaagaaaatgacaacaatgaatcctttccttgtgcaaagcacactgccgtatctggctcctcattttgatcaaattgccaatcatcactatcgcccggcattcgatgagggaatgcagcaaaagcgggcagaaattgctgccatcgcgcttaacccgcaaacgcctgatttcaacaatactattctggcactggaacaaagcggagaattacttacccgcgttaccagcgtcttttttgcgatgactgcggcgcataccaatgatgaattacagcgtcttgatgaacagttttccgctgaactggcggaactggctaatgatatctatctgaacggtgaattattcgcgcgggtagatgctgtctggcagcgccgtgaatccctggggcttgatagtgaatccatccgcctggtggaggttattcatcaacgttttgtccttgccggagccaaacttgcgcaagctgataaagcaaaattaaaagtactgaatacagaagctgcgaccctgaccagccagtttaaccagcggttacttgcagcaaataaatccggcggtctggttgtgaacgatatcgcgcagctggcaggaatgagtgagcaagagattgcgctggcggcagaggcggctcgcgagaaaggtctggataacaaatggctgattccgctgctgaataccacccaacaaccggcgcttgccgaaatgcgcgatcgtgcgacgcgtgaaaaactgtttattgcgggctggacgcgagcggaaaaaaatgatggcaatgatacccgcgctatcattcaacgtctggtagagattcgcgcacagcaggcgaaactgcttggttttcctcattatgccgcatggaaaatcgccgatcagatggcaaaaacacctgaagcagcactcaactttatgcgggaaattgttccagcggcgcgtcaacgtgctagcgatgaattagcctccatacaggcggttatcgataagcagcaaggcgggtttagcgcgcagccgtgggactgggcattttatgccgaacaggtacggcgggagaaatttgatcttgatgaggcgcagctcaagccatattttgaattaaacacggtgttgaatgaaggtgtattctggaccgcgaatcagctcttcggtattaagtttgtcgaacgttttgatattcctgtctaccatcctgacgttcgtgtgtgggaaatttttgatcataatggcgtgggactggcgttattttacggtgatttcttcgcccgtgattcaaaaagcggcggtgcatggatgggcaattttgttgagcaatcaggtgatgctgccaacttactgatttagtgtatgatggtgtttttgaggtgctccagtggcttctgtttctatcagctgtccctcctgttcagctactgacggggtggtgcgtaacggcaaaagcacc

SEQ ID NO: 72 - DNA, 33234 bp, Escherichia coli
  source 1..33234: mol_type = genomic DNA
aacaggtaaccagcataaataccagacccgtgtggtctcaaatgcgaacaaggttaacctgaaatttgaagaggcgaagcctgttctcgaagaccagctggccaaatcaatcgcaaatattctctgaacctcgtcaggaggctggtctgaccggcctccttgctgacgcctcgcgttgctcgttgtccaaccccgggacgtaacaaaataaattttgtcacttcccgacgtttccgaaataaatatgaaaacactgagcggttgtgcaaattctttgtgcgaccgtgaagtgttgccggcgaagccgggatcttccggagaaagtcattatgacatcagacaatatcgctgaatatgttggtgagaataatcaatttactgagaagcctgtaactgaataccccccggtgatacaggataatacagtgaccactaaagactatctgtacagcaataatattgatactgaccttttagtggttatcggagggcttattgttatattgtttctcatgatgcttatcatgtactttattaattctctcaggcataaggaattaactgaaatactgacaaaaatatcttttcctgaaaaatccgggagcaattcgcttaaaccggaagcggtcagctgtaatttgttgtccctgtgtgtgctggcaccggtattctgtacacccagaaagctggctgaagtttccagggagatcatcgtggcgagtgcgcaggaaattgcatggacgccggggagcagtcgtattgatggccaccaggcggagaatatcacctgggcgatttcatcgcagtctcctgccgataagtatgatctcatcaataaaacctcccgtgtttctcctgacagtggccgtttttatgaaccggacacagttctggatcaccgtgaacgggtacgcctttttattcagatccagtttccgcatgggagtgactggtctgaagtattgcgcctgactgacattgttacagagaaggtctcttccggcagggctgcaggcgggtatcaccaccgacatacagggtacacctggtctgtttctgtgaattaaccccacatcatccttttctgccctgttccagattttcccggagtttcatcatgagttttaatgcaaaggatatgacccagggcggtcagattgcgtccatgcgtatccgcatgttcagccagatcgccaatatcatgctttactgcctgtttatttttttctggatactcgttggtctgattttatgggtaaaaataagctggcagacgtttgtgaacggctgtatttactggtggtgtaccacgctggaaggcatgcgggatttaatcaagtcccagccggtctatgagattcagtattacggcaaaaccttccggatgaacgctgctcaggtactgcatgataaatatatgatctggtgcggtgagcagctatggtccgcattcgttctggcgtctgtcgtggccctggttatttgcctgatcaccttctttgttgtctcctggattctggggcgtcagggtaaacaacagagcgaaaatgaagtcacaggtggtcgtcagctgacagacaatccgaaagatgttgcccggatgctgaaaaaagacggcaaggactccgatatccggattggcgacctgccgattatccgggattccgaaatccagaacttctgtctgcacggcacggtcggggccggtaagtcggaggttatccgtcgtctggccaactacgcccgtcagcgcggtgatatggtggtgatttatgaccgttcaggggaatttgttaaaagttactatgatccctccatcgataaaatcctgaatccgctggatgcccgctgtgccgcatgggatttgtggaaggagtgcctgacacagccggattttgataataccgcgaacacgctgatccctatgggtacaaaagaggacccgttctggcagggttcaggacgtaccatttttgcggaagcggcgtacctgatgcgtaatgaccccaaccgcagctacagcaaactggtggacacactgctttccatcaaaattgaaaaactgcgtaccttcctgcgtaattcaccggcggccaacctggtggaagagaaaattgagaaaacggcgatttccatccgtgctgtgctgaccaactacgtgaaagccatccgttacctgcaggggattgagcataacggtgagtcttttaccatccgtgactggatgcggggtgtccgggaagatcagaaaaacggctggctgtttatttcgtcgaacgccgacacccatgcctccctgaagcctgtgatctccatgtggctgtccattgccattcgtggtctgctggcaatgggagaaaaccgtaaccgtcgtgtgtggtttttctgtgatgagttacccacgttacacaaactgccggatctggtggagatcctgccggaagcccgtaagttcggtggctgttatgtgtttggtatccagtcctatgcccagctggaagatatctacggtgagaaagcggctgccacgctgtttgacgtcatgaacacccgtgcctttttccgttctcccagccataagattgcagagttcgctgccggtgagattggtgagaaagagcacctgaaagccagcgagcagtattcctacggtgctgatccggtacgtgacggggtatcgaccggtaaggatatggagcgccagacgctggtcagttattccgacattcagtctctgccggatctgacctgttatgtcaccctgcccggaccgtatccggcagtaaaactctccctgaaatatcagacacgaccgaaggtcgctccggagtttattccgcgtgacatcaacccggaaatggagaaccgtctgagtgccgtacttgctgcaagggaagcagaaggtcgccagatggccagcctcttcgaaccggaggttgcctccggagaaggcgtgactcaggctgaacagccacaacagccacaacagccacaacagccacaacagccacaacagccacaacagccacaacagccacaacagccacaacagccacaacagccacaacagccacaacagccacaacagccagtgtcttctgtcatcaatgataagaagtcagatgcaggtgtgagtgttccggcaggggggatcgagcaggagctgaaaatgaaaccggaagaagagatggaacagcaactgccacccgggatcagtgaatccggtgaagtggtggatatggccgcttatgaggcatggcaacaggaaaatcatccggacatccagcagcagatgcagcgtcgtgaagaggtgaacattaatgtgcaccgggagcgcggggaggatgttgagccgggagatgatttctgatgatgagtatcgcgcaggtcagatcggccggaagtgccggtaactattataccgacaaggataattactatgtactgggcagcatgggagaacgctgggccggcaggggggctgaacagctgggactgcagggcagtgtcgataaggatgtttttacccgtcttctggagggaaggctgccggacggagcggatctaagccgcatgcaggatggcagtaataagcatcgtcccggctacgacctgaccttctccgcccccaaaagtgtctccatgatggccatgttaggtggcgataagcgcctgattgatgcacataaccaggccgtggactttgctgttcgtcaggtggaggcgctggcctccacacgggtgatgacggacggacagtcagaaacggtactgaccggtaatctggtgatggcactgtttaaccacgacaccagtcgcgatcaggaaccacagttacacacgcatgcggtggtggctaatgtcacgcagtataacggtgagtggaagacactgagcagtgacaaagtggggaaaacggggttcattgagaatgtgtacgctaatcagattgcctttggcaggctctaccgggaaaaactgaaagagcaggttgaggcgctgggctatgaaaccgaagtggtgggtaagcacggtatgtgggagatgccgggcgtaccggtggaggccttttccggacgctcacaggctatccgggaggccgtcggggaagatgcctcgctgaaatcccgggatgtggcggcactggatacgcgaaaatccaaacagcacgtcgatcctgaagtcagaatggctgaatggatgcagacgctgaaggaaaccgggttcgacatccgggcatatcgtgacgcggcggatcagcgtgcggagacccgcacgcaggcgcccggggctgtttcacaggaggggccggatgtgcagcaggcggtgacacaggcgattgccggattaagtgaacgaaaagtgcagttcacgtatacggacgtgctggccaggacggtcggcatactgccgccggaaaatggtgtgattgaacgggcacgcgccggtatcgatgaggccatcagccgtgagcagcttatcccccttgaccgtgagaaggggctgttcacatccgggattcatgtgctcgatgagctgtcagtccgggcactcagtcgtgacatcatgaaacagaaccgggtgaccgtacatccggagaaaagtgtcccccggacggccggttacagcgataccgtcagtgttctggcacaggatcgcccgtcgctggccattgtgtccgggcagggcggtgcagccgggcagcgtgagcgggtggctgaactggtcatgatggcccgggagcaggggcgggaagtgcagattatcgctgctgaccgtcgctcgcagatgaacctgaagcaggatgaacggctgtccggtgagctgataaccggacgtcgtcagctgctggaaggcatggccttcacgccgggcagtaccgttatcgtcgaccagggcgaaaaactctccctgaaagagacgttaaccctgctggacggtgccgcacgtcataacgtacaggtcctgataaccgacagcgggcagcgaaccggtacaggcagtgcactgatggccatgaaggatgccggggtgaacacatatcgctggcaggggggagagcagcgaccggcaaccatcatcagtgaaccggaccgtaatgtccgctatgcccggctggcaggggattttgcggccagcgtgaaagccggagaagagagcgtggcacaggtcagcggggtacgggaacaggccatactgacgcaggccattcgcagtgagctgaaaacacagggcgtgctcggacatccggaggtgaccatgacggcactgtcaccggtctggctggacagccggagccgttatctgcgggatatgtaccgtccggggatggtgatggagcagtggaacccggagacacgcagtcatgaccgctatgtgatagaccgggtgacagcgcagagtcacagcctgaccctgcgggatgtgcagggcgaaacgcaggtggtgcgtatttcctccctggacagcagctggtcgctgttccggccggaaaaaatgccggtggcagacggcgagcgactgagggtgaccgggaaaattcccggactccgcgtctccggcggtgaccgcctgcaggtggcatccgtcagtgaagatgtgatgacggttgttgtgccggggcgggctgaaccggcctccctgcctgtgagcgattcaccgttcacggcactgaagctggagaatggctgggtggaaacgcccgggcattccgtcagcgacagtgcgaaggtttttgcctccgtcacacagatggcaatggacaaggccaccctgaacggtctggcccgcagtggtcgtgatgtccggctgtattcctcactggatgaaacccgtactgcggaaaaacttgcccgccatccgtcctttacggtggtttctgagcagataaaggcgcgggccggtgagacatcgctggaaacggctatcagtcatcagaagtccgcacttaacacaccggcacagcaggccattcatcttgcccttccggtggtggaaagtaaaaacctggccttcagccatgtggacctgctgacagaggcaaagtcgtttgctgcagaaggaaccagttttgctgacctggggcgggaaatcaatgcgcagataaaacggggcgatttactgcatgtggatgtggcaaaaggttatggcacagacctgctggtttcccgtgcgtcgtatgaggctgaaaaaagcattcttcgccatattctcgaaggtaaggaggcggtcacgccgctgatggagagagtacctggcgaactcatggagaaactgacatcaggacagcgcgccgccacccgcatgatactggaaacgcccgaccgtttcacggtggtgcagggctatgccggtgtgggtaagaccacacagttccgggcggtgatgtcagccgtgaacatgctgccggagagtgagcgtccccgtgtcgttgggctgggccccacgcaccgtgcggtcggggagatgcgcagcgccggcgtggatgcacagacactggcgtcctttctgcatgacacgcaactgcagcagcgcagcggagaaacgccggatttcagcaacacgctgttcctgctcgatgagagctcaatggtgggcaataccgacatggcacgggcatacgccctgattgcggccggtggtggtcgtgccgtggccagcggtgacacggaccagctgcaggccatcgcgcccggtcagcctttccgtctccagcagacgcgcagtgctgccgatgtggccatcatgaaggagattgtgcgtcagacgccggaactgcgggaggcggtatacagcctgattaaccgggatgtggaaagggcactgtccgggcttgagagtgtgaaaccgtctcaggtgccacgtcaggagggcgcatgggcaccggagcactccgtgacggagttcagtcacagccaggaagcgaaactggcagaagcgcagcaggaggcgatgcagaaaggcgaggcttttccggatgtccccatgacactgtatgaagccattgtccgcgactataccggcaggacaccggaagcacgggagcagacgctgattgtcacgcacctgaatgaggaccgacgcgtgctgaacagcatgattcatgatgcacgggaaaaggccggtgagctgggaaaagagcaggtcatggtgcctgtcctgaacacagcgaatatacgtgacggagaactgcgtcgtctttccacctgggagacacatcgggacgcacttgccctggtggataatgtgtatcaccggattgccggtatcagcaaggatgacgggctgataaccctgcaggatgcggaaggtaacacgcggctgatttcgccccgggaggcggtggctgaaggcgtcacactgtacactccggacaccatccgggtgggaaccggtgaccggatgcgcttcacgaagagtgaccgggagcgcggttatgtggccaacagcgtctggacggtgacagcggtttccggtgacagtgtcacgctgtcggacggacagcagacccgtgtgattcgccccggtcaggagcgggcagagcaacatattgacctggcctatgccatcaccgcccacggtgcgcagggggcaagtgaaacctttgccatcgcgcttgaaggcacggaaggtaaccggaaactgatggccggctttgagtcagcctacgtggccctgtcgcgtatgaagcagcatgtgcaggtgtacaccgataaccgtcagggctggacggatgccattaacaatgccgtacagaaaggaactgcccacgatgtgctggagccgaaaccggaccgggaggtcatgaatgcagagcggctgttcagtacggcacgggaactgcgggacgtggcggcagggcgtgccgttcttcgtcaggcggggcttgccgggggagacagtcctgcacggtttattgctccgggacgtaaatatccacagccgtatgtggcactgccggcgtttgaccgtaacggcaaatcagccggtatctggctgaacccgctgacctcggatgacggaaacgggctgcggggattcagtggtgaaggccgtgtgaaaggcagcggggatgcgcagttcgtggccctgcagggcagccgtaacggagaaagcctgctggctgataacatgcaggatggcgtccggattgcccgtgataatcctgacagtggtgtggtggtaagaatcgccggtgaaggccgtccgtggaatcccggtgccatcaccggtggccgcgtgtggggggatatcccggacaacagcgtccagccgggagccggaaatggcgagccggtcacggcagaggtactggcacagcggcaggctgaagaggccatccgccgtgaaacggaacgccgcgcagatgaaattgtccgtaaaatggcagagaacaaacctgacctgctggacagcaaaacagagcaggctgtcagggagattgccgggcaggagcgtgaccggtctgccatatctgaacgggaagccgcgctgccggagagtgtgctgcgtgaatcacaacgggagcgggaagcggtccgggaggttgcccgggaaaatctgctgcaggaacgacttcagcagatggagcgggatatggttcgtgacctgcagaaagagaaaaccctgggcggagactgatacaggaagacaaacactgatgacaacggataacacgaacacgacacgtaacgattcactggctgcccggaccgatacctggttgcagtcgttgctggtctggtcacccggacagcgggatatcatcaaaacggtggcactggtgctgatggtactggaccacatcaatctgatattccagctgaagcaggaatggatgtttctggccgggcgtggagcctttccgctgtttgccctggtgtgggggctgaatctgtcccgtcatgcgcatatccggcaaccggccattaaccggctgtggggatgggggattattgcccagttcgcatattatctggcaggctttccctggtatgaggggaatatcctgtttgcctttgcagtggcggcacaggtgctgacgtggtgtgaaacgcgcagtgggtggcgtacagcagcggccattcttctgatggcgctgtgggggcctttgtccggcaccagttacggcattgccgggctgctgatgctggcagtcagccaccggctgtaccgggcggaagacagagcggaacgtctggcgctggtcgcctgcctgctggctgttattccggcgcttaaccttgccaccagtgatgcagcggcggtggccggtcttgtgatgacggtgctgaccgttggtctggtgtcgtgtgcaggaaaatcattaccccgtttctggcccggggattttttcccggtattctacgcctgtcatctggctgtgctgggcgttctggcgctgtgacgggtgtggtatctttgaccgcaagaggatgattcgtcagaggcagaacacagcatgacagagcagaagcgaccggtactgacactgaagcggaaaacggaaggggagacgcctgtccgcaggcggaaaaccatcatcaatgtcaccacgccaccaaagtggaaggtgaaaaagcagaagctggccgagaaagcagcccgggaagcagagctggcggcaaaaaaagcgcaggccagacaggcactgtccatttatctgaatctgcccacgctggatgaggccgtgaataccctgaaaccctggtggccgggattgtttgacggtgacacgccccggcttctggcctgcggtatccgggacgtgttactggaagacgtggcgcagcggaatatcccgctctcgcataaaaaactgcgcagggcgctgaaggccatcacccgttcagaaagctatctgtgtgccatgaaagccggtgcctgccggtatgacacggaagggtatgtgacggagcatatttctcaggaggaggaagcgtatgcggcagcgcgtctggataaaatccgccgccagaaccggataaaggcagaacttcaggccgtgcttgatgagaaataaaaaaagcctccatcagagaggaggcagggaaataaggcttaaaaggaaataacttccgtacccgaaaggaagccaattcagtagattatttaacaccataatactgacgggttaaagaggagtgataaagatgaatggattcagaaacagttcacggaacggtcaggtctggcgctggcagcgtgccggaagccgtgccgtcagcctggaggtcaggggattccggaaggaggccgctgaagcgtggctcctggctgcccgtgttgctccccgtacagactggcagcagtttgcacggcagagagccgaacgctgtcagcgacggagataatgaaaaaaacggcaaaaaaaagacttcccctgagcaaaggaggccaaaaatcattcatagcgtatcactgacattgaatgaatgctctgtacatcaaccctgtgaagctaccaccggttaatgccgggaggctgcgggaagaaagataatacacagtcattacgtggttaatatctgtcagaatgttttttgtgaccataaactgtcagatggataaaaaagaccgtcatgtgacggtcagtgttgtcctgtcagggacaaatgcattcagtaaggagagcaaaataataacatcacgttgcccggctgttaatatcaggcgatgttaagtgttatttatgactcttttatctggttgtgaagtctgttaatcaggaagagaaaatggcgaccggaaaatcagagaagcaacaggtgattgcctttatcgattacgagaactgcagtaacctgacagaaatttccttaaatatatatacggagttaattatattcgcgggtgcgaaacagaataatgtggcactgccagtaaacgctttccctgaagcagtaaaaatcacactccggcatgtcagtgaagtctcccggaacaatgttgattttcatctggtgctggagctggggcagtgtgtatgccactacgggccggagaagaaataccatattgtttccgctgacaagggatatgacggtattgtccggacactgcaggcgcgcgggattcgctgccgtcgcgtctccccggataaggcgtcatcagtaaagatggctgcacccgacatggatatcgttatccggtgggcaaacaaaattcaacaggcagcgcgggaggttcgtaatatgccggtaacagaaaagacatttaataattatttaaaatcacagatgcgcggtgaatggcgtgatgtcctgaccagaggtatccgggatgaactggtccgtcgcggggtaatgaaaattcaggggaataaaatcatctggtaagactgccagaataaaatgatatttattttatttataaaaacagaaaggtcgaaaatcaataatggcatttatttccatgacaagacagaaagcgccgtacagatatgcaagcaagacccggttatcgataagacgaacagactcaggctctgccgggtgttatgtgacggttgccgttcgggggaagcaggaatttattattgctgaacttgattcagaaatccggaaaatcaggctgaaactgacggactcctatgaagaaggggtaaggctgtcttcgggcacgtttacgcttccggccagattctgccgggaaatactgccggacgacgtcaggagtatcaccattattctggaaaaaagcgacgatgagtggtggtacgggagttactgatatgtggcagaactccggacactgacgccttcgcgttgctcagttgtccaaccccggaaacgggaaaaagcaagttttccccgctcccggcgtttctataactgaaaaccatactatttcacagtttaaatcacattaaacgacagtaatccccgttgatttgtgcgccaacacagatcttcgtcacaattctcaagtcgctgatttcaaaaaactgtagtatcctctgcgaaacgatccctgtttaagtattgaggaggcgagatgtcgcagacagaaaatgcagtgacttcctcatctggcgcaaaacgagcatacagaaaggggaatccgctttctgatgcagagaaacaaagattatcagtggcccgtaaaagagcttcgttcaaggaagtaaaagtatttcttgaaccaaagtataaggccatgctcatgcaaatgtgtcatgaagatggcctgactcaggctgaagttctgaccgcactgataaaaagtgaagcgcaaaaacgatgtatgtgatgatgggcttacattcttgagtgttcagaagattagtgctagattactgatcgtttaaggaattttgtggctggccacgccgtaaggtggcagggaactggttctgatgtggatttacaggagccagaaaagcaaaaaccccgataatctttctatgtttggcgacgaagaagattaccggggctaacaagaaaccgtatagccaacaattcagctatgcggggagtatagtcatatgcccggaaaagttcaagacttctttctgtgctcgctccttctgcgcattgtaagtgcaggatggtgtgactgatcttcaacaaacgtattaccgccaggtaaagaacccgaatccggtgtttacaccccgtaaaggtgccggaacgctgaagttctgcgaaaaactgatggaaaaggcggtgggcttcacctcccgttttgatttcgccattcatgtggcgcatgcccgttcgcgtggtctgcgtcgacgcatgccgccggtactgcgtcgacgggccattgatgcgctgctgcaggggctgtgtttccactatgacccgctggccaaccgcgtccagtgctccatcaccacactggccattgagtgcggactggcgacggagtctgctgccggaaaactctccatcacccgtgccacccgtgccctgacgttcctgtcagagctggggttgattacctaccagacggaatatgacccgcttatcgggtgctacattccgaccgacatcacgttcacaccggctctgtttgctgcccttgatgtgtctgaggatgcagtggcagctgcgcgccgcagtcgtgttgaatgggaaaacaaacagcgcaaaaagcaggggctggataccctgggtatggatgagctgatagcgaaagcctggcgttttgttcgtgagcgtttccgcagttatcagacagagcttaagtcccggggaataaagcgtgcccgtgcgcgtcgtgatgcggacagggaacgtcaggatattgtcaccctggtgaaacggcagctgacgcgcgaaatcgcggaagggcgcttcactgctaatcgtgaggcagtaaaacgcgaagtggagcgtcgtgtgaaggagcgcatgattctgtcacgtaaccgtaattacagccggctggccacagcttccccctgaaagtgacctcctcagaataatccggcccgcgccggaggcattcgcacgcctgaagcctgtcagcgaacaaaaaagcagcactacatacaaaaaacaatctcatcatccaccttcaggtgcatccggttccccctgtttttgatgcaaaacacctcccacagacggggaattttgcttatccacatttaactgcaagggacttccccataaggttacaaccgttcatgtcataaagcgccagccgccagtcttacagggtgcaatgtatcttttaaacacctgtttatatctcctttaaactacttaattacattcatttaaaaagaaaacctattcactgcctgtcctgtggacagacagatatgcacctcccaccgcaagcggcgggccccgaccggagccactttagttacaacacacgaaaacagcctccagaaaaaccccggtcctgcgcagaactgaagccacaaagcccctcctcataactgaaaagcggccccgccccggcccaaagggccggaacagagtcgcttttaattatgaatgttgtaactatactccattatggctattagtgttctggctgaaagtcctctgtacacgctcgtaagcggccctgacggcccgctaacgcggagatacgccccgacttcgggtaaacccttgtcgggaccactccgaccgcgcacagaagctctatcatggctgaaaacgggtatggcttagcagggctggggatgggtaaggtgaaatctatcaatcagtaccggcttacgccgggcttcggcggttttactccggtatcatatgcaacaatggagtgccgccttccatgccgctgacgcggcatatcctggtgacgatatctgaattgtcacgaacggtgcaatagtgatccacacccaacgcctgaaatcagatccagggggtaatctgctctcctgattcaggagagcttatggtcacttttgagacagttatggaaattaaaatcctgcacaagcagggaatgagtagccgggcgattgccagagaactggggatctcccgcaatacggttaaacgttatttgcaggcaaaatctgagccgccaaaatatacgccgcgacctgctgttgcttcactcctggatgaataccgggattatattcgtcaacgcatcgccgatgctcatccttacaaaatcccggcaacggtaatcgctcgcgagatcagagaccagggatatcgtggcggaatgaccattctcaggggattcattcgttctctctcggttcctcaggagcaggagactgccgttcggttcgaaactgaacccggacgacagatgcaggttgactggggcactatgcgtaatggccgctcaccgcttcacgtgttcatcgataggaatttaaatcccaaaaagattaaaaaaacacccaaaaacggatgtttattcaacactgcctgcgtgccatgagtgcaccgccatcaattaaatggatcttatcgagtgatactgtatatcactgatggttttttactccattcccctgaaaatggacgcaacttccccgatgcggctctcagccgcacacccgctgttgcgccagtggctcatgcatcaggaccagctctgtcagacggtagccccgcttcagccccgtaaaacgcatctgacatccgcacaggatgcactttagcgggtcaaccttcagtaaccgctgatacatccctctccacctgatttgcatcgccgtctttctcaccgtctccgttatgacgtacacaacatcttccagtaaccggcgcttcaccggactcaggaaaccgtagtacctcaccatacggaaccccttatccgccacatgccaggagaacctttccataaactcatcaccactcatcaccaggtattcttcccgttttgtccggtgactgttgtaacgcagaccaatttcatcctgaccagcatagtgctccagacggctcatcggcaccggcggttttttcaggtaagagccgaagtacaccgccacatgtgtggcgttatccatcacccgggatacgttgacattccagccccgccggtaatgactgtccaggaagcgattccagtcccgtctgctgcttccttcaactgccagcgcatccggtatcaccagctccgggtattttcgtgacagtaaccacgttatcctgtaacgccacatgctcatcaccttacgggcgtaaaaatgaaggtttttccaggtgtggtctggtgtcacgccgccggccgttgtcgacaggtgaatgtgcggatgccactgctggtcacgtccccatgtgtggatgaccgtgaatatccccggcaccacatctgcctggcggcagatttcctgtatcacatccgcagcaatgcggctcatctctgccagtaaccaccggttgtggaacaccagggaccagtactggcagggaagtgtgaacacaatatgctgccacgggcagtcggggaccagactcagtagatactgtatccactgtgcgccagccttcactccgcagtgcgggcaggagcgacttttacaccgaaagcagaccttttttgtgtggcaacagtccggtgatgaacagcaccactgtgtgtaccctattagcgtggttccgcacgccatgatttttgtcaccgactcaatgactaccggacgcactgaaccttccggttgtttctccagccagttaagccagcggtttccctgctgaaaaatgtcggcaaaacggggaagcatcagaagggcggggggactccgtccggccagtgaaccgtgccacactccgggcagtacatgccgccggcgctgataccggcaagaatggtcgcaaactcccgctccgtgcagcgggctatttcaggatacccttcgtcatcaacacgtacaaaccagaagaccagctttttgtttccggcatccacaaagaagggaatattcaggtctgcgcagcactcaacggcatcgtcaaaattatcaaagcgcagagcttctgcgtcttcttcgtcaaagaagtcatcgtcgtgaagcttcacgacatagcggggaagtttgcttctttgaggggcaggttttcgtttacggggtttagctgaacgggacatataactacctgaaagacaatgatattgtctgtttttataacggtaatttcaggccatgacaagccgcagccgccaggctgcctactcgatttaacgtaacattttttacccgcccccaggagggactctcattgtgattctgccatgaactggctattttcggcacctttccttgctcaaaattctgaaaaactctcctgatgatttaagcccctgcttggctatgcaggagggcattttgtgcacggcctcctgataatgcagggacagatctcgaaaggcgcggtgctggataattcgcaggcgcgtcagtggattttagagggtttcggtgcgcaatcctgaaccaaccgtgtagagctattttaacatgataaatcaaagcgataattcatggaagcgcttcatgtagctgtggggtgtaactgtgaaatgttggtgttggtgaaatgatgccttctcacccaactccagacaatgggggcggcaaaacgtctgctatcctccctacgccaatcttcagcccgtaaactgttatcggcgtactttccccgtgaaatccgggtcatccggccggaagaggaatgctgctaggcctgtgtgacctcagtccactgggatgttgtcaacgccacgatttttaaccgttaaccgtcttatatcactggcgctgacacctctccgggttgccattgtggtgatacgtcttgctccggccaaaccgtgactgatgccatgtagctcaagtacctgactacgtaatacagcccgtctgccgtctggtttttcaggacggttttaccagtatctgtagctgctgtgatgaaccctaaacacatggcagagtgtgaccacaggataacgcgtcctgagtttcccgattacagagaactgttcagggagtccaacatcaagaactcggtagctttttcctcagctcacgtatttcaatttgttctggtgtcatcgagagagccttggtgttttgccctgacgctcatcacgctgttgtttgacttggcttccggatcaatgccgttcagacggcaagtgccacgcagcacgtatagcagcaaatactggacttctgaaacttaacgctcacgtaaactttctgttactgactcttctaaaggactaagaagataactgattacacttcgcatacctgtctttatttctgcagtgactgccatacccgagcttaatggaatgtttttattcccggttgacaaaccattctcttcaatagaaataataacattaaaaacaagtcccagtctctggtcttctattgcatctaaatttatatttttcaccttacccaccagataaccatatcgtgtataaggaaatgcctccactttaatgatggcattctgcccgacgttaataaaaccaatatctttattttgtaccagagcagtaacctccagcgtgtcatcttccggaacgatgaccatcagtgtttccgctgttgtaacaaccccaccttcagtatgaaccttcagttgctgaacttttcccgaaactggggccctgattactgaagcctgttgacgctcttcatttttcgctaattccagagttaataacccaatgttgtctgttgtttgtcttagcttatctaaaatttcatttttaaaaagctgcgtaacaagctgatattcttcttttgcagacaatatctcactctcaatttgctccagttgtgatttataaactcgtaattcatttactgcttcgacatatttattctcctgctcaagtacagcatgttttgcaattgcctgtttatgcaataaactactgaaatcatccagacggcttttttcaacccttgataaattttcataacggtttatacgggcaagtactgttaatcgctctgctcttttcttatccaaattcagttctttttgatacttctgattttgccatgtggaaaactgttcttttatcaaagaagttaaacgcagtacttcctcttcagatacattctgaaaataaggctcatcaggaagctttagttcaggtagtttatttaattcaattgacctgctcagaatttgataccgagtttgttccagcctggcctgtaacagtgatgactgtgtttttaacgtatcagcttcagctcccagtgctgtaagctttaataacacatcccctttccggactgactctccttcttttacgataatttctttaactattgagttttcaataggtttaatttctttactacgcccactgtgtgttaatttcccatttgcagtggcaacaatttccacttggcctaaaacagataaaataaaagcaataaccagaaaccccataataaaataagcaaccagacgcggccgtctggatactggcgtttcaattaattccagatgagcgggtaagaattcattttcgtccttttcacgtaccggagtatctaattgcttccggattttccatgtttcactccagacaagtttatagcgcaacaggaactcgctgaaccccattaaccatgttttcatattcttctgttctttctgttagtctgactgtaactgatataagtaactgtataaactttccggttcagaaagcagctccttatgtttaccctgttcaacaattttccctttttccatgacaataatgcggtctgcattttttactgtagacagacgatgagcaatgattataaccgttctgcccttacatattttgtgcatattgcgcatgatgacatgctccgactcataatccagagcactggttgcttcatcaaaaatgagtattttagggttgttcaccagcgcccttgcaattgcgatgcgttgacgttgacctccggataatcctgccccctgttccccgacaatggtgttatacccctcacgcaaatcagaaataaaatcatgagcgcctgctaatttcgctgcataaataactttttcgacggacatgccaggattagccagtgaaatattatcaataatactgcgattaagcagcacattgtcctgcaacacaacccccacctgacgacgtaaccagttaggatcagccaacgcaagatcatgtccatcaattaatacctggccattttcaggaatataaaaacgttgaattaatttagttaatgtgctttttcctgaaccagaacgtccgacaataccaataacctccccctgcttaatactaagattgatattgtccaaaataaccggagaatcaggtttatagcgaaaccggatattacgaaaagtgatatcaccattaatttccggcaatgtcagtttcccatgataactttcagttggagagttaagcacatcaccaaggcgggtaactgatataccaacctgctggaaatcctgccagatttgtgcaaggcgaataaccggtgcaacaatctgaccagcaagcatattaaaagcaattaactgaccaatacttaaatccccggaaataaccaggtgtgctcccaaccataggttgatgatcataacagtcttttgtattaactgtattccttgttgaccaatggttgctaatactgtcactttaaagcctgcagcaacatatcctgccaattgtttgtcccatatgttcgtcatctgaggtgagactgccatagcttttatagtgttaatcgccgttactgattccaccaggaaagattgattatccgcattccgtgaaaacttatcatcaaggcgacgtcgcaaaatggggctaataaaaacagaccatgcagcataacaaggcagcgaaaataagatcaccagagtaagctttgggctgtaataccacattaccgcaaaaaatatgagtgaaaataataagtccaaaacagatgttaatgcctgtcctgtcagaaaattacggatctggtctaattctcttaccctcgcaacagtatcaccaacacgacgactctcaaaataagagatcggtagcgccagtaaatgccggaagagtttggcacccaactcaacatcaatccgacttgtactatgtgcaaaaatgtaagttcttaaaccgctgagtataatctcaaacaccactacaacagataatgcaacagtaataacattaagggttgaaaaccccctgtgcactaatactttgtccataaccacctgaaaaaaaaggggggttattaatgcaaataattgtaaaaaaacagatacaacaagggtttcaataaatattctcctgtattttataatggcaggaataaaccaggtaaagtcaaattttgccagtttcccggtaacagaagaacgggaagtaataagaataatatgcccctgatataacgcctcaaactcagactgttcgagaacacggggatttcgctgctccaaatcaaaaataagatatctgtttacttctttgctgattttagtcagaataaaatgacgtccatcctctctccagactaatgcgggcagaaaaataaagtttaatcgatcaattgttttttttacctgttttacctttagttctaaagatttcgcagcaagcaaccatgacgttaatcccagacctgtcccgtctgtatcaaatctatgtttaatttcttccgggttaacagagacgttatggtattgggctaaaatctccagggcgtataacccataatcaattttatgacaagaatccattatgactccaaaaaaaatagcaatcttatgtggcacagcccagtaagattgctatcatttaaattaatatattatgctgatgtggtcagggttattgagttccgtccatatgaaaaatcactggcattaccggacaactgcaataaagaagctgcagttctttcctctttaacatcgaagttacctgcagctgaaatgattttgctgatttcattaattaatggattaagatcaccctgacttccataggctaatgcatcattcccatacacataacttgccttattattacgctgttgatactcaagtgcctttttaagggaatcaggtgtgattatccggccacctttatcaaaaatctgctctatctggtgattagagatatcacctgactctttttcaaaccagttcctgaatgtaataccatttttatgaccaatggaaagaacattaccttcagctttatacatgatgaggtcattaccttctcgcttgaaggccacatcccggaaatcaatatcagccaaactgagtttatcctctttccccccatcatcatcaataatatgatgaccatatcctgacagataacgataaatatcattaccatatccgcctttcaggagatcatccccctctccaccatcaagcagatctgccccttcactgccgtacagcttgtcattaccttttccaccgaataatacattttttgcaagagaatttccctgaacctgaagctcatcatctccatctccgccgttcaggtaattattacctgctcccccaatcaacttatcgttaccatcaccgccatagagctggtcatctccgtttccaccactcagtgtgtcattacctttatcaccatataagcggtcattcccatcatttccttctataaggtcatcaccatccgcgccatggaagatatcagtaaatttactgccaaaaaacttgtcggcacgcgtggtcccaataagttcttccacggaatataagttatcagtctctgttaaatttttaccattgatatgagtgaattcataactccgatattgcgttttttcagttctttttccgactgaaacctcctgctccttcacaacttcctgtaaaaccttaacatcgccaccaagtacacgtgttaccgtgtaattacccgcttcggttgcttttgtgccatcaatggtcagataaccagtgtctgttttatcataataaacaacatcatgtcctttacctgcgtagatattggctgagccggcagataaaaagaccttatcatccccgtctcccaggtgtgactcaatacggatttcccgatactggttattaccgactgatgcatgctgaatcaggttagagtaatcatatacagcccccttgtcctgaacccccttcaccgtccatttatcaacacccttgactaataactcggtaatatattcatattttccggactgcctcctttcacgaatttcctcaccgggagttaataatggcgtaacaaatttcaataacgtagaagatttgctgtcagaaaggtcaatatttcctttcaatgggtcaaagacttgcttctggaattcatccggttttttctccagacgttttccttcttcataatagtcaatataacttttaccactgagtgttttgtctccatttctggtgacaccagctaactcacctatcagcgtatcccaatgttgctgggtaatgaggactgatctttcaacagaatactctttattatactgagataatattttaaagttatcttctaaaaatgcagcatggcgggcatcatatccattttcaaagtaatttttgccgtgttttttctcccattcagcaataacatcagccattttactggcaacatgttcaaacattgcctgctttgaagcctcaaggatacctgaaattatccccgtaacagcgcctaccagcgcgcttaccggtgcaccaaccagagatgtcgttgcagcagcactaatacctgaagatactgaagccagtacagtgcttatcgttgttaatgatgcatcaatagcccctgtttctttgtggaaagcagcaagtaaactgtcaccatcgtatccaagttttttgaatcgttgtgaatactcctctattttattggcacgtttaaacttatcggcaatggacaggaatgagaggggactaattgctagtgtcacagcagaagcaattaaaccggcagcagcagcagatgtagataacccctgtgcagcgcgctgtgcgataatatattgagaaataccttttccaacattacccagtactttcgttgttaattcaacacctgctgcagctttagttctggtatctgcatctgcattgctcagaatgaagcttgctgaaatcgcagataaaatacccgatacagtatctaaccctgcaccgatattatcaagattaggtaaattctgtaacttattaccaacaccgttcaggtgctttgtattggataatacacttcccagagtattgagttgttgagaaaatgagttaacattattattaaggctggcaactgtatccacaagttgattgattagctcaatactcgcttctgccatctcagaagaactgacattgccaccagatttttgtttctttatcagttcgtctattttcattgaggaaagtgcagtacccaggaaattttgaaacgttgacaatataccgcctgcctttcctaagttatcaccgatattttcagcaccgccacctaatttattacctgctttttgatacttttgcagtaatttgtctaattgtggtgcaaagatagtcactccccgttcggtgaggccaatgagtttctctgctgtgccgaacacctgtttagtaatcgccgtgccattcttttcatcatactggacttcaattcccagttcatctgccgtcctgacaaggtcattaaggcttgaaccctgtcctttataatctttagggataagtaaaatgagtctgtttcccgcattgcgggtttgctctgctgctttttttaatgcatctttcgtgctttgtcctgctgagtgcaatttatttgcagcggattgctttgcagactgcagtgtgcttttaatttgtgcagtggttattgttgtcatttaattacctcttaaccagttaatgaaaaattaaaatctgactttctttttacttcagttattaactcgtggtgatattgtttaaaaattttattcgctaactgtttatcaattttacctccatgaaattctgatactttaccaacatgagttttgggatccaccctgatggctctgaatagttcatcagggaatttttttcgcatatatttgtacagggcaccgttatccccgaaaggagcaatccagtcaatgaaccatttacgatcacctgaagtccagtcttctgcaactaatgaggtaacatcattaagatatttaatttcattttctaaacttaaattagcccaactacaatacgcgacagggtaatcatcccgggttaataaaacatattggttagcctgtattgcgggtaatacatttattgcaaacaaagatactggccagtttctgtgtagtggagaactggcccatagccaggatacatgcccaagaatctctaatggtttgtttatattcataataaactcactacaacttaaattatatgattaaatattgtggcaaaaatatgcctttatgtttcttccgtttaatgtcataactcgcattaatattaaaagcaagtttttattgcgctgactaacttaaaaataataactataaaaagcaagagtcaaaaaacatcaagcataaataattactcattcctgttctttgtacaacatctatataaaattattattacactctcttcaataagcatattctacagaactggtgtcttttattttacattaagattatagttacacaaatacaattttcttgttcagttccaaacaaattttggtaacgcctatctctctgaatgagagtccacgagttgtcttttgaactactcttctttatctgattttgtcagacaaaggtttagattaatctggctataccagttatcacacttcgtcaaattccagataatgaccaggtggatttgcccctatatttccagatacctgttatcacttaacccattactggcccgctgccgcagatattcccgtggcgagcgataacccagcgcactatgcggatgccattcgttataatgctcgaacgcctctgcaaggttctttgctgccgttaacccgtctggtttgggcatgatacttatgtaatcacgctttatcgttttcacgaagctctctgttattccgttactctccggactccgcactgccgtgttcttcggttcaagtcccaacatcctggcgaactgacgtgtttcattcgcccggtagcatgaaccattatccgtcagccactccactggagacgccggaagctcgctgccaaagcggcgttccactgctcccagcatgacgtcctgtactgtttcactgttgaagccacccgttgtgaccgcccagtgcagtgcctcacgatcacagcagtccagcgcgaacgtgacccgcagtttttctccgttatcacagcggaactcaaacccgtcagagcaccatcgctgattactttctttcacagccactctgccggtatgtgcccgtttcgatggcggtacagcgggttttcgctcaagcaacagcgcattctggcacatgatccggtaaacacgtttggcattgatcgcaggcataccatcaagttctgtttgtctgcgaagcagcgcccatatccgacgataaccatatgtgggcagctctccgataacatgatgtatacggcgaagcacatccgtatcatccgtgtgacggctgcggcggccgtccttccagtcatcggttcgtctgagaatgacgtgcaactgcgcacgcgacacccggagacaacggctgacgaagcttactccccatcctcgggcaataagggcgcgtgcgctatccacttttttgctcgcccatattcaacggcttctttaaggagttcattttccatcgtttttttgccgagcaggcgctggagctctttaatctgcttcatggcggcagcaagttcagaggcaggaacgacctgttctccggcagccacagcagtaagacttccctcctggtattgcttgcgccagagaaatagctggctggctgccacaccatgttgccgggcaacaagggagaccgtcattcccggttcaaagctctgctgaacgatagcgatcttttcctgtgtagtacgccgtctgcgtttctccgatcctaagacatcaatcatctgttctccaatgactagtctaaaaactagtattaagactatcacttaaataagtgatattggttgtctggagattcagggggctagtctaccaggattgtttatctcataaagcatgatgccaccacgcatcagaaagtaaaaatattagtgaatatgcaatcatactctaaaatatgaggaccaattttgttatgcacgcccaaatgctatagccatgacttaattccatccaactccgacaatgtttcatcttgcagtttgaatcagcatgctaccgcccttccggaaactacccgtaaaccgggaccagaatcttgaaggagtgagtttggatatggaaaattattgtacggcaagactattttttgaacatacttacctacagctataaggtgcactcccgcgctatacagcattttcaggaaatttgactttaatcggataacctaaacgcgatagcgcaagagcaacaacttaaaagcgataaccgctgacgcaaaatcaatctgttacgcatcgaaactggttaaataatacacttaacgtacagaattttccgatctccaaacagcccccttgaataacaaataaatcaaaccagagaccacttcaatttaaacataataaaataatgccctgtaagtattcaatgcagtgggcatatctattgctatactaattttgttctttttctatccattcctttctatcccattaccacacaaatgcgaataataattatcacccttgtaatcaagagggagggggatggacttcgcttggaattcggaaaataaaccacgttaaggctactttttatccaaatagcgtttgggaatcgccagaatggtgggacaacagcggttctggtggtaagcgcctcatctgaaccgtctggtctgtttcctccggctccacaaaaataatgtccatcgataggaatttaaatcccaaaaagattaaaaaaacacccaaaaacggatgtttattcaacactgcctgcgtgccatgagtgcaccgccatcaattaaatggatcttatcgagtgatactgtatatcactgatggttttttactccattcccctgaaaatggacgcaacttccccgatgcggctctcagccgcacacccgctgttgcgccagtggctcatgcatcaggaccagctctgtcagacggtagccccgcttcagccccgtaaaacgcatctgacatccgcacaggatgcactttagcgggtcaaccttcagtaaccgctgatacatccctctccacctgatttgcatcgccgtctttctcaccgtctccgttatgacgtacacaacatcttccagtaaccggcgcttcaccggactcaggaaaccgtagtacctcaccatacggaaccccttatccgccacatgccaggagaacctttccataaactcatcaccactcatcaccaggtattcttcccgttttgtccggtgactgttgtaacgcagaccaatttcatcctgaccagcatagtgctccagacggctcatcggcaccggcggttttttcaggtaagagccgaagtacaccgccacatgtgtggcgttatccatcaccctggnnnnnnnnnnnnnnnnnnnnnnnnnnnnnnnnnnnnnnnnnnnnnnnnnnnnnnnnnnnnnnnnnnnnnnnnnnnnnnnnnnnnnnnnnnnnnnnggtgactgttgtaacgcagaccaatttcatcctgaccagcatagtgctccagacggctcatcggcaccggcggttttttcaggtaagagccgaagtacaccgccacatgtgtggcgttatccatcaccctggatatgttgacattccagccgcggcggtaatgcgtgtccaggaagcaattccagtcccgtttgctgtttccttccactgccagttcatccggtatcaccagctccgggtatttccgggacagtagccgcgttatccggtaacgccacatgctcatcaccttacgggcgtaaaaatgaagatttttccaggtgtggcccgacgtcacaccaccggcagttgtcgataaatggatatgcggatgccactgctggtcacgcccccatgtgtggatcaccgtgaatatccccggctccacatctgtctgatggcagatttccagtatcacatccgctgcaatgcggctcatctctgccagtaaccaccggttgtggaacaccagggaccagtactggcagggaagtgtgaacacaatatgctgccacgggcagtcggggaccaggctcagcagatactgtatccactgtgcgccagccttcaccccgcagtgcggacaggagcggcttttacaccggaagcagacctttttggtgtggcaacagtccggtgacgaacagcaccattgcgtgtagcccatcagcgtggtcccgcatgccatgatttttgtcactgactcagtcaccaccggacgcactgaaccttccggctgtttctccagccagttaagccagcggttaccctgctgaaaaatatcggcaaaacggggaagcatcagacgggggggtaacgccatccggccagtgaactgtgccgcattccgggcagtacataccaccggcactgataccggcaagaatggttgcaaactcccgctccgtacagcgggctatttccggatacccttcgtcatcgacacgaacaaaccagaagaccagctttttgtttcctgcatccagaaagaacggaatacccaggtcagcgcagcactcaacggcatcgtcaaaattatcaaagcgcagaacttcagcgtcttcttcgtcaaaaaaatcatccggatgaagtttcacaacatagcggggaagtttgcttctttgtggtgcgggtttgcgtttacggggtttagctgaacgggccatataactacctgaaagacaatgacattatctttttttataacggtaattccagaccatgacaagccgcagccgccaggctgcctactcgggcaaggagatgggcttctctccccgactgtgtcgccccttcagggcacagactaaaggtaaggtggaacggatggtgcagtacacccgtaacagtttttacatcccactaatgactcgcctgcgcccgatggggatcactgtcgatgttgaaacagccaaccgccacggtctgcgctggctgcacgatgtcgctaaccaacgaaagcatgaaacaatccaggcccgtccctgcgatcgctggctcgaagagcagcagtccatgctggcactgcctccggagaaaaaagagtatgacgtgcatcctggtgaaaatctggtgaacttcgacaaacaccccctgcatcatccactctccatctacgactcattctgcagaggagtggcgtgatgatggaactgcaacatcaacgactgatggcgctcgccgggcagttgcaactggaaagccttataagcgcagcgcctgcgctgtcacaacaggcagtagaccaggaatggagttatatggacttcctggagcatctgcttcatgaagaaaaactggcacgtcatcaacgtaaacaggcgatgtatacccgaatggcagccttcccggcggtgaaaacgttcgaagagtatgacttcacattcgccaccggagcaccgcagaagcaactccagtcgttacgctcactcagcttcatagaacgtaatgaaaatatcgtattactggggccatcaggtgtggggaaaacccatctggcaatagcgatgggctatgaagccgtccgtgcaggtatcaaagttcgcttcacaacagcagcagatctgttacttcagttatctacggcacaacgtcagggccgttataaaacgacgcttcagcgtggagtaatggccccccgcctgctcatcattgatgaaataggctatctgccgttcagtcaggaagaagcaaaactgttcttccaggtcattgctaaacgttacgaaaagagcgcaatgatcctgacatccaatctgccgttcgggcagtgggatcaaacgttcgccggtgatgcagcactgacctcagcgatgctggaccgtatcttacaccactcacatgtcgttcaaatcaaaggagaaagctatcgactcagacagaaacgaaaagccggggttatagcagaagctaatcctgagtaaaacggtggatcaatattgggccgttggtggagatataagtggatcacttttcatccgtcgttgacatgaatagttatatactgtgtatatacgtggtaatgacggggtgataaatggcacaggttaatatgagtttaagaatcgacgctgaactgaaggatgcttttatggccgctgcaaaaagcatggaccgtaatggctcccagttaatccgggattttatgcgccagaccgttgaacggcagcataatacctggttccgtgaccaggttgcggcaggacgtcagcaactcgagcacggcgatgtgcttccccatgacatggtcgaatcctctgctgcagcatggcgggatgaaatgagcaggaaggttgccggtaaatgatggagatattctggaccatgctggccagccaggacaggaagcgcattcgtgagtacattgcggagcagaacctgatggccgccattgaactggacgaacggattggttattcagccagcagcctggccgggcagccgtataaaggccgcaacggtcgtgtggaaggtacccgggaactggttattcacccgcattttgttctggtttatgaggtcgacagccagtggggaaaagtgtatatcctgcgcgtattgcatactgcacagaagtggccatagaggggctgtccggatataaggagatgcaattaaccataaataatgatgagctggccaccagacgtgcgcaggcgattgccgaagacaggtgtttctcgaaaggacgtctgcgcgatgaattcagaatgaagccagcccccggtgctgagccggtgaaggggtttgagggccaatggaacgaaaacgtacgttaaggagataattcgttgtttatatttaaatttagagctctcagttccccttttaaaatatcctctggcaacgtgaatgtataatggcccaacatattgatatgcccgtgcatcaggggagatagccgagcgatatcttcatctataatttcttcgccattacggcgcatccagctcaacgcttcctccatatagagcgtgttccacagaaccactgcattagtaaccaggcccagcgcccccagttgatcttcctgcccttcacgataacgctttctgatctctccgagttgtccgtaacaaatcgcacgagccacagcgtggcggccttctcctcgattaagctgcgtcaggatccgccgacgataatcttcatcatcaatataattgaggagatatagcgttttgtttacacgccctacttccataattgcctgtgccagtcctgatgggcgcgagcttttcagtaaagagcgaatgagttctgacgcatgaattgtacccaacttcagcgaaccagcggttcgcatcatctcatcccactgactctccgcttttgacagatctgcatatcctcgggccaacttatccagtactccgtagtttgccgatttattcacccgccagaacaccgcctcacctgcatcggcaagccggggggaaaactgataccccagtagccagaacagaccgaaaataatatcgctgctacccgcagtgtctgtcatgatttcaactggattcagccctgtctgctgctcaagaagtccttccagtacaaaaatcgaatcccgtaatgtaccgggtaccacaatgccatggaacccagagtactgatcagatacgaagttataccaggtgatgcctcgtccagaaccaaaatattttctgttagatcctgagttgatggtcttcactggtgtgacaaagcgcatgccgtcagctgatgccacttctccacctccccaacgaccagcaagctccagtgtggactgaaaatcaaccaggcgggcattggcgctgaccagcgtttctgcacgaaggtaattctgtttcacccaactgagccgatggcgggtcagtgctggtatattgtgctttatcagcggctccagtccgatattacaggcttcagccatcaataccgcacataaactgatgtgcaaatcttgcgctcgagcaccagattcactgacatgcgcaaactcatgtgtaaatcctgtctgggcatctatctcaagtaacagttccgttaaatctaccggtgggagtagctgtttgatccgattatttagacgaagcaatgatggtggctcttcctgtttctccagacaactgatagtcagggatggatatttaccttcattacagatatgaacttccgcattcttttcaaatcgtgatgccacggctttccaggtctcatccagctgaatagccagttgttgcacacctttacgtccatcgacaggatgtcctagtgcccgacagacaggaatacgctgagtctgccatgtcagcgccagtgatataagacggtaattcaccatttggattgtccgctccacccaacatgttgtttccttaaggttctcacaccagaaaggacatcaacatgctgagcagagaggacttttacat

SEQ ID NO: 73 - DNA, 31166 bp, Escherichia coli
  source 1..31166: mol_type = genomic DNA
gccatgatcaaactcttcaatttaaaagtttgatgctcaaagaattaaacttcgtaatgaattacgtgttcactcttgagacttggtattcatttttcgtcttgcgacgttaagaatccgtatcttcgagtgcccacacagattgtctgataaattgttaaagagcagttgcgacgcgctttagcgcactgtcgcgaggtggcgtatattacgctttcctctttcagagtcaaccctgaatttcaggatttttctcttcaaccgaaccggctgtttgtgtgaagtgattcacatccgccgtgtcgatggaggcgcattatagggagttctccgcaggccgcaatagaaaaattgcagaaaaatgactgactgctgcattccccagcaaaaccccgctttatacctttttacgcacagagttatccacaatcatcaatgtaatttctgtatttttcccacggtaaccactgtcaaaattgtgatcaccattgaaagagaaaaattcgcgagcgttgcgcaaacgttttcgttacaatgcgggcgaaaaataaggatgccccgttaggggcgttagctgagtttttcgcgaaaaattcagctaacgctctctgtaatagtcaaatccaggggatttaccatgcaacaacgtcgtccaatccgccgcgctctgctcagtgtttctgacaaagccggtatcgtcgaattcgcccaggcactttccgcacgcggtgtggagctgctgtctacagggggcactgcccgtctgttagcagaaaaaggtctgccggtaaccgaagtttccgattacaccggtttcccggagatgatggatggacgcgtgaagaccctgcatccgaaagtacatggtggcattctgggccgtcgcggccaggacgatgccattatggaagaacatcagatccagcctatcgatatggtggttgttaacctgtatccgttcgccaagaccgttgcccgtgaaggttgctcgctggaagatgcggttgagaacatcgatatcggcggcccaacgatggtgcgctccgccgccaagaaccataaagatgtcgcaatcgtggtgaagagcagcgactacgacgccattattaaagagatggatgacaacgaaggatcgctgacgcttgcaacccgtttcgacctcgccatcaaagccttcgaacacactgccgcctacgacagcatgattgccaactacttcggcagcatggttccggcttaccacggtgaaagcaaagaagccgccggtcgcttcccacgcacgctgaacctgaacttcattaagaagcaggatatgcgttacggcgagaacagccaccagcaggctgccttctatatagaagagaatgtgaaagaagcctccgttgctaccgcaacccaggttcagggtaaagccctctcttataacaacatcgccgataccgatgcggcgctggagtgcgtgaaagagttcgccgagccggcatgtgtgattgtgaagcacgccaacccttgcggcgtggctatcagcaattctattcttgatgcttacgatcgcgcgtacaaaaccgacccaacctccgcattcggcggcatcattgcctttaaccgcgagctggatgcggaaaccgcacaggccatcatttctcgtcagtttgtcgaagtgattattgcgccttccgccagcgaagaagccctgaaaatcaccgccgccaagcagaacgtacgcgttctgacctgcggtcagtggggcgagcgtgttccgggtcttgatttcaaacgcgtgaacggcggtctgctggttcaggatcgtgacctgggcatggtcggtgcggaagaactgcgcgtcgtcacccaacgtcagccgaccgaacaggaactgcgtgatgcgctgttctgctggaaagtggcgaagttcgtgaaatccaacgctatcgtctatgccaaaaacaatatgaccatcgggattggcgcgggccagatgagccgcgtgtactccgcgaaaatcgccggtattaaagctgccgatgaaggcctggaagtgaaaggttcctcgatggcttctgacgcgttcttcccgttccgcgacggtattgatgccgccgccgctgcaggcgtgacctgcgtaatccagcctggcggttctatccgtgatgacgaagtgattgccgccgccgacgagcacggtattgcgatgctcttcaccgacatgcgccacttccgccattaatggagcaatagatgaaagtattagtgattggtaacggcgggcgcgagcacgcgctggcctggaaagcggcgcagtcgccgctggttgaaactgtttttgttgctccgggtaatgcaggcactgcgctggaacccgcgctacagaacgtcgctatcggcgtaaccgatatcccggcgctgttggatttcgcacaaaacgaaaagattgatctgaccatcgtcggcccggaagcgccgctggtgaaaggcgtggtcgataccttccgcgccgccgggctgaaaatcttcggcccaaccgcaggtgcggcccaactggaaggctcaaaagcgtttaccaaagatttcctggcccgccataagatccctacggcggaataccagaacttcaccgaggtagaacctgcgctggcgtatctgcgtgagaaaggcgcgccaatcgtcattaaagcggacggtctggctgccgggaaaggcgttatcgtggcgatgacgctggaagaagcggaagcggctgttcacgatatgctggcgggcaacgcttttggcgacgcgggtcatcgcatcgttatcgaagagttcctcgatggcgaagaagcgagctttatcgtgatggtggacggcgagcatgtgctgccgatggctaccagccaggatcacaaacgcgtaggcgataaagataccggaccaaacaccggcgggatgggcgcttactcccccgcgccggtagtaaccgatgaagttcatcagcgcaccatggaacgtatcatctggccaaccgtgaaaggcatggcggcggaaggcaacacctacaccggttttctctacgcgggcctgatgatcgacaaacagggcaatccgaaggttatcgaatttaactgccgctttggcgatccggaaacccagccgattatgctgcgcatgaagtccgatctggttgagctctgcctggcagcctgtgaagggaagctggacgagaaaacatccgagtgggatgaacgcgcttctctcggcgtggtgatggctgcgggtggatatccgggcgattaccgcaccggtgatgtgatccacggcctgccgctggaagaagtggaagacggcaaagtgttccatgcaggcacaaaactggcggatgacgagcaggtagtgaccagcggcgggcgcgtactgtgcgtcaccgcgctgggtcataccgtggcagaagcgcagaaacgcgcttatgccttaatgaccgatattcactgggacgactgcttctgccggaaagatatcggctggcgcgctatcgaacgcgagcagaactaacgcgacagttttgccaatagcgttttgcgcgtgatccctaactgacgggcggcttcggttttgttgccgcccgttttctccagcgccgccagaatcacctctttttccacttccaccaacggctgaatatcctgactttgtcccagcgggatcggcgtactggcaatcgccagcggcagctcgcgttcggaaatatattccccggtcagcagcaccactgcccgttccaccgcgttttccagctcacgaatatttcccggccagtcgtaatgaatcaacagatccatcgcctggggcgtaaaaccttttaccgccttgcgattacgctcggcaaagcgctgcagaaaatggccaaccagcagagggatatcttcccgccgttgccgcagcgatggtacttcaatcgccaccacattcaggcgatagtagagatcctggcgaaaacgcccggcattcacctctgcggcaagatcgcgatgggtcgccgcaatcagccggacatcaaccgagatagtctggttgctaccgacacgctgaacttcgcgctcctgaatcgcacgcagcagacgcacctgcatcatcggcgagatatcgccaatttcatcgagaaacagcgtgccgccgtccgcctcaacaaagcgcccttcccggcgtttatcggctccagtaaacgcccctttttcgtgaccgaacaattcagattccagcaaggattcgttgagtgccgcacagttgagcgttaccagcggtttttcgctacgtgcgctactggcgtgaatcgccctggcgaccagctctttaccggtgccggaatcgccgtggatcagtaccgtggcttccgatggcgcgacgagggcgatttcactgagcaggtgttgcatcgccgggcttttaccgaccataccgaactggctggcagtcaccgcaggtgtttcagcatcaatactgtgcgtatgcgcgagcgctttttccagcgtcgcctgtaggttatcgaaatccagcggcttgatgagataatccagcgccccagttttcagtgcctctaccgccgtctcgacgctggagtacgcagtcataatcagcaccggaattgccgggtttaacgctttgatctctttcagcgtggcgatgccgtccatctccgccattcgcacatcgcaaagcacaagatcaaaaacctgttcccgcacctgctccagcgcctgtcgcccgctgttcgccagcgcgacgttatagccccagccgcgcagtaaagcctgcaaaatagtgcagtggctaatgtcatcatccaccaccagaatatcgatattatcgtgcgtcatccttgtgggtccttacgcgtaatattgaccggaagccagagggtgaacgttgagccttttccctcctggcttgcgacctgaattgtaccaccgtgttgttcaacaatattatgcacgaccgccagccccaatccggtgccttcggctttggtggtgaagtacggagtgaagatggcttcaagctgatctgccgcaattcccttaccgctgtcggtaacgctgattttcacgcccgcgccgctttcgctgaccgtcacgctaatcacgccatgctgaccaatcgcctgaatagcattgagatagagattcaacaggacctgagtcagcctgtccggatcggcctgaatttccggtaatgtgtcgttggcggtaaagcgtaactggatctcccggctgtttgcatcctggcttaccagctgtaatgagtggttaatcagcgtgttgagatccaccgcctgcaaagccagatgcgttggcttaaccagttccagcaactcgcttaccacgcggtttaaacggtcggcctctttcgccatcacctgcgccagttgatgcgcttctccccctgcaggcgcgcgctcggcaaagtatttcgccagtcctttaatcgaggaaagtgggttacggatttcgtgggcaacgcctgccgcaagatgccccagcgccaccagcctctctttgcgcttcatttcatcttgtagaagctggcgcgagcgcagatagcggcgataccagaagaatgacaatacgcttgccagcaagaccgtcgccagggcgaagagaataatcagggtgtttctctgctcacgatcttcggcactcacaatattactggcgtcgaaagcgatgaaaattgcttgtggtgtcgcggcatactgctgcatatggcgcatccggtgcattccagcagcaaacatcggttgaaactggcgataaatttccagaacaggctcgccgtctgcgctatcgatccgccgccacgcttcttcatctcccggatgtaactgctgcatttcctgaggggaataaagctgttttcccaccatgccggagttgctatgcatcacgattgttccttgttcatccgtgaccgcaaaccaacgtactccaggctgcccggccatttcttccagtaaggcctgctgctgcgcatgatgcatgcgcatccccatgccgacgcgcgagccggattcaagagcgcgaataagtacactgcctttttccagcagcgtttgtctggcggcggcagtctcgcgcccataatcgcgaatcaccgtcaccgcaaacaaccctaccagcccaacaatgaccacggggaggatcgcgcttaaccatttagctaaggagtctttagaacgttgcataaaacgcatcttcttctttgcctgctcatccctttctgacagcagaaatcatgccatcttttatcagcgcttaccctgcgctgtaacacaaaggcttaagtttcaatgagtaaaaatgactcgctatccgcagcaggcgagtcatttttactcgtttatcatgccagattgcccgtcatatcagcgtttcatcgttggcacggaagatgcaatacccgaagtaagacaaccactggaggattaaccatgaaacggaacacgaaaattgccctggtaatgatggcgctttcagcaatggcgatgggatcgacatctgcatttgctcacggcggacacggtatgtggcagcaaaatgccgcgcctttgaccagcgaacaacagacagcgtggcagaaaatccataatgacttttacgctcaaagcagcgcactgcaacagcaactggtgacgaagcgttatgaatacaatgccctgttagccgcgaacccaccggatagcagcaaaattaacgcggtcgccaaagagatggagaatttgcgtcagtcgttagatgagttacgggtgaaacgagatatcgcgatggctgaagcgggtattccgcgcggagccggaatgggcatgggctacggcggctgcggtggtggcggtcatatgggtatgggccactggtaaatcagaacgttttctcgttgggttgccagcgacagaaatcagagtttgccactaacagtaattgcgaaccttcgggcgcttccagccatgccacgctgacatcaacagaagagcggctctggcggcgctcgatatgcgctatcgcctgcgaatctaaatcaggtttaatggtttgcccttcgcaggtggtcacggtctgttccatcgcatgccagcgcccctggcgcagcacgactctcccctgacgtaaggcatcgctaatctggcggatctgatcagcacgataacggtataaatcgatttggtcgttagaaagctgctgcttttccccatcggattcacgttgcataaagctcagatcaccgcgatcgtcaaaacgcgcgcgaatgttcaccggcggtttgctgtaaacattgatattgatgagcgtgaggttatcgccctgccagcgatactctcgcgtcgtggtatcgccactgcgccacgggctaaacacggcaagcagatgcacattatcgccgctgtcttttcgccagatgcgtaccgcgccctggtcttcagcaaatccactggcggtaaagggaggaagtgaagagttgtggctacaggcagtgagaaacagcgcacctgccagcatcaatgatcgacgccagaaagacaaaaggggtgaaaccaccccttcgttaaaactgttcactgccacgcaatcttacttaactgcgtctttcagtgccttgccagaaacaaatgccggtacgttagctgcggcaattttgatttctttaccggtctgcgggttgcggccagtacgctcagcgcggtggttcactttgaaggtaccgaaaccaaccagttgtacagcatcgccttctttcagagactcagtaattgcagccagagtggactccagagcagctttagcctgggttttggacagttctgctttctctgcaattacatcaatcagttgagtcttgttcataagttatccttacaatgtgtttatcgcttgctaagcatcgagtgcgacggaaatgccagaatagcactctcctgcatacacgcaccgatagccactttttttcgccccccaaatgtagaccagacggggggcgaaagggaagactccaggtacgacaaatcaggcgttaaatcacgttttctggtcttattgctgaaaaattataccaatattgctctcacccgcctcacgcaggtctgccctaaggccttttatcagctcgatatcgcgttcttcgcactcagctaaaagtcggaatatttcccactgaatgtcccattcttgctctacagctgggttttctttaagctcttcatcgctcatttcgcgaccagcctgagtcatttccagcatcgcaacggtcgtgatggaggtcttactcacttccaccgcgtgttcgagcgtttcaccactcaaacgcgaatggaccagttcacttaacgccacgcaggcatcgattgccggataaacgccgtacagatcgaaatcgtcggctgaaggaatcgcttcttcaaatttctccagttggctgtcgaaatttacttttgcgtctttaacggtcagcgtttcccagatgagatcgagaatacgacggtaaatttgcccatcaccaaaaccggtttgctggcagaacatggcgtaattggggtacatgcgttcgcataagcaagccatgaaagtgacatgctgccagctttccaggcgctccagacgcagatgaattgggttttgtaacatgttgagttctcaaatacggaaattatccgcagtttacctgaattagggctgatttgctgtatagcgcacgaacgccggacgttccgaggccaccgcgtccgcccagcgcgttggctccggcagacgatagcctttcatgcagcgttgtacccacgccagcgcgctgtccacgctgacccgatggccggtagcgataaacaacgggttacagcgcgctttgctgcgccagacccaggccagctgctcgcctttatccatcagtggggccagcgcgcccggttcgctggagagcggttcgaatttaccgcagagccgttttttcgccacgccgatcgttggcacatccaccatcaaaccaaaatggctggcgacgccaagacggcgaggatgcgagatcccatgaccatcgacaaacactaaatccggcttttgcgacagcatctcccacgctgccaggagcgcaggatattcgcggaaggaaagaaaacctggaatgtaaggcatggtggtggcgatgcgggccactttatactccaccagctcaagcgagggatatttcagcagcaccatcgccgctcgcgtcacttctccgccctgctcaaacccgacatcggctccggcgatcagatccggtggatctttatcgagtcgatcctcgcggatcacagaagaagccagttcgatttgttgagcgcgtaatgacgcgagatccataatcactccttagcggtgatactgttcagacagtcgatgcactgcctccacgaacacgccagcatgttctggcggcacatcctgatgaatgccgtgaccaaggttaaagacatgaccttcgccgtgaccgaaacctgcaagtatagtcgctacttcttcttcaatgcgggcaggcggcgcgtacagcatcgacggatccatattaccctgcaacgcgactttattgcccacacggcggcgcgcatcggcgatgtccgttgtccagtcgaggcccagcgcatcgcaaccggtttctgccatggcttccagccactgtccgccgcctttggtaaacagcgtgaccggtacgcggcgaccgtcgttttcacgcagtaaaccatcaacaattttatgcatgtaataaagcgagaactgttgataatcgcgcccggtaagcacgccgccccaggtgtcgaaaatcatcacagcctgagcaccggctttaatctgcgcattcagatacaaagtgacgcttttcgccagtttatcgagtagagcgtgcagcgcctgcggatcggcatacatcatttttttgatcacggtgaaggctttgctgctgccgccttccaccatgtaggttgccagcgtccacgggctgccggaaaaaccaatcagcggcacttcgcctttcagttcgcgacgaatggtacgcaccgcgttcatcacgtaacccagctcatcttccgggtccggaattggcagtttatcgacgtcggctttgcaggtgactggcgaggtaaaacgcggaccttctccggcttcaaaatagagccctaaccccatcgcgtccggcacggtgaggatatcggaaaagaggatcgccgcatccagcgggtagcgacgcagcggttgcaaagtcacttcgcacgccagctcggcgtttttgcacagcgacataaaatcgcccgcctgggcgcgcgtggctttatattccggtagatagcgacccgcctggcgcatcatccatactggagtgacatcaacgggctggcgcagcagcgcccgcagataacgatcgtttttaagttcggtcattttggctgttccttagtgcgtcaggcggtcagtgtatcatcactcatactctgcccgacacatcgccaccgtatcttctatcagacggcgcgctacggtgccgggcggcgggagtaacggcaaatcgtcatagcgataccagttcgcctcgagcaattctttcgggtcgatcacgatgtcgccgctgtcatattccgccataaacgcggtcattaaagactgaggaaacggccacggctgagaagtcacgtaacgcaagtttttaactttaattccgctctcttccatcacttcccgcgcgactgcctgctcgagggtttcgcccacttcgacgaatccggcaagtactgtatggacaccgttacgatggcgggtatgctgggcgaggaggatcgaatcatcgcgacggatagcaacaataatgcagggggcgatttgcgggtagtaacgctcacggcaatggctgcacagcatcgcccattcggttttgctcggatacatttcatgcccgcagtaaccacagtatttatgcgatcggtaaaactccgccagttgtacgcctcgtccggccagttgaaacagcccaacatcgagatcaatgacctgacgtaccgaccccatatcgtgacgccgctgctgttgtactaaccaaacaggttccccctgccattcgccgatttgtagtgcgcgctgacccacaagatcgaaatttgccgcttcgccatatggcaattctcccttcggcaaccataatttttgttcatggctgacgacccaccagccgtgatctaatttttcaattatacgatccatagctcttgcactacctttgcatcactggcatgtttaacatggtttttacatttctcactgagcagtttttgaatacaaacttgcggagtcaatcatgcttaaccagctcgataacctgacggagcgcgtcagaggaagtaacaaactggttgatcgctggctacatgtacgtaagcatctgctcgtggcttactacaatctggttggcattaagcctggcaaagaatcgtacatgaggctaaacgaaaaagcccttgatgatttttgtcagagcctggtcgattacttgtctgccggacatttcagtatttatgagcgcattcttcataagctggaaggcaacgggcaactcgcgcgcgccgcgaagatttggccgcaactcgaagccaatactcaacagattatggattactacgattccagtctggaaaccgccatcgatcatgataattaccttgagtttcaacaggttttatctgacatcggcgaggcgctggaagcgcgctttgtgctggaagataagctgattctgctggtgcttgacgccgcccgcgtcaaacatcctgcttgagttctgcgctgttaacgcgtaatttacattcaatgccccatttgcggggctaatttcttgtcggagtgccttaactggctgagaccgtttattcgggatccgcggaacctgatcaggctaatacctgcgaagggaacaagagttaatctgctatcgcatcgcccctgcggcgatcgtctcttgcttcatccgtcgtctgacaagccacgtccttaactttttggaatgagctatgtctgcaacaaaactgacccgccgcgaacaacgcgcccgggcccaacattttatcgacaccctggaaggcaccgcctttcccaactcaaaacgcatttatatcactggcacacaccccggcgtgcgcgtgccgatgcgtgagatccagcttagcccgacgctaattggcggtagcaaagaacagccgcagtacgaagaaaacgaagcgattccggtctacgacacctccggcccgtatggtgatccgcagattgccattaacgtgcagcaagggctggcaaaactacgccagccgtggatcgatgcgcgcggcgataccgaagaacttaccgtgcgcagttccgattacactaaagcgcggctggcagatgatggcctcgacgaactgcgttttagcggtgtactaacaccaaaacgcgccaaagcaggacgccgtgtcacccaactgcactacgcccgccagggcatcatcacgccggaaatggaattcatcgccatccgcgagaatatgggccgcgagcgcatccgtagcgaggttttacgccaccagcatccgggaatgagctttggcgcacatctgccggaaaatatcactgcggaatttgtccgtgatgaagttgctgccggacgtgcgattatcccggccaacattaatcatccggaatcggagccgatgattattggtcgcaatttcctggtaaaagttaacgccaatatcggcaactcggcggtcacctcttccatcgaagaagaagtggaaaagctggtatggtccacgcgctggggagcggatacggtgatggatctctccaccggtcgctatattcacgaaacccgcgagtggattttgcgtaacagcccggtgccgatcggtacagtgccgatctaccaggcgctggagaaggttaacgggatcgccgaagatcttacctgggaagcgttccgcgacacgctgctggaacaggccgagcaaggtgtggattacttcactatccatgcgggcgtactgctgcgctatgtgccgatgaccgcgaaacgcctgaccggtatcgtctctcgcggcggttcgattatggcgaaatggtgcctctcccatcatcaggaaaatttcctctatcaacacttccgcgaaatttgtgaaatctgtgccgcttatgacgtttcgctgtcgctgggcgacggtctgcgccccggttctattcaggacgccaacgatgaagcgcagtttgccgagctgcatacgctgggcgaactgaccaaaattgcctgggaatatgacgtgcaggtgatgattgaaggcccaggtcacgtgccgatgcagatgatccgccgcaatatgaccgaggagttagagcactgccacgaagcgccgttttacactctggggccgctaactaccgatattgcgccgggctatgaccacttcacgtcggggattggtgcggcgatgattggctggtttggctgcgcgatgctctgttacgtaacgccaaaagagcatctgggtctgcctaataaagaagatgttaagcaggggcttatcacctataagattgccgcccacgccgctgacctggcgaaagggcatccgggcgcgcaaattcgcgataacgccatgtcgaaagcccgcttcgaatttcgctgggaagaccagtttaatctggccctcgacccgtttaccgcccgcgcttatcacgatgaaaccctgccgcaagagtcaggtaaagtcgcccatttttgctccatgtgtgggccgaaattctgttcgatgaaaatcagccaggaagtgcgtgattacgccgccacgcaaactattgaaatgggaatggcggatatgtcggagaacttccgtgccagaggcggagaaatctacctgcgtaaggaggaagcgtgatgtatcagcctgattttcctcctgtaccttttcgttcaggactgtacccggtggtggacagcgtacagtggatcgaacgtctgttggatgcaggcgtacgtactctccagctacgcatcaaagatcggcgcgatgaagaggtggaggccgatgtcgtggcggcaattgcgctgggccgccgctataacgcgcgattgtttatcaacgattactggcggctggcgatcaagcatcaggcgtatggcgtccatttggggcaggaagatttgcaagccaccgatctcaatgccatccgcgcggcaggcctgcggctgggcgtttcgacacatgacgatatggaaatcgacgtcgcgctggcagcacgcccctcttatatcgcgctgggacatgtgttcccgacgcaaaccaaacagatgccttctgcaccgcaggggctggaacagctggcacggcatgttgagcgactggcggattatcccaccgtggcgattggcggtatcagtctggcacgcgcgcctgcggtgatagcaacgggtgtcggcagtatcgccgtcgtcagcgccattactcaagccgcagactggcgtttggcaacggcacagttgctggaaattgcaggagttggcgatgaatgaccgtgactttatgcgttatagccgccaaatcctgctcgacgatatcgctctggacgggcagcaaaaactgctcgacagccaggtgctgattatcggtctgggcgggctgggtacacctgctgcgctgtacctggcgggcgctggcgtcgggacgctggtactggcagatgacgacgatgtgcatttaagcaatctgcaacgacaaatcctctttaccactgaagatatcgatcgcccgaaatcgcaggtcagccaacagcgactgacacagttgaatcccgacattcaactgacagcattacaacaacggttaacgggtgaggcgttaaaagatgcggttgcacgggccgatgtggtgctcgactgtaccgacaatatggcgactcgccaggagattaatgccgcctgcgtggcactcaacacgccgcttatcaccgccagcgcggtcggatttggcggtcagttgatggtactgacgccgccctgggagcaggggtgttaccgctgcctgtggccagataaccaggagccagaacgcaactgccgcacggcgggcgtggttggcccggtggtcggggttatgggcactttgcaggcactggaagccattaagttattaagcggtatagagacacctgcgggagaactccgactgttcgacggtaaatcgagccagtggcgcagcctggcgttgcgccgcgccagtggttgcccggtatgcggaggaagcaatgcagatcctgtttaacgatcaaccgatgcagtgcgccgccgggcaaactgttcacgaactactggagcaactcgaccaacgacaagcgggcgcggctctggcgattaatcagcaaatcgtcccgcgtgagcagtgggcgcaacatatcgtgcaggatggcgaccagatcctgctttttcaggttattgcagggggttgaaatgttacgtattgcggacaaaacgtttgattcacatctgtttaccggcacagggaaattcgcttcttcacaactgatggtggaggcgatccgcgcttccggcagccagctggtgacactggcgatgaaacgtgtcgacttgcgccagcacaacgacgctatcctcgaaccgcttatcgcggcgggtgtgaccctgctgccaaatacatccggggcgaaaacagcggaagaagccattttcgccgcccatctggctcgtgaagcgttaggcacaaactggttaaaattagagattcaccctgacgcccgctggctgttgcccgatcccatcgaaaccctgaaagccgccgaaacgctggtacaacagggatttgtcgtgctgccttactgcggggccgatccggtattgtgtaaacgtctggaagaagtcggctgtgcagcggtgatgccgctcggcgcgccgattggctcgaatcagggactggaaacccgcgccatgctggagattattatccagcaggccacagtgccggtggttgtcgatgctggcatcggcgttcccagccatgccgcgcaggcgctggaaatgggggccgacgcggtgttagtgaatacggcaattgccgtcgcggacgatcccgtcaacatggcgaaggcatttcgtctggcggtagaagcaggcctgctggcacgtcagtccggaccgggcagccgcagtcattttgctcatgccaccagcccgctgactggatttctggaggcatcggcatgaaaaccttcagcgatcgctggcgacaactggactgggacgacatccgcctgcgtatcaacggcaaaacggctgctgacgtagaacgggcgctaaatgcctcgcaactcacccgcgacgatatgatggcgctgttatcgccagccgccagtggctatctggaacaactggcccaacgggcgcagcgtctgacccgtcagcgatttggcaacacagttagtttctacgtcccgctttatctttccaatctttgcgctaacgactgcacgtactgcggattttccatgagtaatcgcatcaagcgcaaaacgctggatgaagcggatattgccagggaaagcgccgctatacgggagatgggctttgaacatctgctattagtcactggtgaacatcaggcgaaagtggggatggattactttcgtcgtcatctccccgccctgcgtgaacagttctcttcactacaaatggaagtgcaaccgctggcggagacggaatacgccgagttaaagcagcttggtctggatggcgtgatggtttatcaggagacatatcacgaggcgacttatgcccgccatcatctgaaaggaaaaaaacaggacttcttctggcggctggaaacgccggatcggctggggcgtgcggggattgataagataggcctcggcgcgctaattggcctttccgacaactggcgcgttgactgctatatggttgccgaacatttgctatggctgcaacagcattactggcaaagccgttactctgtctcctttccgcgcctgcgcccgtgtactggcggcattgagcctgcgtcgattatggatgaacgccagttagtgcaaaccatctgcgccttccgactgcttgcaccggagattgaactgtcactctccacgcgggaatcaccgtggtttcgcgatcgcgttattccgctggcgatcaataacgtcagcgccttctcgaaaacgcagccaggtggctatgccgataatcaccccgagttggaacagttctcaccgcacgacgatcgcagaccggaagcggttgctgccgcgttaaccgctcagggtttgcaaccggtatggaaagactgggacagctatctgggacgggcctcgcaaagactatgagacggaatgtaagaacgtaaatttattccgagccgctacggaagatgaaaaacgcaaggttgttgaaagcgttctgtttttttatggtagtgccgtcagcaggaatgttgtccagggcgaaaagcttcttcctcgtttcgccctgcctttcttaaaaattccgtaatgcaaagtctgaagccatcgcctgttgagcaatgaaagagatctgattgtaagagagtaaatactcaactatgatagagacgaaaataagaacacatgttctcatcttccaggatgcagcagactgaagaaattcagacatcccgcaacctgcgattatcgcaaggtcaaggcaaagtccggtaatggcgttctgaataccagagataattctctggcgaaacccaccttaaggtgggttttgttattttgagggctgaggaagctgcttatttctcaataagttgtaggcaatggtgaaaaatttcactgatttacctttctgtttttcagaaatgggataagcgctagttacatgcaaacggagttttttcttttccctgaaagccctgaacgcaacaaagtaaaatgccttatctcctccgtctaagtccacctcaatcacggcatagctaccatacccggcatgaataacgttgctttctggcagcgccaaaatagttctttttaagtgtgtgcgcgctaagttataacggtgctggcagaagggacgagattctttaggcgcgtggtacattaacgattgtttttcttcgttcgtctgatgttcataatcttttgtgaagcagtgaagagagtaggtaacccaaaagcgatactctaaaggctctttgccctcatgatgctgaacgtagacagcctgatgagcatcaagaaatgataaatcacgaatatcaccatccggatgtccaaaaggtcgccacttttccacttcctgtttcattctcgttccttaagaaagttacacaggaatagtatcgaatccttgccgagtttgactcaattagttcagtcagtttcaggatattagtcatctctacattgattatgagtattcagaaattccttaaatattctgacaaatgctctttccctaaactccccccataaaaaaacccgccgaagcgggtttttacgttatttgcggattaacgattactcgttatcagaaccgcccagacctgcgttcagcagttctgccaggctggcagatgcgtcttctgcagtcacctgcggtgcagccggagcttcacccgcagcacggcgacgcatacgatcctggtggtacgcgtaaccggtacctgccgggatcagacgacccacgataacgttctctttcaggccgcgcagttcgtcgcgtttgcccgcaacggctgcttcggtcagcacgcgagtggtctcctggaacgatgccgcggagatgaaggactcggttgccagagacgctttggtgatacccagcagatcgcgggagtaagttgcacccactttgccgttcgcttccagttcgcggtttgcgatcttgacgcgagagtattcaacctgttcgccttccaggaagtcggagctgcccgcgttaacgatggtagctttacgcagcatctgacgaacgataacttcgatgtgtttatcgttaatcttaacgccctgcagacggtatacgtcctgtacttcgttaacgatgtaacgagtcacagcatgaacaccacgcagacgcagaatgtcgtgcggcgcttccggaccgtcggaaattacgtcaccacgttctacacgttcaccttcgaacacgttgagctgacgccatttcggaatcatctcttcgtacggatcgctaccgtctaccggggtgataaccagacgacgtttacctttggtttctttaccgaaggaaacgataccgctgatttcagccaggattgccggctctttcggacgacgtgcttcgaacaggtccgcaacgcgcggcagaccaccggtgatgtccttggtaccgccggattcctgcggaatacgcgccagggtgtcaccagagctgatctgtacgccatcttccagctgaacaatcgctttacccggcaggaagtactgcgcaggcatatcggtacctgggatcagaacgtcgttaccctgagcatcaacgattttcagtgccggacgcagatctttaccacctgctgtacgttctgcggaatccagaaccaccagcgaagacagaccggtcaattcgtctgtctgacgagtaatggtctgaccgtcgatcatgtcagtaaagcgtacaaaaccgcttacttcggtgataaccggcatggtgtgcgggtcccagtttgcaacggtttcgccgccagcaacctgttcgccatcgcctttcgccagtaccgcaccgtaaggtactttgtagctttctttggtacgaccgaattcgtcgatcagtttcagttcagtattacgggaagtgataaccagtttaccgctggagttcacaaccgacttcacgttgctgagcttgatgctacctttgtttttcacctggatgctggattcagcagccgcacgagatgccgcaccaccgatgtggaacgtacgcatggtcagctgtgtacccggttcaccgatggactgtgccgcgataacaccgattgcttcacctttgttgatgatgtggccacgcgccaggtcacgaccgtagcagtgcgcacatacaccaaagtcggtgtcacaagatacaacagaacgtacttttaccgcgtcgacagagttctcttccagcaggtcacaccactgttcgtgcagcagcgtgttgcgcggaacgaggatatcagcagtacccggcttcagaacgtcttcagcagttacacgacccagtacgcgatcgcgcagcggctctttaacgtcaccaccctcgataaccggagtcatcatgataccttcatgggtaccacaatcgtcttcggtaaccaccaggtcctgcgccacgtcaaccagacgacgagtcaggtaaccggagttcgcagttttcagtgcggtatccgccagacctttacgagcaccgtgggtggagatgaagtactggagtacgttcagaccttcacggaagttcgcggtgattggcgtttcgatgatggagccatccggcttcgccatcagaccacgcataccagcaagctgacgaatctgtgccgcagaaccacgcgcaccggagtcggccatcatgtagatgctgttgaaggaaacctgcttctcttcctgaccgtcacggttaatcacggtttcagtttgcaggttatccatcatcgctttggatacacgatcgttcgccgcagcccagatatcgataactttgttgtagcgttcgcccgcagttaccagaccagactggaactgctcctgaatttcagcaacttctgcttctgcctcggagatgatttcgtgtttcttctccgggatgaccatgtcatcgataccaacagatgcaccagaacgcgctgcataggcgaagccggtgtacatgatctggtccgcaaaaataacggtcggtttcagaccgagaatgcggtagcaggtgttcagcattttggagattgcttttttacccagcgcctggttgacgatggagtaaggcagacctttcggtacaatcatccacagaatggcacggccaacagtcgtgtctttcaggctggttttcgctactaattcaccgtttgcatctttttcatactcggtgatacgcactttaacgcgcgcatgcagagaagccagaccagagcgatacagacgttctgcttctttcgggccagtcagcaccatgccttcgcctttggcgttaacacagtcacgggtcatatagtacagacccagaacaacgtcctgagacggaacgatgattggttcgccgttcgccggggacaggatgttgttggtagacatcatcagcgcacgcgcttccagctgggcttccagcgtcagcggtacgtgaacagccatctggtcaccatcgaagtcggcgttatatgccgcacaaaccagcgggtgcagctggatagctttaccttcgatcagtaccggttcaaatgcctggatacccagacggtgcagagtcggtgcacggttcagcagtaccgggtgttcgcggataacttcgtccaggatatcccaaacgacagcttcttcgcgctcaaccattttcttcgcagctttaatggtggtagcaagaccacgcagttccagcttgccgtagatgaacggtttgaacagctccagcgccattttcttcggcagaccgcactgatgcagacgcaggtatggacctacggtgattacagaacgaccggagtagtcaacacgcttaccgagcaggttctgacggaaacgaccctgtttacctttgatcatgtcggccaaagatttcagaggacgcttgttagaaccggtgatcgcacgaccgcgacgaccgttatccagcagggcgtctaccgcttcctgcagcatacgtttttcgttacgtacgatgatgtccggcgcagccagatccagcagacgtttcagacggttgttacggttaatgacgcgacgatacagatcgttcaggtcagaagtcgcgaaacgaccaccatccagcggaaccagcggacgcagatctggcggcagtaccggcagaacggtcaggatcatccactctggtttgttaccagactgaacgaacgcttccagcagtttgatacgcttggtcagctttttacgcttggtttcggagttggtttcgttcagctcttcacgcagctgttcgcactcttgctccagatccatgctcttcagcagagcctggattgcttccgcccccatcttcgcgtcgaattcgtcaccgaactcttccagcgcgtccagatactgctcttcagtcaggatctgctgacgttccaggttggtcataccgccttcgataaccacataggattcaaagtacagtacgcgttcgatatcgcgcagcggcatatcgagcagcagaccgatacgggacggcagcgatttcaggaaccagatgtgcgcagtcggggaagccagttcgatgtggcccatacgctcacggcgtactttagtctgggtcacttcaacgccgcacttctcacagatgacgccacggtgtttcaggcgcttgtacttaccgcacaggcactcgtaatcttttaccggcccaaagatacgggcgcagaaaaggccgtcacgttctggtttgaacgtacggtagttgatggtttccggctttttaacttcaccgaaagaccatgaacggatcatgtctggcgaagccagagcaattttgatcgcatcaaactcttcggttttagtctgcgctttcagaaactttaataaatctttcacggatttgctcccgtcggagttagcacaatccgctgccgggttttaacccgacagcagtgacctgtttgagcgagaattactcgtcttccagttcgatgttgatacccagcgaacgaatctctttcaacaatacgttgaaggattctggcatgcccggctccatctgatggttgccgtccacgatgtttttatacatcttggtacgaccgttcacgtcatcagacttaacggtgagcatttcctgcagggtgtatgctgcgccgtatgcttccagcgcccacacttccatctccccgaaacgctgaccaccgaactgtgccttaccacccagcggctgctgagtaaccaggctgtaagaaccggtggaacgcgcgtgcatcttgtcgtcgaccaggtggttcagtttcagcatgtacatgtaaccaacggttaccggacgctcgaactgttcaccagtgcgaccatcgtacaggcggatctgaccggaagtcggcaggtcgccaagtttcagcagctctttaatttctgcttctttcgcaccgtcgaacaccggcgttgcgattggcatacctttgcgcaggttttcagccagacgcataacttcttcatcgctgaaggtactcaggtcaactttctgacgaacgtcagcgcccagatcgtacgcacgctggatgaattcgcgcagtttcgcgacttcttgctgctgtttcagcatggcgttgatcttgtcgccgatacctttcgcagccatacccaggtgggtttcgaggatctgaccgatgttcatacgagacggtacgcccagcgggttcagtacgatgtctaccggcgtaccgttttcatcgtaaggcatatcttcgatcgggttgatcttagaaattacacccttgttaccgtgacgacctgccatcttgtcaccaggctggatacggcgtttaaccgccagatataccttaacaatcttcagcacgcccggtgccagatcgtcgccctgggtgattttgcggcgtttcgcttcgagtttcttctcgaactcgtgtttcagttcgtcatactgctcagccagctgttccagctgattttgtttctcttcgtctgtcaggcccagctccagccagcgatcgcgcggcagtttgtcgagcttctcagcttcaacgccaccggctaccagcacagcacggatacggctgaacagacccgcttcgaggatctgcagttcttcagacaggtctttcttcgcctgtttgagctgcatttcttcgatttccagcgcacgtttgtctttttctacgccatcgcgagtaaagacctgaacgtcgataaccgtaccggatacaccgtttggtacgcgcagagaagagtctttaacgtcagaggctttctcaccgaagatcgcacgcagcagtttttcttctggggtcagctgagtttcacctttcggcgttaccttaccaaccagaatgtcgccaccggtcacttccgcaccaatgtaaacgataccggattcatccagtttggagagcgcagcttcacccacgttcgggatgtcagcggtgatctcttccggccccagcttggtgtcacgggacacacacgccagttcctgaatgtggatggtggtgaaacggtcttcctgaacaacacgctcggatacgaggatggagtcttcgaagttgtaaccattccacggcatgaacgctacgcgcatgttctgaccaagcgccagttcaccgaggtcggtggacggaccgtctgccagcacgtcgccacgttcaaccggttcacccagagacacacacggcatctggttgatacaggtgttctggttagaacgggtgtatttggtcaggttgtagatgtcgatacctgcttcacccggatacatctcgtcttcgttaactttgataacgatacgggaagcatccacgtactgaacgacaccaccacgtttagctaccgcagttacaccggagtcaacggcaacagcacgttccataccagtaccaaccagcggcttatcagcgcgcagagtcggaacggcctgacgttgcatgttcgcacccatcaatgcacggttggcgtcatcgtgttccaggaacgggatcagggacgcaccgacggataccacctgctgggtggatacgtccatgtagtcaacctggtcgcggctgaacaagctggattcgcctttgctacggcaagttaccaggtcttctacgaagtggccttcttcatccaggttggagttcgcctgggcgataacgtagttgccttcttcgatagcagacaggtagtgaatttcgtcagttacaacaccgtcggtcactttacgatacggagtctcaaggaagccgtattcgttagtctgtgcgtacacggacagagagttgatcagaccgatgttcggaccttcaggggtttcgattggacatacgcgaccgtagtgagtcgggtgtacgtctcgaacttcgaagcctgcacgttcacgggtcagaccgcctgggccgagtgcggagatacgacgtttgtgcgtaatctcagacagcgggttgttctggtccataaactgagacagctggctggaaccgaagaactctttcactgctgcggaaatcggcttggcgttgatcatatcctgaggcatcagggtatccagatcgcccagagacagacgctctttcaccgcacgctctacacgtaccaggccaacgcggaactggttttccgccatttcgccaacggaacggatacgacggttgccgaggtggtcgatatcatcgacttcgcctttaccgttacggatatcgatgagctttttcataacatcaatgatgtcgtctttgctcaggataccggaaccttcgatttcttcgcgcagcagagaacggttgaacttcatacgaccaaccgcagacaagtcataacggtcttcggagaagaacaggttctcgaacaggctttcagctgcttcacgagtcggcggctcgccagggcgcatcatgcggtagatttctaccagtgcgctcagacggtcgttagttgggtcgacacgtaaggtttcagagatatatgggccgtgatccagatcgttggtgaacagcgtttcgatacgcttgtgaccagactggctcagcttagccagcagatccaggctcagctccatgttcgctgcgcagatcagctcgccggtagactcatcaatatagtctttagcaaccactttacctgcgatgtactcaaccgggacttcgatcagtttgacgtcgtctttttccagctggcgaatgtggcgcgcagtgatacggcggcctttttctacgtacactttaccgttagcttcgatgtcaaaagatgcggtttcaccacgcaggcgttccggcaccagttccatctgcagcttgttatcacggatttcaaagataactttttcaaagaacaggtcgaggatctgctctgtggtgtagttcagggcgcgcagaatgatggtcgcaggcagtttacggcgacggtcgatacgtacgaacaggttgtccttcggatcgaattcgaagtccagccaggaaccacggtaagggatgatgcgcgcgttatacagcactttacccgaagagtgggttttacctttgtcggagtcaaagaagacgcccggactacggtgcagctgggaaacgataacacgctcagtaccgttgataacaaaggtaccgttgtctgtcatgagcggaatttcgcccatgtagacttcttgttctttaatgtcttttacggtgccttccggcgcttcgcgctcatagatcaccagacgcagtttaacgcgcagcggtgcggaataggtcacgccacggatttgacattcctggacgtcaaacaccggttcgccaaggcggtagctgacgtattgcagctcggaattaccgctgtagctctgaatcgggaatacggaacggaaagcagcttccagaccatactgcccttcaggatcttgctcgataaatttctgaaacgagtcaagctggatagaaaggagataaggtacatccagaacttgtggacgtttaccaaaatccttacgaatacgttttttctcggtataggagtaaaccatagggttcctcagctcgctgacaagtcgacccatctgtccattgagcggacagtttgtgcaacactattttgttgaccggaaaatggaacactttccgcaatgcctgttgctatcacgcttaaaccatttcattgcgatttacacagaacggacgtcctgtcgcagtatattaagtcgtcgatagaaacaagcattgaaaggcacagcagtagtcaaacagtgtgaaacgctactggcgccttacagcgcaaaaaggctggtgactaaaaagtcaccagccatcagcctgatttctcaggctgcaaccggaagggttggcttatttaacttcaacttcagcgccagcttcttccagagcttttttcagtgcttctgcgtcgtctttgctcacgccttctttcagagcagccggtgcagattctaccaggtctttagcttctttcagacccaggccagttgcgccacgtactgctttgataacagcaactttgttagcgccagcagctttcagaattacgtcgaattcagttttttcttcagcagcttcaaccgggccagcagctacagctacagcagcagcagcggaaacaccgaatttttcttccattgcagagatcagttctacaacgtccattacagacatagctgcaactgcttcaatgatttgatctttagtgatagacatttaaattgttcctgaatatcagaataagtttatacgtaagcgaatgcgttaaaaagataactgcgattaagcagcttctttcgcatcgcgtacagcagccagagtacgaaccagtttgccagccgaagcttctttcatggttgccatcaggcgtgcaattgcttcttcgtaggtcggcagagttgccaggcggtcgatctgagacgccgggatcagctcaccttcaaaggcagcggctttgacctcaaattttgcattcgctttcgcgaactctttgaacagacgagcagcagcgcccgggtgttccatagagtatgcaatcagggtcggaccaacaaacgcgtctttcaggcactcgaacggagtaccttcaacagcacggcgcagcagggtgttacgaacaacacgcatgtatacgccagcttcgcgacctgctttacgcagttcagtcattttatctacagttacgccacgggaatccgcaactactgcagacagcgcgcctttggctacttcgctgacttcagcaacaatcgcttgtttgtcttgaagatttaaagccattagctttgctcctggatgtttgccagagaaaatctctggaactcacttcactcctccaaacggagagagcgtcttaattacggtgagcagaaacaagccagaatataaaagaataatcttagcgttctgtcaccgtctacgcaggggattaagtttcttgcgaaactcctgcggtcttcgacggaggcctggataggccaggctccaacgaacaaatcttttctatccgtcgctattcaacttgtggcggcgttggcttccttcattcgcaccagtcacatagttagctatgctcctggcgactcactcagttgccgccttgccacaacccgaatatctcggatatacgtctgcattaagcattatacgtgggggtaagattgtagacaaaatcaccgcccacgtaaaggcattagtttacagaagcgctcaggccagcctggtcaactgcaacacctgcacccatggtggtggagatgctaactttcttgatgtacacgcctttcgcctgagtcggttttgcttttttcagcgcaaccagcagagcttccaggttttctttcagtttgtcagcgtcaaagtccactttaccgatggtggtatggatgatgccgtttttgtcgttacggtaacgaacctggccagctttagcgtttttaaccgcttcagcaacgttcggtgttacagtacccactttcgggtttggcatcaggccgcgcggacccagaacctggcccagctggccaacaacgcgcattgcatccggagaagcaataacaacgtcaaagttcatttcgcctttcttgatctggtcagccagatcttccatacctaccagttctgcgcctgcagctttagcagcttcagcgtttgcaccttgggtaaatacggctacgcgaacggaacggccagtaccgtgcggcagtacagttgcaccacgtacgttctggtcagatttacgagcgtcgatgccgaggttaacagctacgtccacgctttctacgaatttagcagtcgccagctctttcagcagtgcgatagcttcgttgatgtcgtactgtttggttgcatcaactttctcgcggataacacgcatgcgcttggtcagtttagccatttcttagtcctccactaccaggcccatggaacgtgcagtaccttcgatggagcgagtcatcgcttcaatgtcggcaccagtcatgtcggcagctttggtctgcgcgatttcctgcagctgagcgcgggaaattttacccactttgtctttgttcggcttaccggaaccagacttgataccagccgcttttttcagcagaactgctgccggcggggtcttggtaacgaaagtgaaagaacggtcagcgtaaacggtgattactaccggaatcggcagacctttttcgatggaatcagtttttgcgttgaacgctttgcagaattccatgatgtttacgccctgctgacccagagccggacctactggcggactcgggttagccataccagctgcaacctgcagcttgacataggcttgtactttcttagccattataaattcctcaagttgggtaataacgcctctgagaggctccccgtgatataaaaaatcgttttacgggcaaggcccataaaaacaaaaggcgcgaaattgtattccaatctcacgccttgtgcaacgattaaatcgccgcttttttgatcgctgggttaggctttttcaacctggctgaagtccagctctaccggggtcgcacgaccgaagatagaaacagacactttcagacgagatttctcgtaatccacttcttcaacaacaccgttgaagtcagcgaacggaccatcattaacacggaccatttcacccggttcaaacagcgttttcggacgcggcttatcaccaacctgctgcaggcggttcataatcgcatcgacttctttatcgctgattggcgcaggacgatcggaagtaccgccgatgaagcccatcacacgcggtacgctgcgcaccaggtgccagctcgcgtcgttcatcaccatctgaacgaggacgtagccagggaagaatttacgttcgcttttgcgacgctgaccgccacggatttcaaccacttcttcggttggtaccatgacttcaccaaacaaatcttccatgttgtgtaatttgatatgctcacgcagcgacgttgctacgcggccttcaaaaccggaaaacgcctgaacgacgtaccagcgctttttaggagcttcagacatctcagaacctcaggccagtgataaaggataccaggcgaaccagaataccatccagtccccacaggatcagtgacattactgcggtaaccgcagccacaatcagcgtggtgtgcaatgtttcctggcgagtcggccaaatgaccttacggacttcggtacgcgcttcacgggcaaaagcaacggtagctttaccttttgtcgttaacagcgcgacaccacccgctgcagcaatcagaattactacggccagcgcacgcagcggcagcataatgtcgcgataaaggtagttgccgacaatcgccaccaggagcaatgccaccacaacgacccacttcatcgcttccaggccgcgcccgcttccttgagcttcggtattcgcactcataaaccaacctgtcagaagttttctacaaacattttcaccccgcgatcgcgaggcaaaccaaatcgaaacgcgtattagcttttcggattatacgccctcaacagagcctgtctcagcaatgattatgacaaagaaaatcactgatgagccaggttctggtacgaaagcgtgcaaaaagggcatcaaatgatgcccttttagtgcgcattgcgtcaaatgttatcggcaattagctcagaacttttgctacaacgcccgcgccaacggtacggccgccttcacggattgcgaaacgcagaccgtcgtccatcgcgatcgggtggatcagggtaacaaccattttgatgttgtcgcccggcattaccatctctacgc

SEQ ID NO: 74 - DNA, 30234 bp, Escherichia coli
  source 1..30234: mol_type = genomic DNA
aaaatatcgagttcgcacatcttgttgtctgattattgatttttcgcgaaaccatttgatcatatgacaagatgtgtatccaccttaacttaatgatttttaccaaaatcattaggggattcatcagggcgctgcgtcccttcccacacgcaactggtcgcgccgcagcgttgcagaacactctacaactgggtctgtgcttcctcgcaagtctggtagtttcctggctgatcagtatcagcacgccattgctcaccaccaccagcgtgatgttatcaacagtagtgctggtcgctctgggttacatgatgcaacgttgtgaagaagttggctgccagaatcatggcaatgccgaagtcgctcatagcgaatcacactgatctatatcgatatacttatacttaggctgctaacaaaattttgttgtatgattgaaattagcggcctatactaatttcgagttgttaaagctacgataaatattatgtttttacggggacaggatcgttcccgactcactatggatggtcatttcggcaaaggttcctcctttccctctgttctacgtcggattatagactcgcggttttttctgcgagatttctcacaaagcccaaaaagcgtctacgctgttttaaggttctgatcaccgaccagtgatggagaaactatgagttcatcgtgtatagaagaagtcagtgtaccggatgacaactggtaccgtatcgccaacgaattacttagccgtgccggtatagccattaacggttctgccccggcggatattcgtgtgaaaaaccccgatttttttaaacgcgttctgcaagaaggctctttggggttaggcgaaagttatatggatggctggtgggaatgtgaccgactggatatgttttttagcaaagtcttacgcgcaggtctcgagaaccaactcccccatcatttcaaagacacgctgcgtattgccagcgctcgtctcttcaatctgcagagtaaaaaacgtgcctggatagtcggcaaggagcattacgatttgggtaatgacttgttcagccgcatgcttgatcccttcatgcaatattcctgcgcttactggaaagatgccgataatctggaatctgcccagcaggcgaagctcaaaatgatttgtgaaaaattgcagttaaaaccagggatgcgcgtactggatattggctgcggctggggcggactggcgcactacatggcatctaactatgacgtaagcgtggtcggcgtcaccatttctgccgaacagcaaaaaatggctcaggaacgctgtgaaggcctggatgtcaccattttgctgcaagattatcgtgacctgaacgaccagtttgatcgtattgtttctgtggggatgttcgagcacgtcggaccgaaaaattacgatacctattttgcggtggtggatcgtaatttgaaaccggaaggtatattcctgctccatactatcggttcgaaaaaaaccgatctgaatgttgatccctggattaataaatatatttttccgaacggttgcctgccctctgtacgccagattgctcaatccagcgaaccccacttcgtgatggaagactggcataacttcggtgctgattacgatactacgttgatggcgtggtatgaacgattcctcgccgcatggccagaaattgcggataactacagtgaacgctttaaacgaatgtttacctattatctgaatgcctgtgcaggtgctttccgcgcccgtgatattcagctctggcaggtcgtgttctcacgcggtgttgaaaacggccttcgagtcgctcgctaaaggctattctatcgccccctctccgggggcgatttcagatcaggcttctgtacctggttgattcatggcattttctcgtgccgccagcacacgttctaccgtatctaccactgcctgagtttgtggatcaatttcaatgttgacgcgtgcgccgagttttttcttcccaagagtcgtgcgttccagagtttccggaattaaatggacgcaaaaacgcgttggcgtgacttcgccgacggtcaggctaataccgtcgatgccaataaatcctttgtacaggatatatttcatcaactgactatcctggactttaaaccagatctggcgattattttccgaggttaatattttcgccacttcagcggtggtcataatatgacctgacattaagtgtccgccaatttcgtcactgaatttcgccgcacgctcaacgtttacccaatcccccacttttaaatcgccaagattggtaatgcgtaacgtttctttcatcaggtcaaaactgacatggttgccgttaatttccgtcacggtcaggcagcaaccgttatgcgccacggaagcacctgtttccaggccgtccagcatgtggtcgggtaactccaccacatgcgtacgaaaatttggtttctcgtcaatcgacaccagttttgcggtgccctgtacaatccccgtaaacatacttacaactcctgaaatcagttaagacattctgttcagcacaatagcaggtggcaaacgcccttaccagtgaaggggtaagaatgactattttttcactggagaattaataaatcctcgctacaatagactgaatttcccctgcttcttctttttgctgcccattcaggcggctttttagtctctcatataactacaaataaaaggtgttcacgtgcagaagtatatcagtgaagcgcgtctgttattagcattagcaatcccggtgattctcgcgcaaatcgcccaaactgcgatgggttttgtcgataccgtgatggcgggcggctatagtgccaccgacatggcggcggtcgctatcggtacttctatctggcttccggcgatcctctttggtcacggactgctgctggcattaacgccggttatcgcgcaattaaatggttccggtcgacgtgagcgcattgcgcatcaggtgcgacagggcttctggctggcaggttttgtttccgttctcattatgcttgtgctgtggaatgcaggttacattatccgctccatggaaaacatcgatccggctctggcggacaaagccgtgggttatctgcgtgcgttgttgtggggcgcgccgggctatctgttcttccaggttgcccgtaaccaatgtgaaggtctggcaaaaaccaagccgggtatggtaatgggctttatcggcctgctggtgaacattccggtgaactatatctttatttatggtcatttcggtatgcctgagctcggtggcgttggttgtggcgtggctactgcggcggtgtattgggtcatgttccttgccatggtttcttacattaaacgcgcccgctccatgcgcgatattcgtaacgaaaaaggcaccgcgaaacccgatcctgcggttatgaaacgactgattcaactcggtttgccgattgcgctggcactattctttgaagtgacactgtttgccgtcgtggctctgttagtgtctccgctcggtattgttgatgtcgcaggacaccagattgccctgaactttagttcactgatgtttgtgcttccaatgtcgctggcggcagcggtaactatccgcgtaggttatcgtctgggtcagggctcaacgctggatgcgcaaaccgctgcgcggaccgggcttatggtgggtgtctgtatggcaaccctgacggccatattcacggtttcactgcgggagcaaatcgccctgttgtacaacgacaatcccgaggttgtaacgctggctgcgcatttgatgttgctggcggcggtatatcagatttctgactcaatccaggtgattggcagtgggattttgcgtggttataaagatacgcgttccattttctatatcacctttacggcttactgggtgctgggcttgccaagcggctatattctggcactgaccgatctggtcgttaaacctatggggccagcaggcttctggataggctttattattggcctgacgtcggcagccattatgatgatgctgcgtatgcggttcctgcaacgtctgccgtcagttatcattctgcaacgagcatcccgctaataaagacaaggcgcaaccttcacgggttgcgcctgtgtttttacgcaggctggagcgttgcgccaatcccgtcttcgtctggctgtaatttcagagcgttgcacagagtttgccgactggcatctgttatctcaacgtgtatatccccggtaacttcccctttcacattgatgaagtcaggtgagatttctttcgcactggtttgcaggcaaatcgctccctctccgcgcaggcgtttcactttcagttgcacatgcgttgccgcaccagtgatcagccacagttttccgccgttcagattgatgttaccaacactaaaagtgacactgtcaccttttaccgtactgccgtcgagaatcaacacaccgccctgctgtacagtaatcgttgattgttgcagatctgcgccatagccaataatcattgaagcgccgtccagtaatgcaacactcccggtcagttcaaccggtgcgcgatcttcctctacgacaaaattttcgtccgcgctggtgggtgacaacaggatcactgttccaccttgtattaccgcattttccagcgtaccggcatgcacttcagcccgaccacccacattcacggacaggttttgcgtcttaccggaactgtagagctgaaggccatccgtccccagacgataaatggatccattctcaacaatagtgtcagagtcttcaccaccgagattattcatggtgccaccagcaagcaacgtatcactggctttcccggccagcataaaaacgccgccctgattaatctcacaattgctggcttccccacctggatacaccaacaattcaccaccttcatctaccacgaccgctgaggttgtcccattaaccaacaggccgccctcttgatcgagaatgattttttccgcgcgatgtccttccagtacacgcaggttaccgccattttccagcaacaaaccgcaggcataaccctgatcaacgctgaattcaccttcgggatggcggccattaaccgtagcgagcgtagagagactaattgcgcctccctcggactgaacaatatctgtggcaatggcaccgtcgctgaccgatagcgtgccattgttaccgtactgtgtgcatttggcgatcccaccggttgccactttcaaccagccagcccccgtgaccacggtattttcggctcttccgccagcttcaacaatcaactcgccttcagtaagttgcgtcgcgccaatgacctcgccggtcttaacaatttgcacattcccgtcgctcatcaagtttttcgcatcagatcccatgatttattcctttgctgcatctgtgtgcctttattgctacctaagtgtaaaggctacggaggatttatccacgacagatttgagatggtggcaaacaactctgtttaaactctgatacacgaattattgggttgtatcagatgtaaatgcgatcctgaataaaaatcgcccttgcaaatcaacaaaatatagccaatttgcttaaaagctctgcaaacggtcgaaatagcgcagaaaattacgttttgcctcttgccaccttcccactctgccgctaatattcgtccccgttgtcacctacaacgttgcgttcatagctcagttggttagagcaccaccttgacatggtgggggtcgttggttcgagtccaattgaacgcaccatcctgcgtccgtagctcagttggttagagcaccaccttgacatggtgggggtcggtggttcgagtccactcggacgcaccagattttcttaatctggtcttctcctttttccctctgtttcttctctgtatccaatacgttaaaagatttacactgtcttcgtatgcgttatcagaaggagaatcgctatggcaactttgttacaacttcattttgcttttaatggcccatttggcgacgcaatggctgagcagcttaaaccgcttgctgagtcgattaatcaggaacctggttttctgtggaaggtatggacagaaagtgaaaagaaccacgaagccggtgggatctatctttttactgatgaaaaaagcgcccttgcctatctggaaaaacatactgcccgacttaaaaatctcggcgttgaggaagttgtcgccaaagttttcgatgtcaatgagccactgagtcaaatcaatcaggcaaaactcgcctgacagaatttaatcaagggcggttagcgcccttttcatccctgtctgaaatttctcaaattctaaaaatctcaaccaaacttatctgataacactaaattcgaaagaatgcgtacaggtaagtaacaatgaaaaaaattgctattgtgggtgccgggcctacggggatctacaccttattctcgcttctacagcaacaaactccactttctatttctatcttcgagcaggctgacgaggccggtgtcgggatgccatacagtgatgaggaaaactcaaaaatgatgctggcaaatattgccagtattgaaataccgccgattaattgtacgtatctcgaatggctacaaaagcaagaagccagccatctccagcgttatggcgttaaaaaagaaaccttgcacgatcgtcagtttttaccgcgaattctgctgggcgaatatttccgcgatcaatttttacgattagtagaccgcacgacagcaaaaatttgcagtggctgtttatgaatcatgccaggttaccgatctgcaaattacaaatgctggcgtcatgctcgctacaaatcaggatttacccagcgagacgtttgatttagcggtgattgccacgggtcacgtctggcctgatgaagaagaagcaaccagaacgtattttcccagtccgtggtcaggcctgatggaagcaaaggtcgatgcgtgtaacgtgggtattatgggaacatccttgagcggactggatgcggcaatggcagtggctattcagcatggttcgttcattgaagatgataaacaacacgtcgtttttaaccgcgataacgcaagtgaaaagctaaatattacgttgatgtcgcgcacgggtattttacccgaagccgatttctattgccctattccctacgagcccttacacatcgtcaccgatcaggcattaaatgctgagattcaaaaaggtgaagagggccttttggatcgggtatttagattgatagtagaggaaatcaagtttgctgatccagactggagccaacgcatagccttagagagcctgaatgtcgattcctttgctcaagcctggtttgccgagcgcaaacaacgcgacccatttgactgggcagaaaaaaatctccaggaagtcgaacgcaataaacgagaaaaacatactgttccctggcgttatgtcattctgcgcctgcatgaagccgtacaggaaattgttcctcatctgaatgaacacgaccataaacggttcagtaaaggccttgccagggttttcatcgataattatgcggcaatcccttcagagtctattcgtcgcctacttgccttacgtgaagcgggaatcattcatattctcgccctcggtgaagactacaaaatggaaattaatgagtcgcgcaccgtcctaaaaacggaagacaacagctactcgtttgacgtttttattgatgcccgcggacagcgtccgcttaaagtgaaagatattcctttccctgggctacgcgagcaattacagaaaacaggggatgaaatccctgatgttggcgaagattatacgttacagcaacccgaagatattcgtggacgcgtagcgttcggcgcgttgccctggttgatgcacgaccagcctttcgttcagggacttacggcatgtgcagaaattggtgaggcgatggctcgggcggtcgtaaagcctgcatcccgtgctcgtcggcgtctttcgtttgattaaaggtaaagctatcagcactcaacaaactgatgctgttcattaagacgatagcggactccggttcgaatattgttttcaccttcaatggcgacggcgaagcgaactctttcgccgtcatgatatgccagtgcggcgcttccccctggcccgagaataattgagtcgaccacgcccgtgctcactaccgttgaattttcaccgctggcaatgatgtgtacattgtcgccgctgttggcaattctggcgtttgcgccaaagctggcgatttgcaccaggtcaccattactggcgacatgacaccgttcacccaatgtacaaacgcgtactcgcattccggtattcgcaatccgactactatctccagcgctgcttatccgcgaagaattaccggttacagcaacccgtgcgcgttcaccggagctgccaatgtgactgttaaagccgacacttccaatccgcacgctataacccatactggcaatttgcgcggcatacccagcggttgcgattcgggcgttatcctcacaacagccgatgcgagcatgatcgtcgctgcgggcaaactgactgcaaaatggtatctctccggggtctgtggccagtttttgcatagaggaaacttcctgatgcgcgaagttttcatccgccagccattttttccacgcatactcaaccagactctccgcccagtccgtatatccttcctcaatcagtgcatgatgaatatcggcataactaccgccgcgtgggaaatggcgcaggaaccagcgatacatcaccgctccgatacgccattctcgcaggtctgctcgtgtaatgatcattcgttagtgccggtgatagccatcgaccatgcttttaaaggtttcgtgtggcgtacgccccgtggtgcaaagataaagatgaccgaagataaaaaagaggcttataaatgccagagcaaaatgcgcctgcaataaccagtatcttacgccaggaaacacatctcccacggcttgcggatagagacacagcagccccgtcaatagtaacaacggcagcaatccatacataacaccaacataggcgacctgctgtaagggattaaatttagactgggttgttgccgggaaaggatgttcttccccctgcataatgccaaacaaataaaatcgcgtttgttttgccgctcgctccagccacccctgacgacgaatgcgatagtggtgaccattacccccaacggcattgatcagcacaaagccgagccagcatgcgagtaacaaaaatccgcaaacttcatgcaccgcaaccagacttttaaccgcagttgcgcccaccagcgcaaagtgatttatcagcccacttgccagcaacaatacaaagagtaacgcattcgaccagtgccataatctgaccgctttgcagtaaagataaatcttctcaccataatcggtgactgatttcttcacgccacgagcacgaagcaaggcatgcagccccagcaccaaccacatcccaaccagcaatactccggcaatgatcaaccacaccggccaaaattcgggagtgaactgtggcacatagttcgctaactggctctgaaactgttcagcatgttgcgacgggttcatacattttcctttttaatcaaatgttgaccgaaccggcgatacagatgcggtttcccggcaccaggtagctgatattgatagtatttattttgctgcaaccacgcctgaatttctgggctatcttcgcgaccaaagatcaatgcgtgttccgggcaggcgctgacgcaaatgggcggaaagccttttgccagtcgggactcagcgcagaaatcacatttatctgccactttagtgacagggttaaggtagcgaacctggtacggacaagcgccaatgcaataactgcagccgatgcactgcgatttttctacccgcacgatcccctgctcatcacgccacgacgcccctgtcgggcatacgtcgatgcacggagcatcttcgcagtgctgacatgactggcgaaaaaagtgatactgcgtttcgttgtcgttatcggtgactggaatgtgtgctatcgataaacggcttccctgagcggggacgtggttagttttacggcatgcgcgggcgcaaatattacagccattgcaccgtgactcgtcatgaatcatggcataccgaacttccttttcttgcctcgtgttcgctaacagagaagacgcagaaccagtaaaaaagattactgttcccatccccagaacaaatttgcgtcgagtgaaggacatctgattatcccctaatgcagtggctgcaactgtccaccctatccatgacatctccctgaaatttcaggggttctgaaactgctctacctcgaaccattcgcataagccataagccttgccataggtcataaatcgctcgctaaacaagtacaacaccgccgtcgatgactccacctgccgtatatcggcatattcaggtgcaacatccatcgcggcgatcgcggcttcaatctgcgcttcctggaagtaatatggcgcttgcatcagcatggcgactttgtaaggacgaggatatgtctggcactcaaaacgaacggcgtgtgcaatggcgcgacaaatgtcctgctccacaacttgcaaagacatcgccgcgtagttttcactcatggcctgcgttgagtaatagtaatcatcctggcttcccgtcatacaagcgatatcagcgtagtctccgttctgcttaatgctttccagcaaaactgacagctcctcttctgcaaccgaatagggtggcgagagaaacacggcgcgcgccaccagctgcccagccgcagaatgctggcgaatgaactctgccaggatttcagccggttctggttcggttaccgtatcaacggggtgacgcatcccctgtaaccattgccgcttcgcctcgtcaacttcgctgactttcgctaacggcaattcatcccgatggttcatctcacccattccttacacaggcagtagattgtgtgctgccagatcggcggcaatatcttccagccccagacgctgcaatgtttcgcgggtgggacaaccaagctgtggatcccagcccatttctttgtagaacatcgtgagcgaagcatgcatatcgtcacgatccattttgtcagtaccttcagtaaagaccgggatctgcggatccttgtcgaatacccaggaacagataagatcgtgttcattacgcatatctttggtttgcataagttttaccgtgtaggcacgatgcaacgtaaagatacgctctgcagctaaatctaatttttcctgagtcatctcttcgccggtgatcgctttgaagaatttggcttcaagcgccagatcgccccggtaattacggcttttcagcggcgaaacggtcattggccagacccagttacacagggtgacggcgttatgcaaacagacccgcaacagcgaccacttagcatatttaatttttgcgtcattgattggcgtgtagtttttggtttcatcgtaggcatcttcagaaccaaaaagctctttcgccacttcacgttgcagtttcaatggcaagccggaaccaataaagttgatatgggtatgcgtcatgcagtcacggttgaacatacagttaacaatggaaccgacctgcgctgacgcttcattggcatggtgaaccggatagccaaacggcgaccagagtttatttttcgcgtagccccagtactcttcacccaaattccagcgttctgcgatggcatatgaaccatcagccaggtgactcagctcacccacacgatgcgccagacggtagtaaaaatctttaatgaagttaacgtcacccgcttccagttgatcccagcgaatttccgcatactcttcagcaggcagaacacgcttgaacacccctttgctgtaacaataggtaaagtcgcgatgcaactgcccgtagttacaccataggccgtagtcatcgaacaaattcagacccaccaggttaccaatcacacggccatcgtctttatcttcaaaatctttcggaccgttcgggaagatggtggtatggacaaagttggctacacaagtgttaccacctgtgctgggcacgccaaactctttcacccgaggaatattcatttgggtcatacaacggatcgggcaagagtggcagccactcatttttactgtgtatttctctgccgccggacctaagtcaaaaacggatttataggtacgaaagccgaccgtgttctgattgcctggcggaatttcccccgtttcaatcggaccaccttcagccgcgccccaaaacagccctttacgtgctgtccaacgtgacttgggatctgaatactctgcccacgattgcggcgtacttggcacgacatggttgttattcgcaccaataagttcagtcatcatgtaatcgttgagacgcttcatctcctgacgatcggcaatgttgacccctttcgtcccttcaaccgcaatcgctttcaggtttttcgaacccataattgcgccagttcccgcaccgccgctgtggttacggctattcaacatgccagagagaggaacaaggttttccccagcctgaccaatagccgccacacaggtttccggactggtcaatcgacaaatttcttccgtcgttgcgcgcgtcccttttccccataagaaatcggctttttccaggctaactttgtcatctttaatcttcagccataccggtgatttcgccttcccttcgataataatgacgtcgtatccagcgaatttcatttgcgctgcaataaagccacccatatgggcatcgacaactaaatttcctttggtaaaagtagaaagtgaggtgatatttacgcgagaactacagggggcaccagatccagttaatgggccggtagcaaagactaatttattcgcttcatcgaaaggtttcgtgcctggcggtacttcgtcatacataattttgtagccgaagcccatgccaccgacaaaacttttaaacttactggaatcttcgagggtaatatttcctgtcgtgagattgactcttaatatattacctgtccaaccgttagccatgattttttcctttgcaagattcacacagtaatatctttccactcgataatttttaacgcccctgttgggcaggcgtttgcgcattcaccgcataacacacatttcgaggattttttactttcggtatttacggtggccatcatccacgggcatgccgtagtacaggcgctacagccaatacagcgtttatgatcgacggtaatacagccttctttctgctgccaggtaatcgcaccaatcgggcagacgttcacgcattgcggctctttgcattgacggcaggtgtccgcggtatagttgagatcgccatacaggccgccgccagagccaaccccgttgtcgccaaagaaataattgcgattgattttgatacgggagaagaatgtccctactgagccatcgttgaagttggtacaagagatttcacagcggtggcaacccgtgcatcgcgctcgctgggtcaccagcacccctttgggtgtatttatcaaccctactgtgccgctatcaatatcttcctgtttgcaacccaaaagtgacagtaacgcaggggcaattgttagaccagcaaggccttttcctgatatacgcaagaattctaatcgcgttaagccaatatctaatagtggacgatcaaccgggttcatttatttcgcatcctcttcgcaaacacagtgctgacaattcagcagcctgatattaagcattcaactaatacgctgctgactctgtccccaacaccagatattttccctaacccgatagtgtatgagaaaagatttaacgccgataaactaatcctttatggttaggagaaaaaataatgtgattattctgagcccttaacattgatcgttatcaattaaaattacaaagcaagaaattataagtgaactgatatttattatcatttgaaataaatttaacttaagcgacaattatttgtgacgttcattgcagaaaataaaaataatattatcgttataaattaaaatacataccgcgattcgtataatttcagcagttgttatttagaatgattaactggaccgcaactgaagcaagaatatcaggatgaagcttaccgcctcatcctgaatggtcattttaccagtgcgttaatgacggtttccatcgcctgcttttccagctcactgcgctgaatgcgtttattggctaatgctgtacgtaatacgcctgcgataacaatatgctttggttcctgccccagatcgcgcatttccagcacaactttaccgacaactctgcacatttctcggtacagttcatcctcttttgtccgatttcccattctttatacctatttatcatgccaactatcagcatatatcaatctaaccaattaaacaaaaatcaaacaaaatcagacaaataacgcgataaattattttaactgtagcaattgagcgatgatgtatttatacaccggatgaactttcacttatcctcacactgacaacttcggcaccagacgttgcgcaaacagtgaagtttttgcgtaaccttttccctggaacgttaaatctttgataacaatttattgtctaacaagttgtatattttttgaaacgctgtttttgttttccttttagattaatttcagcgtataatgcgcgccaattgactcttgaatggtttcagcactttggactgtagaactcaacgactcaaaaacaggcactcacgttgggctgagacacaagcacacattcctctgcacgctttttcgatgtcacctatccttagagcgaggcaccaccactttcgtaataccggattcgctttccggcagtgcgcccagaaagcaagtttctcccatccttctcaacttaaagactaagactgtcatgaaaaagaccaaaattgtttgcaccatcggaccgaaaaccgaatctgaagagatgttagctaaaatgctggacgctggcatgaacgttatgcgtctgaacttctctcatggtgactatgcagaacacggtcagcgcattcagaatctgcgcaacgtgatgagcaaaactggtaaaaccgccgctatcctgcttgataccaaaggtccggaaatccgcaccatgaaactggaaggcggtaacgacgtttctctgaaagctggtcagacctttactttcaccactgataaatctgttatcggcaacagcgaaatggttgcggtaacgtatgaaggtttcactactgacctgtcagttggcaacaccgtactggttgacgatggtctgatcggtatggaagttaccgccattgaaggtaacaaagttatctgtaaagtgctgaacaacggtgacctgggcgaaaacaaaggtgtgaacctgcctggcgtttccattgctctgccagcactggctgaaaaagacaaacaggacctgatctttggttgcgaacaaggcgtagactttgttgctgcttcctttattcgtaagcgttctgacgttatcgaaatccgtgagcacctgaaagcgcacggcggcgaaaacatccacatcatctccaaaatcgaaaaccaggaaggcctcaacaacttcgacgaaatcctcgaagcctctgacggcatcatggttgcgcgtggcgacctgggtgtagaaatcccggtagaagaagttatcttcgcccagaagatgatgatcgaaaaatgtatccgtgcacgtaaagtcgttatcactgcgacccagatgctggattccatgatcaaaaacccacgcccgactcgcgcagaagccggtgacgttgcaaacgccatcctcgacggtactgatgcagtgatgctgtctggtgaatccgcaaaaggtaaatacccgctggaagcggtttctatcatggcgaccatttgcgaacgtaccgaccgcgtgatgaacagccgtctcgagttcaacaatgacaaccgtaaactgcgcattaccgaagcggtatgccgtggtgccgttgaaactgctgaaaaactggatgctccgctgatcgtggttgctactcagggcggtaaatctgctcgcgcagtacgtaaatacttcccggatgccaccatcctggcactgaccaccaacgaaaaaacggctcatcagttggtactgagcaaaggcgttgtgccgcagctggttaaagagatcacttctactgatgatttctaccgtctgggtaaagaactggctctgcagagcggtctggcacacaaaggtgacgttgtagttatggtttctggtgcactggtaccgagcggcactactaacaccgcatctgttcacgtcctgtaatattgcttttgtgaattaatttgtatatcgaagcgccctgatgggcgctttttttatttaatcaataaccagaagcaataaaaaatcaaatcggatttcactatataatctcactttatctaagatgaatccgatggaagcatcctgttttctctcaatttttttatctaaaacccagcgttcgatgcttctttgagcgaacgatcaaaaataagtgccttcccatcaaaaaaatattctcaacataaaaaactttgtgtaatacttgtaacgctacatggagattaactcaatctagagggtattaataatgaaagctactaaactggtactgggcgcggtaatcctgggttctactctgctggcaggttgctccagcaacgctaaaatcgatcagctgtcttctgacgttcagactctgaacgctaaagttgaccagctgagcaacgacgtgaacgcaatgcgttccgacgttcaggctgctaaagatgacgcagctcgtgctaaccagcgtctggacaacatggctactaaataccgcaagtaatagtacctgtgaagtgaaaaatggcgcacattgtgcgccattttttttgtctgccgtttaccgctactgcgtcgcgcgtaacatattcccttgctctggttcaccattctgcgctgactctactgaaggcgcattgctggctgcgggagttgctccactgctcaccgaaaccggataccctgcccgacgatacaacgctttatcgactaacttctgatctacagccttattgtctttaaattgcgtaaagcctgctggcagtgtgtatggcattgtctgaacgttttgctgttcttctgctgatagtggtcgatgtacttcaacataacgcatcccgttaggttccacggaatatttcaccggttcgttgatcactttcaccggcgttcccgtccgcacgctggagaacaaggctttaatatccggtgcattcatgcgaatacaccctgaactgacgcgcaaaccgacgctgtccggcgcactggtaccatgaatgaggtattcgccattaccatgcgcgaggcgcagtgcgtaacgtcctagcgggttatttggtccggcaggaacgactggcggtaatttaatgccacgctccagcgaacgttgacgaatgcctgccgtaggcgtccaggttgggttagggattttctgcccaacacgcgtttccatcaccggcgtttccagcccctgcaatccaatacctattggataaacctgcacaatattttctcccggcggataataataaaggcgcagctctgcaaggttaacgataatcccctgacgcggtgcatcaggtaataacagttgtgaaggaatagttatcgtcgtaccaggttttggcaccggggcgatagtgttattggcttcaaggatcaacattgccgcagtatcaaaacgtcgggcaatagcctgaaggtttttatccccttcttgcaccgtatacgtttgattttgcccaaccagtcggcttccggttggtggtagcggataatcaaccgcccaggcagcctggatggcgctaaaagcgccgataagcgtgagtgtaagcaaagacgcgcgtttcattgtaaacctcctgtatttgccggagactcacgctgaaacgtcggatggcgcttatgttcacctgaaaccaaaacactcctgtgcaggtcagtgtaaacattgaccatccggcaatgtgagccaaccggatgaaagctgtccctttagtttagctaagtgcagcggctttggcgcgaattgcgcgaatcatcgcttccagaccttgtgaacgagatggggtgagatgttgggtgagcgccattttttcaaaccacggacgcacatcgaaattgacaatatcctgcggcgtcatctgatcgtagagaataaatacgaccgcaataagccctttcacaatcgccgcatcgctgtcgccctgcaattcaataattccctgcgcattctggcgcatgacaatccacacctgactctggcagccctgaatgctattttgtgggcttcggtcttcggcgcgtaattctggcagacgctggcccagctcaataatgtagagatatttctcttcccaattggcgcagcgtaaaaaattacgcagcaatttttctttatccggcaataaagccatagtgcctccctgttatcccagcagacggtgaatacgttgcagtccggtcaccagacgatccacttcttcatgggtgttatacatggccagcgacgcccgacacatagcagggacgttgtaataggccattaatggcatagcgcagtgatgtccggtacgcacagcaatgccgtagttatcgagaaaactgccaacatcataggcgtggtgtttaccaagattaaaagcaataacgccaagcctgttccgcgggccatagagagtgagatccggtacagattccagctgtgatagcgcgtagtgcatcagattctgttcatactcggctatgttattaagccccagcgccgaaacatactccagcgccgcgccaagaccaatgatgcccccggtattgggtgtaccggcttcaaaccgccaaggtgctttggtccaggttgtgccttcactcaggctgacggtggcgatcatagaaccgcccccttcccacggcggcatctcctgcaacaaggcttctttcacataaagaatgccaattccggtggggccatacagtttatgcccggagaacacgtaaaagtcgcaatccagcgcctgaacatccaccggatgatgcatcaccgcctgagcgccatccaccagcacttttgcgccatgctggtgcgcaagcgtgatcatttccgccagtggattttctgtgccaagcacgttggagacatgagtaattgccagcaggcgagttttctcatcaaacagcgtaggcagcgtctccagttgcaacgtaccgtcgggattgagcgggatcacacgcagctctgcgccaacgcgtgcgcaaagcatctgccagggaacaatgttagcgtggtgctccatctgactgatgatgatgttatcgcccgcccgcacattgctgttgccccagctattggcgaccagattgatcccttccgtcgtgccgcggacgaacaccagctcttccgccgaacgggcattaataaacagcgatgcccgcttgcgcacgttctccattttctcggtcgcctgagcgcttaaggtatgaataccgcgatgcaccgccgcgtagccatgacgataaaactcggcctcggcgtcaatcacctggctcggtttctgtgcactggcggcgctgtcgagataagccagcggcaaaccgtttacctcacgcgaaagcaccggaaagtcggcccgcactttgtcgacggaaaaagtcatcttgcacctcctggcagccgttgaccgattcgggccagcacctgctgtttaagcccctcatcacgcagtgcttccgtcagttcggcagcaaaggcgtaaatgatcatctgctgggcatcctgctgattgatcccgcgcgagcgcagatagaacatctgttcatcatcaatacgccccaccgtcgcgccgtggctgcatttcacatcatctgcatagatttccagctgcggttttgtatccacttccgccagtttgcccatcagcagattattgttggtcatctgaccatccgttttgatggcgtgctgcgcgacgttgatcaaaccgttaaataccgcgcggcctttgtcgctgacgatagttttgtgcaactgtcggctgttacaaaaacctttattgtgttccagccaggtacgggtatcacacacctcgtttttcaccggcatcgccaggctattgatccgcagcgtgctgttttcgccattgagttgcgtactggtgttgtgtcgtaacactgcgccacccagcaggaaactatggctaaatgcggtggcatcgtcagccagcaacaaatcgttatgggcaaagtggtgactgaccgggttttcaaacgccagcttgatatgctgcaagtgggcgttcgctgcgacattgatagtgaaccgtgcgccggtgaagtgacgagcatcattaaggctgacaaaatgttcgatcaccgttgcttcggcaccttccgccagatccagatgatgtcggtaatgggcagtgttgacctcttcacctgccacgccctgggtaatatgcattaacagcaatggctttgccggccgttgaccgcgcttcacggcgatatgcgtcacgctttgtgccaggctttccgtcaaatgcagaaacacttccgcctgaatagcgtcgggtaccccctgacggtcgtcgttaatgctcacttcatacccgctgccttcagtcgcatcgctcagtgctgacacgtaacgtccatcgacaaataccagccgcacagcgtctaacgttaacgctaaggcatcacgctgctgtggggatatctcccccgcaatgctgacaaactggctattggtcagcccttccagcggcgtatatttccagttttcatgtttacgtgtcggcagtccggtacgcagcaattgttgtaaatgctgctgtgcttgcggggagcgttttgtcccttcagcttcaaacaagtgatgccactgttgcagcgcgttactgctgttcggtaagccagccataaccctgctcctccagttgtttgaccaacgtgaaatcgccggatttcacaattcgtccctgatatagcacatgaacgtaatcaggcttgatgtagtcgagaatgcgttggtagtgcgtaacaatgatgaatgagcgcttgccatcacgcagcgagttcacgccatcggcgaccacttttaatgcgtcaatatccagcccggagtccgactcatcaagaatgcataactccggttccagcaccgccatttgcaaaatatcgttgcgctttttctcgccgccggaaaaaccaacgtttaccgaacgggttaataaatcttccggcatcttcaggagagcgattttctcttccatcaaatcctgaaaatcaaagcggtcgagcgtttcctggctgcgatagctgcgcaccgcattaagtgccgtttgcaggaaaaactggttactgacgccgggaatctccaccggatactggaaggccataaagatgccttcgcctgcacgatcttccggcgacagcgcaagcaaatctttgcctttgaactcaaccgtgccgcccgtcacttcataatcttctcgcccggcaagcgttgccgataaggtacttttgcccgaaccgtttggccccataatggcgtgaacttcgccgggacgaacgtcgaggcttaatccacgcaggatagctttatcttccacgctgacgtgtaaatctttaatacttaacatgtttattccttatccgacgctgtgttcaagactgatggcgaggagtttttgtgcttcaacggcaaattccagcggcagttctgagaacacgtctttgcagaaaccgttaacaatcatcgagatggcgtcttcttcgctgatcccgcgttgcaggcagtaaaacagttgatcttcaccaatacgtgatgtcgttgcctcgtgctccagttgtgcgctgttattgcgacattcgacatacgggaaggtatgcgccccacaattagcgccaatcagcattgagtcgcactgagtgaaattgcgcgcattggttgccgtcggcatgattttcactaagccgcgataactgttctgactatgtccggcagagatccctttcgagataatggtcgatttggtgtttttaccgatgtggatcatcttggtgccggtatccgcttgctgatgaccgctggtcagcgccactgagtaaaactcaccaatggagttatcgccgcgcaaaatgcagctgggatatttccacgtaatcgcggacccggtttctgattgcgtccatgacattttgctgttttcgccttcgcacaaagcacgcttggtgacgaagttgagaataccgccggtgttgttatcgccagggaaccagttttgtaccgtggaatatttcacctcggcgtttttatggatgatgacttccaccactgccgcgtgtaactgatagctgtcacgcaccggagcggaacagccttcaatgtagctgacgtagctgtcttcgtcggccaccagaatggtgcgctcaaactgcccggttttttccgcgttaatgcgaaaataggtggaaagttccatcgggcagcgcacgcctttaggcacataaataaacgtaccgtcagaggctaccgccgcattaagcgcggcaaagaagttgtcattccccggcaccacggtgccgagatatttacgcaccagttccgggtgatcgtggatcgcctcaccaaaggaacagaaaataattccctgctccgccagtttttcgcgataagtagtggcaaccgaaactgagtcgaaaatggcatccaccgccacctctttgccttcccgcacgggaacgcccaactgctcaaacgccgcctccacctctttacttaaaaaggcgttcgcgccagtttgctgcaccgcgccaggttcagacgcgcaagtgtcgtcacaattaccgcacgatggtgctgagtagtagctgtaatcctgataattcagcttgtcgtagtgcgctttcaaccagtgcggttcttccatctccagccatgcgcgataggcgtttagacgaaacttcagcatccactccggctcattacgcttcgccgaaattgcgcgcaccacctcttcgtttatcccctttgccagctcatcggtggctaactgggtgaagaatccttctttataattcagcgggccgccggtccaggttttgacatcgtcagttgcttcagtattacgagacatagtaccgcctataccccaaagctttcgccacagccacattcattctgggctttagggttgtgaaatttgaatatctgattaagtccttcacgaacgaaatcgacttccgtgccatcaataaacggcatcgcttgcagcgggacaaacagcttcgcgccgtcgtgttcaaacagcagatcgtctttgtccggctcgctaacactgtcgagcacatagccaaagcccgcgcagcccgtttgcttcacgcctaagcgcacgccgaccatacccggctgctttgccaccagctcacggatgtgtatcgccgctgcgggtgtcagcgttaagccttgccaggcgaaatcttgtgggttaaaggttcctgaatgcatgtccatcgatttacctcacttcatcgctttcagcgtataacagcatgttagtgataatgattatcagtacaacccagcaaacgcaggggctttaccgtaaaacatgctttttgcctgcttttaataagcatagaccctgatgtgtgggttaacaggcacgctaagaattaggtatctcattgttagataatggttattatctaaggagcattaaggctgtgatgaaaaagaaaaagttgtattgaaaatgactatttaagagataggtaaaaaagtgcagcgttcagaaataagaaaacccttaagtctgtgcaacacaggcttaagggtttctaccccatccggcgcttatctccggcactctcagtggcttagctcttgaaggggcgataagaataatctcataaagctaacccgccgttttaacacaaactgcgattagtattatttttgaacaatatcaggcggtagataagcagtattaagaaggtcatcgaacctggacggaggttaatccaggtcgatttggcgaacttgcggcattaagtcaggatcaatgcacgcccagacgccaggcaaagtagatttcttcttttaattcagcagaagagagagtaagcaggtcagcaaattcaagttctagttgtttcagacgtttgagatattgggcaggtgaaagattgctctggtcacggcgtaaaaattcaatggccagctgggtgggatcaagttgagtagacatagcatcctcgcttttagacaagacctgcacagtataccaccgtttactgtgcagataatgaccaaaggcaatatgcgtcacacttttctggtgacaacgtcacaaaatggcggtcgtcaatcgtgacgaacagcacaaacgccctttctcatcgaagatttcaatctgccagacctggtgacgcgaaccgagatgcaacggtttgcataccccgcgcacccgcccttctcgtgccgagcggacgtggttagcattgatttccagaccaaccactttttgctcaccttcggtacataaataaccggcaacggaaccgatactttcggccagtaccacggatgctcctccatgcagcaacccgaaaggctgctttgtccgcgagtctactggcattgtcgcttcaagggtgtcatcaccaatatgttcaaagcgaatatccaggaaccccaccatgtttccttcacccatagcattcagtgcttccagggtgattttccgtttccatatcatttaataatctccagtaaagcctgcacaggatggcgtacccccgtgccttcaacccgttttacctggctacggcaggaatatccggtcgccagacagcggttacgcggcagtcgctgcatagcctgatgccaagataactcatagatcccgagcgaatttttatggtttttcgcttcatgtccgtaagtccctgccatgccgcagcaacccacgctgacattttccagtttcgcgccaaaacgggcaaatatcgcggcccattgtgctggcgcacccggcaaggcggtaacttcggtacagtgaccaaagaaataccatgattcaccgctgactgtagccactggctgtgactcaagtgcgcttgccagccattcattcgccagtaagacgttaaactcgccacgttcctcgcccagcgccagtttatattcatcgcgataacaaagtaccagcgccggatcgacgcccaccattggcatacccagcttcgccatacggttgaggaaatccgccgtctttttcgccgtcttcgcaaaacgattaagaaaacctttaatatgctgggctttgccatttggcgaaaatggcagtaacacaggctggaaacctaatttttcgaccagacggacaaaatccgccaccacttgcgcatcgtaatagctggtaaaggggtcctgcaccaccaacactgtgcgcgctttctgctctgcattgagagattcaagctgttccagcgtcatgtttgccgagcgatgccccaccatttgttgttgtagcgaggggaccgacagcagcggcaaatcaaccatgccgatatgtttttccgagagtttgcgcaccagcggctggttaatgaagaagttaaaggttttcggcgcgcgtgccatcagcggcgcgtagctctcgaccgtagcgacgaggtggtcgcgcagcgggcgtaaataacgggtgtgatagagctgcagaaaacgagagcgaaactccggcacatcaattttgatggggcactgggtcgaacacgctttacaggccagacagcccgacatcgcctctttgacttcgtgtgagaagtcatattcgcctttattcgcatgccagctattgcgcgtgcgggcaattaacgtccgcaaactgacgccggattcaggcagttcttgttccagtttgagtggatcaacgccgcgatccgccaacaaacgcagccattcacgcaccagcgttgcgcgccctttcggtgaatgaatccggttctgggtgatcttcatcgacggacacatcggactacgggcatcaaagttgaagcataaaccgttgccgttacactccatcgcaccgcgccactgctggcgtaccgcaatggggatctgccgatcgaatgtaccgcgcttcaccgcgtccactttcatcatcggcgcatcgagaccttctggcgggcaaatcttccctgggttgagtcggttatgcgggtcaaatgccgctttcactttgcgcagttctgcaaaaagttcctcaccgaaaaacgccgggctgtattcagcgcgaaaacctttgccgtgctcgccccacaacaaaccaccgtatttcgcagtcagcgccactacgtcatcagagatttgcttcatcaaaatctcttgttgaggatcgcacatatccagcgctggacggacgtgcaagacacctgcgtcgacgtgaccgaacataccgtagcttaagccgtggctgtcgagcagcgcgcgaaattcagcaatataatcggccagatgttccggcggtacgcaggtatcctcagcaaacggaattggcttagcggcacctttggcattgccaagcagaccaacggcttttttacgcatcgcatagatacgttcaacacccgccagctcgcggcacacctgccagccaatcacacctgcctgttggctggcaatcagctcatcaagccgcacacagagagcattaactcgctcgtcaatcagcgcctcatcatcaccagcaaactccacaatgttcagcccgagcatctctttgtcaggcacatcggtaatcaactcgctgacggaatgccagacaatatcttcccgcgccagattcagcacttttgagtccaccgtctctaccgaaagcgcccgcgcctcaaccataaacggcgcgttacgcagcgcggagtcaaaagagtcatatttgacgttcaccagacggcgcactttaggcaagggcgtaatatccagccgcgcttcggtaataaaggccagcgtcccttctgaacccgtcagaatgcgcgtcaggtcgaactcggtcatctcatcgttaaagacatgacgcagatcgtaaccggtaagaaagcggttaagtttggggaagttgtcgatgattaactggcgttgctgacggcaacgttgataaaccgtgttataaattcgcccgattgtggtattggatttacccagcgtttccgccagttcgacgggtaaaggttgcgtatcgagaatatcgccccccaacaacaccgcacgtacgccaagtacgtgatccgacgttttgccatagaccagcgatccctgaccagaagcatcggtattgatcatcccaccgagcgttgcccggttgctggtcgaaagttccggcgcaaaaaagtagccgaacggtttcaggtactgattgagttgatcttttatcaccccggcctcaacgcgcacccagccctcttcagggttaatttcgatgatgcggttcatatggcgggacatatcaacaataatcccctggttgagcgcctgaccgttagtgccggtgccgccgccacggggggtaaagatcagcgatgaatagcgttcctgcgcggcaagacgggcgatcagcgccacatctgcggttgaacgcggaaataccaccgcatcggggagaagttggtaaatactgttgtcggtcgacattgtcagacgatcggcataacttgtcgccgtatcgccggtaaaaccttgttgctccagctcttgcaaaaaattaagcaccagttgaacgacgccgggtgcctgggaaatctgtggaatcattatattgaccctttcctgcggtctgtgatgtaggtcgatacactattctttcaggcggctgcaatagcgcactgaaaggtgatgtttatttactctatggatttcgagttgcaggaaggcggcaagcgagtgaactccaggagcttacaatagtaagtgactggggtgaacgaacgtagccgcagcacatgcaacttgaaatacgacgagtaaatcgtttgcgtgttgcctgagttgttgtaccacatttttttctaacacgcccatcagaattaagggcagaatcggcctgttaaaaaccgctgaaattgctcatcattatgcaggtgagtttcgcgtgttcacgtcgcgtcgacgatttgacgcacaaaaaaggtgaaaagtagttatggtaaatgttcgtcagcccagggatgtcgcacaaattctgctttcggtgctgtttttagccatcatgattgtggcatgtctgtggattgttcaaccctttattctcggctttgcatgggccggtacggtggttatcgccacctggccggtattgttacgtttgcaaaagatcatgtttggccgccgctctctcgccgttctggtgatgacgctgttattagtgatggtgtttatcatccctattgctttgctggttaacagtatcgtcgacggcagcggcccgctaattaaagccatttccagcggcgacatgacgttacccgatctggcgtggcttaataccattccggtgattggcgcgaagctgtatgcaggctggcacaacttgctggatatgggggggacggcgatcatggcgaaagtccgcccttatattggcaccaccaccacctggttcgttgggcaggcggcgcatatcgggcgctttatggtgcattgtgcgctgatgcttctcttcagtgccctgctgtactggcgcggtgaacaggtggcacaaggcattcgccattttgcaacccgtctggcaggcgttcgcggagatgccgccgtactgctggcggcacaggctatccgcgcggtggcgctgggtgtggtggtgacggcgttagtacaggcagtgcttggcggtatcggcctcgccgtatccggcgtaccttatgcaacgttgctaacggtgttaatgatcctctcctgccttgtccagcttggcccgttgccggtactgattccggcgattatctggctctactggactggcgataccacctggggaacggtattgttagtgtggagcggtgtggttggcacgctggataacgtcatccgcccaatgttaattcgcatgggtgccgatttaccgctgatcctgatcctctctggtgttattggtggtttgattgctttcgggatgatcggtctgtttattggtccggttctgttagccgtttcctggcgtctgtttgccgcgtgggtggaagaagtcccgccgccgacggaccaaccggaagaaattctcgaagaacttggcgaaatcgagaaaccgaataagtaatttctcatcaggcggctctgccgcctgattgttaacccccgctaattgatatttgcttactcttccccatattttcctgcttaccgccattcagctggtagtacctgtcgcaaattctttacagtttttaaactaatgagacgaatctgatcgacgcaaaaagtccgtatgcctactattagcttacggttataaatcaacatattgatttataagcatggaaatcccctgagtgaaacaacgaattgctgtgtgtagtctttgcccatctcccacgatgggcttttttttaacatttttccgcttcgctacctcgcccctcactctttccaataatgttgcacaagatactgtgactctcttcaagccgtcagcaggctgataatgttatttatattttattgtttatttcatgcagccattacacgatgaacgcttatgaactccaggcacttcgccatatttttgccatgactattgatgaatgcgcgacctggattgcccagaccggtgacagtgaaagctggcgtcagtgggaaaatggcaaatgcgccattcctgatcgtgtagtcgagcaactgttggctatgcgtcagcaacgaaaaaaacatcttcatgccatcatagagaaaataaataaccgcatcggcaacaacaccatgcgggtgatgctgccaacttactgatttagtgtatgatggtgtttttgaggtgctccagtggcttctgtttctatcagctgtccctcctgttcagctactgacggggtggtgcgtaacggcaaaagcacc

SEQ ID NO: 75 - DNA, 29886 bp, Escherichia coli
  source 1..29886: mol_type = genomic DNA
ccatggagaacactttatcagccgggaaataatgcgggcaacggtgtttaattatatcgaatgtgattacaatcggtggcggcggcacagttggtgtggcggcctcagtccggaacaatttgaaaacaagaacctcgcttaggcctgtgtccatattacgtgggtaggatcaaaatgccgctttatggtgactcacaaaaattcaccacatccctcacaaccaccttattacgcccggtctctttcgcctcgtaaagtgcgttatcagccagtcgatagatctcatttgggtttaacgcattttcctgagtcacaacagcgccaatactaatcgtcactttttgtggtatagcgtattcaggattatcgccagttaaacgctcaacattttcccgaatcctttccgctaaagctttcgcacgttcagtatcgatgtccgtcagcaagacgccaaactcttcgccgccgacgcgcgctaaaaggtcatctggtcgtatgcttttcccaatgatattcaccactgtttttatcacctgatcgccaaccggatgcccccaggtgtcgttgacttttttgaagtggtcgatatccataatcatgacgcaataaggcgttttttgggctgatgctgattgaactgtcagttcattaaaaaaataatttctgttaaatatattggttaagggatcgcgatgtgcaatgttctttgttactcgtagcgcactgaatatatggcacataaatattaccataacggttaacttactgactacttcaatagtgcgactaatataccaagtggacacgctatacctgctcataaataacagagagatattgtacagtacggcacaaaaagcaatcaccgtcactccattccagatatcatagcgtaaaacattaaagtatagattaaccgaaagcaaggttaaccacatgaaaatcattatggtaacatatgaggctttccaaaccacctgaccattttcattggttaactcggcaatgtgtaaattgtagctctcataatgactagaaagtatgtgagcaactatcggccccccaaaaacaaaaaacaaacttatgcacaaagtcatttttttggaaaataaattgcgctgttttgtgttttcactaactttattcaccaatgccagaaatattaatatgcacaaactcatctgacgaaacaaataatagattgcaatgtcattttggacaacactgcttgtcaaacgctcctcaataatttgctgaatgataatgacggttttaacaaagtaaatcaaacaactcagaaaagccaaactaagtacacagtttgaaaattgcctacggtcataaatgaaatacaactgcataaaaataaatgcaacagtatcgataaaaaataaagcaatcattaccatcagataggttgatcgtggaacaacttcctcaacgcctggctgattaaaccaactattcaccaaaaccaaagcaagcccaaacaataagctcactaatacagtactactaattctcaaatagtctttttccataaagctacaccaatctgtaggttgtagatccctttctattattaatagatataagaactgtactgttgtcaatatgaaattccgcccacaaacaataccgatgatgatagttgctgaatgtaattattattgcctaagtgctttatacattgtttgcaacaagccaggcttgaaaatacttataaatggttatagaaaatccttataaaacattaattcatagatacattaggaataacaattaaatccgtgagtgccgtagcgcagcctttcatcaggactttcgaaaaatccgaaatcatgcatcggaatttactgatttaattattttaatcctaatttattttgaaaaaggcattgggatttatgccgtattcctgaagatcctcatcattggaatggattttcgggcgagaaaaggattttatatggacactctgctcatcatttcttcttctcatcatcaacaattcacgtctctcttccgcgtttaataacggattatgaggtgcaaaaatatctttcttttcagttacctgtaattagatacagagagagattttggcgatacatggagtaatacaggatgtattcaagtagcagaaaaaggtgcccgaaaaccaaatgggctttgaaaattcttactgccgcatttttagcagcgagtcccgcggcgaagagtgccgttaataacgcctatgatgcattgattattgaagctcgcaagggaaatactcagccagctttgttatggtttgcacaaaaatcagcactcagtaataaccaaattgctgactggttacagattgcattatgggccgggcaagataaacaggttattaccgtttacaaccgctaccgttatcagcaattaccagcgcgtggttatgcagctgtcgccgtcgcttatcgtaacctgcaacaatggcaaaactcgcttacactgtggcaaaaggcgctctctctggagccgcaaaataaggattatcaacggggacaaattttaaccctggcagatgcgggtcactatgatactgcgctggttaaacttaagcagcttaactctggagcaccggacaaagccaatttactcgcagaagtctatatctataaactggcggggcgtcatcaggatgaattacgggcgatgacagagtcattacctgaaaatgcatctacgcaacaatatcccacagaatacgtgcaggcattacgtaataatcaacttgctgccgcgattgacgatgccaatttaacgccagatattcgcgctgatattcatgccgaactggtccgactgtcgtttatgcctacgcgcagtgaaagtgaacgttatgccattgccgatcgcgccctcgcccaatacgctgcattagaaattctgtggcacgataacccagaccgtactgcccagtaccagcgtattcaggttgatcatcttggcgcgttattaactcgcgatcgttataaagacgttatttctcactatcagcgattaaaaaagacggggcaaattattccgccctgggggcaatattgggttgcatcggcttatctcaaagatcatcagccgaaaaaagcacagtcaataatgaccgagctcttttatcacaaggagaccattgccccggatttatccgatgaagaacttgcggatctcttttacagccacctggagagtgaaaattatccgggcgcgctaactgtcacccaacataccattaatacttcgccgcctttccttcggttaatgggcacgcctacgagcatcccgaatgatacctggttacaggggcattcgtttctctcaaccgtagcaaaatatagtaatgatcttcctcaggctgaaatgacagccagagagcttgcttataacgcaccaggaaatcagggactgcgcattgattacgcgagtgtgttacaagcccgcggttggcctcgtgcagcagaaaatgaattaaaaaaagcagaagtgatcgagccacgtaatattaatctggaggttgaacaaacctggacagcattaacgttacaagaatggcagcaggcagctgtcttaacgcacgatgttgtcgaacgtgaaccgcaagatcccggcgttgtacgattaaaacgtgcggttgatgtacataatcttgcagagcttcgtatcgctggctcaacaggaattgatgccgaaggcccggatagtggtaaacatgatgtcgacttaaccaccatcgtttattcaccaccgctgaaggataactggcgcggttttgctggattcggttatgccgatggacaatttagcgaaggaaaagggattgttcgcgactggcttgcgggtgttgagtggcggtcacgtaatatctggctcgaggcagagtacgctgaacgcgttttcaatcatgagcataaacccggcgcgcgcctgtctggctggtatgattttaatgataactggcgtattggttcgcaactggaacgcctctctcaccgcgttccattacgggcaatgaaaaatggtgttacaggcaacagtgctcaggcttatgttcgctggtatcaaaatgagcggcgtaagtacggtgtctcctgggctttcactgatttttccgacagtaaccagcgtcatgaagtctcacttgagggtcaggaacgcatctggtcttcaccatatttggttgtcgatttcctacccagtctgtattacgaacaaaatacagaacacgataccccatactacaaccctataaaaacgttcgatattgttccggcatttgaggcaagccatttgttatggcgaagctatgaaaatagctgggagcaaatattcagcgcaggtgttggtgcctcctggcaaaaacattatggcacggatgtcgtcacccaactcggctacgggcaacgcattagctggaatgacgtgattgatgctggcgcaacgctacgctgggaaaaacgaccttatgacggtgacagagaacacaacttatacgttgaattcgatatgacattcagattttaaggataaatatgttacgtaatggaaataaatatctcctgatgctggtgagtataattatgctcaccgcgtgcattagccagtcaagaacatcatttataccgccacaggatcgcgaatctttactcgccgagcaaccgtggccgcataatggttttgtagcgatttcatggcataacgttgaagacgaagctgccgaccagcgttttatgtcagtgcggacatcagcactgcgtgaacaatttgcctggctgcgcgagaacggttatcaaccggtcagtattgctcaaattcgtgaagcacatcgaggaggaaaaccgctaccggaaaaagctgtagtgctgacttttgatgacggctaccagagtttttatacccgcgtcttcccaattcttcaggccttccagtggcctgctgtatgggcccccgtcggcagttgggtcgatacgccagcggataaacaagtaaaatttggcgatgagttggtcgatcgagaatattttgccacgtggcaacaagtgcgagaagttgcgcgttcccggctcgttgagctcgcttctcatacatggaattctcactacggtattcaggctaatgccaccggcagcttattgcctgtatatgtaaatcgtgcatattttactgaccacgcacggtatgaaaccgcagcagaataccgggaaagaattcgtctggatgctgtaaaaatgacggaatacctgcgtacaaaggttgaggtaaatccacacgtttttgtttggccttatggcgaagcgaatggcatagcgatagaggaattaaaaaaactcggttatgacatgttcttcacccttgaatcaggtttggcaaatgcgtcgcaattggattccattccgcgggtattaatcgccaataatccctcattaaaagagtttgcccagcaaattattaccgtacaggaaaaatcaccacaacggataatgcatatcgatcttgattacgtttatgacgaaaacctccagcaaatggatcgcaatattgatgtgctaattcagcgggtgaaagatatgcaaatatcaaccgtgtatttgcaggcatttgctgatcccgatggtgatgggctggtcaaagaggtctggtttccaaatcgtttgctaccaatgaaagcagatatttttagtcgggttgcctggcaattacgtacccgctcaggtgtaaacatctatgcgtggatgccggtattaagctgggatttagatcccacattaacgcgagtaaaatacttaccaacaggggagaaaaaagcacaaattcatcctgaacaatatcaccgtctctctcctttcgatgacagagtcagagcacaagttggcatgttatatgaagatcttgccggacatgctgcttttgatggcatattgttccacgatgatgctttgctttcagattatgaagatgccagtgcaccggctatcacggcttatcagcaagcaggctttagcgggagtctgagcgaaattcgacaaaacccggagcaatttaaacagtgggcccgctttaaaagtcgtgcgttaactgacttcactttagaacttagtgcgcgcgtaaaagccattcgcggtccacatattaaaactgcacgaaatatttttgcacttccggtaatacaacctgaaagtgaagcctggtttgcacagaattatgctgatttcctaaaaagctatgactggaccgctattatggctatgccttatctggaaggtgtcgcagaaaaatcggctgaccaatggttaatacaattgaccaatcaaattaaaaacatccctcaggctaaagacaaatctattttagaattacaggcacaaaactggcagaaaaatggtcagcatcaggctatttcttcgcaacaactcgctcactggatgagcctattacaactgaatggagtgaaaaactatggttattatcccgacaattttctgcataaccaacctgaaatagaccttattcgtcctgagttttcaacagcctggtatccgaaaaatgattaatcgcatcgtatcgttttttatattatgtctggtgttatgcatacccctatgcgtagcgtactttcactctggtgaactgatgatgaggttcgttttcttctggccgttttttatgtccattatgtggattgttggcggcgtctatttctgggtctatcgtgaacgccactggccgtggggagaaaacgcaccagctccccagttgaaagataatccgtctatctccattatcattccctgttttaatgaggagaaaaacgttgaggaaaccatacacgccgctttagcacagcgttatgagaacattgaagttattgccgtaaatgacggttcaacagataaaacccgtgccatcctggatcgcatggctgcacaaattccccatttgcgggtcattcatctggcgcaaaaccaggggaaagccattgcgcttaaaaccggagctgccgcggcgaaaagtgaatatctggtgtgcattgatggcgatgcgttattagaccgcgatgcggcggcatatattgtggaaccgatgttgtacaacccgcgtgtgggtgccgtaaccggtaatcctcgtattcgaacacgttctaccctggtgggtaaaattcaggttggcgagtattcctcaattattggtttgatcaagcgaacccagcgtatctatggaaacgtatttaccgtttccggtgttattgccgcatttcgtcgcagcgccctggcagaagtgggttactggagtgacgatatgatcaccgaagatattgatattagctggaagctgcagttgaatcagtggacgattttttacgagccacgggcactgtgctggatattaatgcctgaaacgttaaaagggctgtggaaacagcgcctgcgctgggctcagggcggtgcagaagtattcctcaaaaatatgacaaggctatggcgcaaagaaaactttcgaatgtggccactgttttttgaatactgtctgacgacaatatgggcctttacctgcctggtcggtttcattatttacgcagtccaacttgccggtgtaccgttaaatattgaattgacacatatcgctgcgacacatactgccggaatattattgtgtacgttatgtttactgcaatttattgtcagcctgatgatcgagaatcgctatgagcataatctgacttcatcgcttttctggattatttggttcccggttattttctggatgctgagcctggcaacgacattggtatcatttacacgagtcatgttgatgcctaaaaagcaacgcgcccgttgggtaagtcccgatcgcgggattctgagaggttaatatgaacaatttaattattacgacccgacaatcgccagtacgtttactggttgattatgttgccacaaccatcttgtggacattatttgctttgttcatattcttattcgccatggatctgctgacgggttattactggcaaagcgaggccagaagccgacttcagttctattttttgctggcagtggcgaatgccgtcgtgttaattgtctgggcgctgtacaataagctgcgttttcaaaaacagcagcatcatgcagcctaccaatatacgccgcaagaatatgcagagagcttagcaatacctgatgagctctatcagcaactacaaaaaagccacaggatgagcgtacacttcaccagccaggggcaaataaaaatggttgtttcagaaaaagcgctagtccgggcataaacacccaaaacaaagcccggttcgcccgggctctgcaccgataatacacttaactgtatgcatgcagcgtacgttggcaaagtgccgaacgtacgcaatcctctttaccgaatcggatgatcccgaccatttcatcttcttcgaaacgttccagcgcgtcacttaatccggagcgcacaccgcgaggtaaatcgcattgtgtgatatcaccgttgacgataaccgtcacgttctccccgaggcgggttaaaaacattttcatttgcgcggcagtcacattctgcgcctcgtcaagaatgacgactgcattttcaaaggtacgtccacgcatataggcgaacggcgcgatttccaccttccctatttccggtcgcaggcagtactgcataaaggaagcccctaagcgccggaccagcacgtcgtagaccgggcgaaaatagggagcaaacttttctgcgatatctccaggtaagaagccaagatcttcatcggcttgcagaactggacgggtgacgataatcctgtcgacatccttatgtatcagggcctctgccgcttttgctgcactgatccaggtttttccgcacccggcttcgcccgtggcgaatatcagctgcttactctcaatagccttcagatagtgcaattgcgcttcatttcgcgcgaggatgggcgaggtatcgcgactgtcgcgagccataccaatggcttctacgccgctcatctgcacaagcgaggtgaccgattcttcttcacgctgcttatggctgcgcgaatcccgtctcagcacacgttttgcctcacgacgagctttgatcactgctttttgtcttcccatggagagcaccttgagttgtttgtattcatcacacgcgccgttggcagcgcgattatgcgcacgaacatcagagggttggcttccttgtaagccatagtttgcttttggataaaatgccgaaaaacggctacgcacaccgtttgcggcgtcggtaacacgagtaaagagaggaagtgagaaaaatacagagtgacgaagttgctaccggaggagaaatctccgcgagtggtggagcgttgcttaacaaaacattgtccagtacaggacgttaccatccgcgatctccatagtgactgactatcactgccgggaacttcctctgctacttaataagtacaacagatctcgcattcattgcaacaatatattcacttatatttaactataaaacaccattttagtgacattagtttctactggaaagatgacagagtgatgacagagatgaaaaaagctgtgtgctttcagcaggatttgcatcaggcatctgtgcacgatcgccgtatgcggcgtgaacgccttatccgcctaccgaacccgcaccgattgtaggcataagaagacgcgcaagcatcgcatcaggcatctgcgcaagaacgccttatccgtctaaaaacattaaacccgcaataacgcgcttccgagataatcgttcgcgtccttcactcccggcagcgcaaaaaaataaccgccgccgataggtttaacgtattcctccagcgcttcgccattgagccttttttgtactgtcaggaagcctttttccagatcgtgttggtaacagacaaacagtagccccatatccagttgcccggagttggtgacgcccagtgaataactgtagccacgacgcagcatcaggctggactcactctccgccgtgcgtggattcgccagccggatatggctgtccagcgcaatcaccttcccttccgggtcgctggcgtaatcaggcacatcatgctcatgctgcattcccagcggcgcaccggtttgcttatcacggccaaaaatcgtctgctgttctttcagcggcgttctgtcccaaaattccactcgaaactgaatcaagcgtactgcctgatagctgccaccgattgtccacgcaggctcctgctgatctgccgttacccacaccactttttgcatcaacttatcattctggctatcgggattggcagtgccgtctttgaaacccagcaaattaatcggcgtctctttgcctttactacgcgccgcgtgatcggaaataaacccttcccgcttccagcgcacgctgagcaaatccggcgtatgtttgatgatatcgcgcagtgcatggatcaccgtgtcctgggtgttggcgcaaatttgtagcaacacatcaccatgacataacgccgcatccagcgagtcgttgggaaaacgcgtcatcttctgcaactttttcggcatctgtggcgcaaggccaaagcgctcatcaaacaatgagtgacccaccgataacgtgatggtgagattatcgggcgcaatgtagccgccaagaatgccggaatcgagtggtggcaggcgcggatttggcgtttctggtgccgctccgccctgagtcagaaaagcaaaacgctgagtcaacaagcgaaacaaccgttcaagatcggctttatcgctggcaagcacatcaaacgccaccagcatcattgcggcctgttgtggcgtcaggatccctgcctgatgcttaccataaaacggctgtttctcattgcgtgcaaccggtgaaagcgtacccggcgcactttgcgttttttgtgcatgagcgaccggacaacttcccgccagcgccagcgcaccaatgcctttcagtaaacgtcggcgtgacggttcattcacgccgtttttatcttcatactgcataatgcttaatccaatcccagcacaccgcgaagttgcgccagatcttccgccagcgcagtaatcggtcctttcagtgcattccggtcggcatcggtcaatttgtcgtaggtttcaaaaccgtctttagtacggtatttcgccagaatggtatcgacctttttaaagttggcatcgacttttgccaacagttccgggttagctttttgcagttgtggacgcagcagatcgacaattttctgcgagccttcaacgttagcctggaaatcccacagatcggtgtggctgtagcgatcttcttcaccgctgattttgctggctgccacttcctcaatcagtccggctgcaccgccgaccacttttgaaggtgggaaagccagttcactgatgcgtttttgcaaatcgaccacatcggtataaagctggtcagcgtactgatccatgcctttggtggtgttgtcgccaaacaatgctttttccagacggtggaaaccggtgaattttggatcagcggctttttgctcgtaatcatcttcacgggcgtcaatgctgccatccagatcggagaacagttcagcaatcggttcaatgcgctcatagtgctggcgcgtcggcgcatacagtgctttcgctttttcgatatcgcctgctttaatcgcgtcggtaaaggctttggtgtcggtcaccagctgcgtggtttccgccatgacatacgctttatatgcagtaattgcaccaccaagacttaacagcacatcactttgcgccgcatccgccgttgcctcacctttgacgatcaacttccctttcgggttagtcagcagaccgcaggtcatatcgtattcgccaggctgtaaattcgccgtcattttctggctaaaaccaggggcgatattttcccgctcttccaccaccatcacgcctttgaggatctcccactccagcgccttctggctatggttctgaataatgaactgtgttttcccggcgttaaccgtaatggtcatcggttcgcactgcttatccgtcacggtcactttgacctgcggcacatcagcggcgttagccataaaagcagaagaaaacagcgcagccacgctcaactgcaatgcgttacggcggaagttaatggtcatgacgagactatccctttaaagtatgttgtaactaagcaagagtttgcgtcgtatttgttacgcggagcgagacgctgtcgcccctgcgcgtggtggcagagcaaatgccaccagcgccgggatgagataaataaaccagacggcgacttcgctgacgctcggcgcttcctgatagccaaaaatcccttccatcagcgtgccaaacagcgagtgagttgagagcaccgcactcatatcgaaggcgatttcctgaaagtggttccacaatccggcttcatgaaatgcgcgaatggcaccagctgccagccctgcggcgacgaagagaataaacaggctggtccatttaaaaaatgcaccaagattgaggcgaataccgccccagtagagcaggaagcctagcaccacggcagtagcaagaccgagcattgcacccagcggcggccagatcccgacatcttgttgaaatgccgccagcaggaaaaagaccgactccagcccttcccttgcaacggcaaaaaagaccatcatcaccagcgcccagccatgatgatttccacgctgcaatgcgctatcgactgcctgctccagttgtactttgacgttgcgcgacactttgcgcatccagaaaaccatccaggtaaggatcaccacggcgatcaccgccacgataccttcaaacagttcctgctctttttgcggaaattcgccggtggtttcgttaatgaagatccccaagcccaggcacaacgcagcggcaagcaacacgccaatccacatcacaccaatccatcggcctcgctgggtacgcttaagatagctggcaatcaaactgacaatcagcgcggcttcaagtccttcgcgcaacataatgagaaacggaacaaacatgccacccacccttaaacgtttttctgagtcaatctatgcaaagaaaagtaaatcgcagtgatagcgattatcattacggtaaagaaaaatacaagcggaatgtttataaaatgatgttgaaatgtaaacaaagagaggtaatgccaggggatataaacgattattccaggtacaaagatgggattgtttacaacgagccatgtgttcttgccggatgccgcgtaaacgccgtatccagccgacaaaactgtccagactcaatgcatcagagcttccatgtaaaactgataagcgggtgtatcaagcaatttcgtccatccgcgattatcaaatctaactttttgcccggaacataataacagctcgggtgttggtggcgtcaaaatcgctgaagcgttccccgaaggccgggacagcagggggcggcggcgattggccgccccctgcgcgctccctgcaccattcaatttatatggcgaggcacattaagggagcgcaacccgctgctgaagccaaacaaaaccgccgcaggctaagtcccttagctttcctgcaaccgtgacggcggagccgaatgatagtgcgcatcggcctcggcaaagcgtttttgcatcgccgctgacggcgctttacccagcaaactaaacactacaatcccaatactgccgaagataaagcccggaataatttcgtacagtcccagccagccgaactgtttccagacgataaccgtcagcgccccgatgatcatccccgccagcgcaccgttgcgcgtcatgcgtgaccacatcaccgagaatagcaccaccggaccaaacgccgcgccaaagcctgcccacgcatagctcactagccccagcacacggttttccgggtttgccgccagcgcaatggccaccagcgccaccaccagcaccatcacacgccctacccacaccagctctttctggctggcatgtttacgcagaaacgctttgtataaatcttcggtaatcgcactggagcacaccagcagctggcaacttaaggttgacattaccgccgccagaattgccgacagcagaatcccggcaatccacgggttaaacagaatttgcgccagttcgataaacacgcgctcggcgttctggtttaccgcgcctgctaccgccgggtgctcattaaagtaagcaatcccaaagaagccgacagccaccgcccctgccaggcagaggatcatccaggtcatactgatacgacgcgcatggacaatgctgtggtgagaatccgccgccataaaacgcgccagaatgtgcggctgcccgaagtaacccagcccccagcccatcagcgagataatggcaacaaagttcagacctttgagcatatcaacgttttcgatgctcttttgtttgatcacttccagcgagtcaccaaagccaccgacactgataatgacgataaccggtgtcaggatcagggcaaaaatcatcaggctggcctgtacagtatcagtccagctcaccgcgaggaaaccgccaataaaggtgtaaaggatcgtcgccgcagctcccgcccacagagccgtttcgtagctcatgccaaaggtactttcaaacagacgcgcgcctgccacaatgcccgaagcgcaataaatggtgaagaacagcaaaataaccagcgcggagataatgcgcaaaatgcggcttttatcttcaaagcgcccggtgaaataatccggcagggttaaggcgttattgttgtattcggtatgcacacgcaaccgcccggccaccagcttccagttgatccacgcgcctaatgtcaggccaatggcgatccagctttcggaaatcccggaaagaaaaaccgcgcccggcaaccccattaacagccagccgctcatatccgacgcacccgccgataatgccgtcacgaatggcccaagactacgaccgcccagaatatagtcgtcaaagtttttcgttgatcgccaggcgataaacccaatcaatatcatgccaaagatatagacacaaaatgtcaccaacatcggtgtgctaatagccatctaaagtctccaaaaaattattatcggcaatgtcgaaacttgccgttatatctgccaccggaacggggtaacagagtttatgttttaccagggcgaccgtatcctgccggaagcgctggttattcacaatcgatttaacacaccatttacattaaattttagtgctcagcgacactatttttcatcaggttgcactctctcacattttttgcggttgcacctttcaaaaatgttaactgccgcagagaaaaagtctgagttatttttttaatccctgtcatatcgatttcttttattaacatttcattcatttttaagcttgctacgcaggtcacatttaacatagttgcacaaagttgcaacatcatggatatttcacgataacgttaagttgcacctttcagaacaacaggagtaatggcatgggaaccaccaccatgggggttaagctggacgacgcgacgcgtgagcgtattaagtctgccgcgacacgtatcgatcgcacaccacactggttaattaagcaggcgattttttcttatctcgaacaactggaaaacagcgatactctgccagagctacctgcgctgctttctggcgctgccaatgagagcgatgaagcaccgactccggcagaggaaccacaccagccattcctcgactttgccgagcaaattttgccccagtcggtttcccgcgccgcgatcaccgcggcctatcgtcgcccggaaaccgaagcggtttctatgctgctggaacaagcccgcctgccgcagccagttgctgaacaggcgcacaaactggcgtatcaactggccgataaactgcgtaatcaaaaaaatgccagtggtcgcgcaggtatggtccaggggttattgcaggagttttcgctgtcatcgcaggaaggcgtggcgctgatgtgtctggcagaagcgttgttgcgtattcccgacaaagccacccgcgacgcgttaattcgcgacaaaatcagcaacggtaactggcagtcacacattggtcgtagcccgtcactgtttgtgaatgccgccacctgggggctgctgtttactggcaaactggtttccacccataacgaagccatcctctcccgctcgctgaaccgcattatcggtaaaagcggtgaaccgctgatccgcaaaggtgtggatatggcgatgcgcctgatgggcgagcagttcgtcacgggtgaaaccatcgcggaagcgttagccaatgcccgcaagctggaagagaaaggtttccgttactcttacgatatgctgggcgaagctgcactgactgccgcagacgcacaggcgtatatggtttcctatcagcaggcgattcacgccatcggtaaagcgtctaacggtcgtggcatctatgaagggccgggcatttcaatcaaactgtcggcgctgcatccgcgttatagccgcgcccagtatgaccgggtaatggaagaactttacccgcgtctgaaatcactcaccctgctggcgcgtcagtatgatattggtattaacatcgatgccgaagaggccgatcgtctggagatctccctcgatctgctggaaaaactctgtttcgagccggaactggcaggctggaacggcatcggttttgttattcaggcttatcaaaaacgctgcccgttggtgattgattacctgattgatctcgccacccgtagccgtcgccgtctgatgattcgtctggtgaaaggcgcgtactgggatagtgaaattaagcgtgcgcagatggacggccttgaaggttatccggtttatacccgcaaggtgtataccgacgtttcttatctcgcctgtgcgaaaaaactgctggcggtgccgaatctaatctacccgcagttcgcgacgcacaacgcccatacgctggcagcgatttatcaactggcaggtcagaactactatccgggtcagtacgagttccagtgcctgcatggtatgggcgagccactgtacgagcaggtcaccgggaaagttgccgacggtaaacttaaccgaccgtgtcgtatttatgccccggttggcacacatgaaacgctgctggcgtatctggtgcgtcgcctgctggaaaacggtgctaacacctcgtttgttaaccgtattgccgacacctctttgccactggatgaactggtcgccgatccggtcactgctgtagaaaaactggcgcaacaggaagggcaaactggattaccgcatccgaaaattcccctgccgcgcgatctttacggtcacgggcgcgacaactcggcagggctggatctcgctaacgaacaccgtctggcctcgctctcctctgccctgctcaatagtgcactgcaaaaatggcaggccttgccaatgctggaacaaccggtagcggcaggtgagatgtcgcccgttattaaccctgcggaaccgaaagatattgtgggctatgtgcgtgaagccacgccgcgtgaagtagaacaggcgctggaaagtgcggttaataacgcgccaatctggtttgccactcctccggctgaacgcgcggcaattttacatcgcgctgccgtgctaatggaaagccagatgcagcaactgattggtattctggtgcgtgaggccggaaaaaccttcagtaacgccattgccgaagtgcgcgaagcggtcgattttctccactactacgccggacaggtgcgggatgatttcgctaacgaaacccaccgtccattagggcctgtggtgtgtatcagtccgtggaacttcccgctggctattttcaccgggcagattgctgccgcactggcggcaggtaacagcgtgctggcaaaaccggcagaacaaacgccgctgattgccgcgcaagggatcgccattttgctggaagcgggtgtaccgccaggcgtggtgcaattgctgccaggtcggggtgaaaccgtgggcgcgcaactgacgggtgatgatcgcgtgcgcggggtgatgtttaccggttcaaccgaagtcgctacgttactgcaacgtaatatcgccagccgcctggacgctcagggtcgccctattccgctcatcgctgaaaccggcggcatgaacgcgatgattgtcgattcttcagcactgaccgaacaggtcgtcgtggatgtactggcctcggcgttcgacagtgcgggtcagcgttgttcggcgctgcgcgtgctgtgcctgcaagatgagattgccgaccacacgttgaaaatgctgcgcggcgcaatggccgaatgccggatgggtaatccgggtcgcctgaccaccgatatcggtccggtgattgatagcgaagcgaaagccaatattgagcgccatattcagaccatgcgtagcaaaggccgtccggtgttccaggcggtgcgggaaaacagcgaagatgcccgtgaatggcaaagcggcacctttgtcgccccgacgctgatcgaactggatgactttgccgaattgcaaaaagaggtctttggtccggtgctgcatgtggtgcgttacaaccgtaaccagctaccagagctgatcgagcagattaacgcttccggctatggtctgacgcttggtgtccatacgcgtattgatgaaaccatcgcccaggtcactggctcggcccatgttggtaacctgtatgttaaccgtaatatggtgggcgcagtggtgggtgtgcagccattcggcggcgaagggttgtccggtaccgggccgaaagcaggcggtccgctctatctctaccgtctgctggcgaatcgcccggaaagtgcgctggcagtgacgctcgcgcgtcaggatgcagagtatccggtcgatgcacagttgaaagcagcattgactcagccgctaaatgcactgcgggaatgggcagcaaatcgtccagaattgcaggcgttatgtacgcaatatggcgagctggcgcaggcaggaacacaacgattgctgccggggccgacgggtgaacgcaacacctggacgctgctgccgcgtgagcgcgtgttgtgtattgccgatgatgagcaggatgcgctgactcagctcgccgccgtgctggcggtgggcagccaggtactgtggccggatgacgcgctgcatcgtcagctagtaaaggcattgccatcggcagtcagcgaacgtattcaactggcgaaagcggaaaatataaccgctcaaccctttgatgcggtgatcttccacggtgattcggatcagcttcgcgcattgtgtgaagccgttgctgcgcgggatggcgcaattgtttcggtgcagggttttgcccgtggcgaaagcaatatccttctggaacggctgtatatcgaacgttcgctgagtgtgaataccgctgccgctggcggtaacgccagtttaatgacgatcggttaaacaggtagccggaggatgttacaacctcctccggcatctttaacgtggtcgaatcccctcaataataatccgctgcacgttttcaaccgtttgattgaaaaatacctcatcgcgcaacgtcgcgcctgtcaccgcctccacctgaggggcaaaatcggcgtaatgttgagtggaagcccaaatcataaaaatcaaatgctgcggatcaatcggcgcgagtttgccgcttttgacccaaccggcaatcagcgccgatttctcatcaattaatgccttcaaatcgcccgtcagttcatccattaacagcggcgcgcctgccagcatctccatacagaacaggcgcgaagcctgcggataatcgcgggagacttccagcttcagacggatgtactctttgatcgccgccagcggggcgaaatcttctcgaaacgcttttaacggtgccagccagatatcgagaatctgccgcagcacggcaatatacagcgcctcttttgacggaaagtaatacagcagattggtttttgaaacacccgccaactctgcgatctgctccagccttgtgccgtgaaaaccgaattgtgaaaaagtgtccagtgctgcgctaagaatcgcttttttcttcgcgcttactgcgcgcgaacgtttacccgttgttttcactgcgccttgcgtcatgcgctctcccctcttgtagattggcaacaggatagcaaaacccccgcccggcctcgaccttctgcactctcatcgcgcacagatgcatgttttatgtgcaactgttttgaccgtttagtccactttttaccagatattttagataacttagcattaacacattaataacattcacttttaaaaactggcatccactttgcaaacaagccattacgcggctgaaaaggatatgcaggacgcagtgccccgtctgactttcactttacgagacgaagagaggttgatgatgaaaattggcgtattcgtacctattggcaacaacggctggctcatttcgacccacgcgccgcagtacatgccgacctttgaactgaataaagccattgtgcaaaaagcggagcactaccatttcgatttcgccctgtcgatgatcaaactgcgtggctttggcggcaaaactgagttctgggatcacaaccttgagtcgttcaccttgatggcggggctggcagccgtcacctcacgcattcagatttacgcgacagctgccaccttaacgttacctccggcaatcgtcgcccgtatggccgcaaccattgactccatctctggcgggcgttttggcgtcaacctcgtgactggctggcaaaagcccgagtatgagcagatgggtatctggcctggcgatgactatttctcccgtcgttacgactatctcaccgaatatgttcaggtgctgcgcgacctgtggggctcggggaaaagcgattttaaaggcgattttttcaccatgaatgattgtcgcgtcagtccgcaaccgagtgtacccatgaaagtgatctgcgccgggcaaagcgacgctggcatggcgttctccgcccagtatgccgatttcaacttctgtttcggcaaaggcgtaaatacacccacggctttcgccccgaccgctgcgcggatgaaacaggccgcagagcaaaccgggcgcgacgttggctcttatgtattgtttatggtgattgccgatgaaaccgacgatgccgctcgcgccaaatgggaacactacaaagcgggcgcggatgaagaggcgttaagctggctaaccgaacaaagtcagaaagatacccgctccggtactgacaccaacgtccgtcagatggccgatcccacttcggcggtaaacatcaatatggggacgttagtcggttcttacgccagtgtcgcgcgcatgttagatgaagtcgcaagcgtgcctggtgccgaaggcgtgctgttgaccttcgatgattttctgtcgggaatcgaaaccttcggcgagcgcattcaaccactgatgcagtgccgcgcccatctccctgcgctgactcaggaggtggcatgatgacgaccttaaccgctcgaccggaagccattaccttcgatccgcagcaaagtgcgctgatcgtggtggatatgcaaaacgcttatgccacgccaggaggctacttagatctcgccgggtttgatgtctcaaccactcgcccggtcattgccaacattcaaaccgccgtgaccgcagcgcgagcggcagggatgctgatcatctggtttcaaaatggctgggatgaacagtatgtcgaagcaggcggacccggctcaccgaattttcataaatcgaacgccctgaaaaccatgcgtaagcagccgcagctgcaggggaaattgctggcgaaaggctcctgggattatcaactggtggatgaactggtgccgcagcctggcgatattgtgctgccgaagccgcgctacagcggtttcttcaatacgccgctggacagcattttgcgcagccgtggaatacgccatctggttttcaccggtatcgctaccaacgtctgcgtcgaatcgacgctacgcgatggcttttttctggagtatttcggcgtggtgctggaagacgcaacacaccaggcggggccggaatttgtacagaaagccgcgttgttcaatatcgaaaccttttttggctgggtcagcgacgtcgaaacgttctgcgacgcgctttctcccacgtcctttgctcgtatcgcttaaggagtttaacgatgccaaaatccgtaattattcccgctggcagcagcgcaccgctggcccccttcgttcccggcacgctggctgatggcgtggtgtatgtctccggtacgctggcttttgatcaacataataacgtgctgtttgccgatgacccaaaggcgcaaacccgccacgttctggaaactatccgcaaggtgatcgagacggcgggtggcacgatggcggatgtgaccttcaacagcatctttattaccgactggaaaaattacgccgcgattaacgaaatctacgccgagttttttccgggtgataaaccggcgcgattctgcattcagtgcggactggtaaaacctgacgcgctggtggaaatcgccacaattgcgcatatcgccaagtgaggccgcgatgaaactatcactctcacctcccccttatgctgatgcacccgtagtggtgttgatttcgggtcttggcggtagcggcagttactggttaccgcaactggcggtgctggagcaggagtatcaggtagtctgttacgaccagcgcggcaccggcaataatcccgacacgctggcagaagattacagtatcacccagatggcagcggaactgcatcaggcgctggtagccgcagggattgagcgttacgcggtggtcggccatgcgctcggtgcgctggtggggatgcagctggcgctggattatcccgcgtcggtaactatgctggtcagcgttaacggctggctacgaataaacgcccatacgcgccgctgttttcaggttcgcgaacgattactgtatagcggcggcgcacaggcatgggtggaagcgcagccgttgttcctctatcccgccgactggatggcggcccgcgcacctcgcctggaggcagaagacgcgctggcactggcgcattttcagggcaaaaataatttactgcgtcgacttaacgccctcaaacgcgctgactttagtcaccatgcggatcgcatccgctgcccggtgcaaatcatctgcgccagtgatgatctgctggtgccatccgcatgttccagtgaacttcatgccgccctgcccgatagccagaaaattgtgatgcgctatggcggacacgcctgcaacgtgaccgatcccgaaacgtttaatgctctgttactcaacgggcttgccagcctgttacatcaccgtgaagccgccctgtaaggaattgctatgaacgaagccgttagcccaggtgcgcttagcaccctgttcaccgatgcccgcactcacaacggctggcgggagacacccgtcagcgatgagacgttacgggagctttatgccctgatgaaatgggggccgacatcagctaactgttctccggcacggatcgtgtttatccgcactgcagaaggaaaagaacgtctgcgcccggcgctttccagcggcaatctacaaaaaaccctgaccgcgcccgtcaccgctatcgttgcctgggacagtgaattttatgaacggttaccacaactgtttcctcacggcgatgcccgcagttggtttacctccagcccacaacttgcggaagaaacagcgtttcgcaacagttccatgcaggcggcctatctgatcgtcgcctgccgtgcgctgggactggataccgacccgatgtcgggttttgaccgtcaacacgttgacgacgccttttttgcgggcagcacgctgaagagcaatctgctgattaatatcggctatggcgatagcagcaaactttttgcgcgcctgccacgtctgtcctttgaagaagcctgcgggctgttgtaaggagcaaaccatgaacattgtcgatcaacaaacctttcgcgatgcgatgtcctgtatgggcgcggcagtcaatatcatcaccacggatggtccagccgggcgcgccgggttcaccgccagcgcggtctgcagcgtgaccgacacgccgcctacattactggtgtgcctgaatcgtggggcgtccgtctggccggtattcaatgaaaatcgaacgctgtgtgtaaatacactgagcgccgggcaggagccgctttcaaatctttttggcggcaaaacgcccatggaacaccgctttgccgccgcccgctggcagacgggtgtgaccggatgcccgcaactggaagaggctctggtttcgtttgactgccgtatcagccaggtggtgagcgtcggcacccacgacattctgttttgcgccatcgaagcgattcatcgtcacgccacaccctacgggctggtgtggttcgatcgcagttatcacgcgctgatgcgccctgcttgttaacctcctaaaggagacagctgatggcaatgttcggttttcctcactggcagttaaaatcgacctctacagagagcggcgtggtcgcgccgtatgaacgattgccgtttgctcagacggcagtaatgggcgttcaacacgcggtggcgatgtttggcgcgacggtgttaatgccgattctgatggggctggatcccaatctttccattttaatgtcggggatcggcacgttactgtttttctttattaccggcgggcgcgtccccagttatctcggttccagcgcggcttttgtcggcgtggtgattgccgcgacgggctttaacggtcagggcattaacccgaatatcagcattgcgctgggcgggattatcgcctgtgggctggtttataccgtcattggcctggtggtgatgaaaattggtacacgctggattgaacgactaatgccgccggtggtgacgggtgcggtggtgatggcgattggcctgaacttagcgcctatcgcagtgaaaagtgtatcggcttcggcctttgatagctggatggcggtaatgacggtgctgtgtattgggctggtggcggtgtttacccgtggcatgatccagcggttattgattctcgtaggtttaattgtcgcctgtctgctgtatggcgtgatgaccaaccttttagggctgggaaaagccgtcgattttactctcgtcagccatgctgcctggttcggtttgccacatttttccactcctgcttttaatagtcaggcaatgatgctgattgcgcccgtggcggtgattctggtggcggaaaacttaggtcatctcaaggcggtcgccgggatgaccggacgcaatatggacccgtatatggggcgggcattcgtcggtgatgggctggcgacgatgctttctggttctgtcggtggcagcggcgtaaccacctacgccgagaatatcggtgtaatggccgtgacaaaagtctactcgacgctggtgtttgtcgctgctgccgtcatcgccatgctgttgggcttttcaccgaaatttggcgcgctgattcataccattccggccgcggtgattggtggtgcatcaattgttgtgttcgggctgattgccgtcgcaggcgcaaggatatgggtacaaaaccgtgtcgatttaagccagaacggtaatttgattatggtcgcagtaaccttagtgctgggcgcgggtgattttgctctcacgctgggcggttttacgttgggagggattggtacagcaacctttggcgcgattttactcaatgcgttgttaagcagaaagttggttgacgttccaccgccagaagttgttcatcaggagccataaacagaaaaccgccgggattaccggcggtgatgactttttgacgagcctaagaaaaaaatgcattcgtcattgattagcccggctagttgtcgcttttgccgtgactgctcttgccaccttttttacctgcttcagatgcgcgctgcgggtcattcttgaaattacccccgctgtgctgtccaccttttttacctgcttctgatgctctttcgcggtcttctgcaaaattgccggaaccgcctcgatggtttgccattactgacctccgtctgggtatagacatcatattgcatagaattaacgcggcgtatggcggctgccatattttcgctacgtgggactaagcttagtgaactgacgcgggcagacccgcgtttggtaatatcctgcaacagcttcttagcgagaatagatatcatctcaaataattatccataagccgctcttatgattaaaaaaacgcgatgagataaaaatgtgtcattttgcgacaaaattacgtgcttgtgaaagttgttataaatcaaataagtggttgtgaaatttgcactctgaaaaggacgtcttatctttaaataagtggtagcgaatcgctacggaatagagataacacgaggagtggttagaaatggctaaagttctggtgctttattattccatgtacggacatattgaaacgatggcacgcgcagtcgctgagggtgcaagcaaagtcgatggcgcagaagttgtcgttaagcgtgtaccggaaaccatgccgccgcaattatttgaaaaagcaggcggtaaaacgcaaactgcaccggttgcaaccccgcaagaactggccgattacgacgccattatttttggtacacctacccgctttggcaacatgtccggtcaaatgcgtaccttcctcgaccagacgggcggcctgtgggcttccggcgcactatacggaaaactggcgagcgtctttagttccaccggtactggcggcggtcaggaacaaactattacttcaacctggacgacccttgcgcatcacggcatggtaattgtccccattggctacgcagcgcaggaattatttgacgtttcacaggttcgcggcggtacgccgtacggcgcaaccaccatcgcaggcggtgacggctcacgccagccaagccaggaagaactgtctattgctcgttatcaaggggaatatgtcgcaggtctggcagttaaacttaacggctaatcttcaacaggaggatacgcatgccaactcaagaagcgaaagctcatcacgtcggtgaatgggcatctctgcgcaatacgtcgccggaaatagccgaggccattttcgaagtcgccgggtacgacgaaaaaatggcggaaaagatttgggaagaaggtagcgatgaagtgttagtcaaagcctttgctaagaccgataaagattcgcttttttggggcgaacagacaatcgaacgtaaaaacgtttaaccagcgactcccccgcttctcgcgggggagttttctgttatttcaccgcttcattcaacacgctatcaaatttatccatcgggcagaaaccgttggcatctatcgggcaaccgcttaattccagcgtcacacgctgagcaggtgcctgcagggttaacgcatcggcattacgtaactgttccgcactctgatacacatattcaattttcatcaaatcgcgattggctttgctgtcatgccaacgctggaaaacgattttgccgccaatcggcgtgcgttcgttctggtcatgcaactgatacggtttgaaatccagcgccgttaacagagaggcaatgttggagtcgtgcccaaccaacactgtaattttcggtgcgctggtgcgatcggtgaccagagctttgtcgatataactgaccagcggtttcgcaacattgcgcgccacttccggtgaggtaaacaggctgtcctggtagccgtttttaagcttcgacaacaccttccactgctggtcagatttgatttctccccaggccacctgatccatcggaaaaccttcgtaatattgcaaagtaaacgcatctaccagcgagttgccgactttcagcggcccggaaacacctggttcttgttgatacttcgcgctaaaggtatttttgccatccaccagcgaacactgttgtttctctttacaggcaggggaatctttatagttaacgattttttccagtagctggtagctgtcggtaagctggagtttgctgagctctttctccattgccgccaccgcctgttcactgaatgcggcggaatcatcggtgatcaccgggttaaaggttgggtccatagtgcccattttttcctggtgatgcacaggaatatcacaccccggaaatgcgccggtaataaagaactgtgcggtcgcaacggtacgttgcagactattggcataggcataaacggtgtacggcggcgggcattcccccgatttcaccatcccctgctctgccagccattcacgcatgtaatggcccatatacacttcgagcacgccacctttggtggtgagttgcccaccggggacgtcccattctggccatttattcggcgtcgactgctccagcacactgccattgttcgccagcggcgcacgtaagttatggcggctcatcatgagcacttgctgtagctgatagccttccggtacggtttgtgcctgagcgtttgaagcgagtaaaactatccctgccacagctgcggcgattagcgttttgttcattcctggcacctcttttgttatcaatcactaaagagtgtgacagaaatatgacttttttccgggaacaggttcgcaaaatggcttgttgaacgcctgtttttctatatacatcttcaaaaacaggcaaggtttgacgcaaactatgcctgattagcccctgcctcgcgtacgccgctgataattgcacctgtggctaaacagaatatctgcggcgttaccaatacagagacaatatttaccaataaaaaagtgtgagactaataacaatggtttttagcatatgcctttgccattaaattgcataacgatttaaatagtcgagttgcgcattcatttccttattttttaacttataagcctgagcaaaaagttcaggagggaggtaaacatcataatgattgccagcgtttattaaataaccatactcaaggtcgtcatctgttgaaaaggattcattccccaaggagattgatgccatattactattaacaataaataatgagcaaatgctatctgaaagaacagcaagaaaattcttcaccgctttaatcctatccgacgtgtcggtatctaaagcaagcaagttcttgttatcattaaatataaactcgggtaaatgcaggatacatttttcgttattcaagcaactatcaatgaattgttttttaaaaaacagaaagctccatgacataagactactctgcccctgaattttgttgtcagattgtagattaacgccaaataacgtctttacatcttccctgagattatagaatgccgtatcaacaagagcctcgatcgtttgtttatcaacaattttaataaactcttcgtatacttgcttttgcgtcttatggccgcccagcgcccatgaatactcatgttcttttaaaaccagtatggctcttaacagacaatatccatcgccatctactggagcgtattttaatccatatgttttattaatttcactctgaataaaagatatgccagacaaatcaataccagtatctaaatcagatattcccggcgtatttatctgttctggctggatactcatattttcatcatctaaacaatactcagaaaaaacatcatcacacgggtaatgactccaacttattgatagtgttttatgttcagataatgcccgatgactttgtcatgcagctccaccgattttgagaacgacagcgacttccgtcccagccgtgccaggtgctgcctcaga

SEQ ID NO: 76 - DNA, 28638 bp, Escherichia coli
  source 1..28638: mol_type = genomic DNA
cagagtcaagcattttttgcttttctctgttgagattctcaggagaaccccgctgacccggcaacgtgtttgccgttgttccgtgtcagtggtggcgcattatagggagttattccggcctgacaagcgaaaaatataaaaactttatcgttcgctcatttttcaggcaaaacatcttaaatatagtcttttccgtctaacttatagacaaaaacgagccccgaagggctcgttttatcatttactggacggcgacaatccggtcttcattaacttccaggcgaatcactttacccggaaccaattcaccagacagtatttgctgtgccagcgggttttcgatctgctgctggatagcacgtttcaaaggacgtgcaccatagactggatcgtaaccgttctcgctcagcagtttcagcgcctcgtcagaaatgtggatttcataaccacgttcttccagacgtttgtacagacgtttcaactgaatctgcgcaatcgaggcaatgtgctgttcacccagcggatggaagaccaccacttcatcaatacggttaatgaattccggacggaagttatggcttaccacaccgagcaccagctctttcatgtgcgcataatccagttcaccgaagcgttcctgaatcaaatcggaaccgaggttagaggtcataatgacaaccgtattacggaagtcgaccgttctcccctgcccgtcagtcagacgaccatcatccagtacctgcaacagaatgttgaagacatccggatgcgctttttccacttcatccagcaggatgacggaatacggacgacgacgcacagcttcggtcaggtagccaccttcttcataaccgacatatcccggaggcgcaccaaccagacgagacaccgagtgtttctccataaactcggacatatcgatacggaccatcgcctcgtcgctatcaaacataaagttcgccagcgccttacaaagctcagttttccccacacccgttgggccgaggaacaggaatgaaccaatcgggcgatttggatccgccaaccccgcacggctacggcgaatagcgttagataccgcatcaaccgcttcgttctgaccaatgacgcgatggtgcagttcttgctccatacgcagcagtttttcgcgctcgctttccatcatgcgagaaaccggaatccccgtccaacgcgccagcacttcagcaatttcggcgtcggtcactttattacgcaacagacgcatagttttgccttcgagctgcgttgcggcttccagttgcttttccagttccgggattttgccgtattgcagttcagacatccgcgccaggtcccccacacggcgagcctgttcaatagcgattttcgcctgttccagttccgctttaatggtctgcgtaccagaaagcgatgccttctctgctttccactcttcttctaactcggagtactgacgttctttgtcgctcagttcttcgttgagcatatccaggcgttttttactggcttcatcagactctttcattaacgcctgttgttccagtttgagctggatgatacgacgatcgagtcggtcgagttcttctggttttgagtcaatctgcatacgaatgctggatgctgcttcatcgatcaggtcgatggctttatccggcagctgacggtcagcaatgtagcgatgagacaacgtcgccgctgcaacaattgccgggtcagtaatttgcacatggtggtgcaattcgtaacgttctttcaggccacgcagaatcgcaatggtatcttcaacagaaggctcggcaacaaacactttctggaaacgacgttccagcgcagcatctttttcgatgtactggcgatattcgtcaagcgtcgtggcacctacgcagtgcaattcaccacgcgccagcgccggtttcagcatgtttccggcgtccattgcgccatcggctttacccgcgccgaccatggtatgtaattcgtcgataaacaggatgacgttgccttcctgtttggcaagatcgttaagcacgccttttaaacgttcttcaaactcaccgcgatatttcgccccagccaccagcgcgcccatatccagcgccagtacgcggcggcctttcaatccttccggcacttcgccgttgataatacgctgcgccagaccttcaacgatggcagttttaccgacgccgggttcaccaatcagtaccgggttatttttagtacgacgttgcagcacctgaatggtacggcgaatttcttcatcacgaccaatcaccggatcgagtttgccctgttcggctcgttcggtaaggtcgatggtatattttttcaaagcctgacgttggtcttcagcaccttgatcgttcacgctttcacctccacgcatttgttcaatcgcttgagtaatgttggcggtggtcgcccctgctgctttcaggatgtcggccagcgtgccgcgagactcaagtgccgccagaacgaacagttctgacgagataaagttatcaccacgtttttgcgccagcttgtcgcaaagattaagaacgcgcaccagatcctgtgatggctggacatcaccaccagtaccttcaacctgcggtaaacgatttaatgcctgattgatatctgtgcgcaactggccagcatttatgccagcggatgttaataaaggactaaccgaacccccttcctgattcagcagggcgctcattaaatgaagtggttcgataaattggttgtcgtgcccgagtgcaagtgattgggcatcggcaagagcaagctggaatttattagtaagacgatccagacgcataactcctcccataacggatcaaagttgctactggagattaaatgaggtcatccctcaattattcaaggttattgaccagattaatgtgaaaagaaaatcacgcgtaccggatcgtcttgattctttaggttatatcagccaaatgaaacttgccatacgaccggtggtcttgtcgcgacgataagagaagaaagtctcattttccgtatatgtacaacggtcgccgccgaaaatttgctcaacacccacgttcgccagacgctgccgggcaagctgataaatatccgccagatacttatcaccatgctgaatgaaagctgcacttgctttagcgtctactgccataaacgcctcgcgaacctccacccccacttcgaacgcgcgtggaccaattgccggccctaaccaggcgagaatattttccggattatcagcaaaacaggaaaccgtctcttccagcacgcctgcgcacagtccacgccagccagcatgagcggcggcgacttccgttcccgctcgattgcaaaacagcacagggaggcagtcggcagtcatcactgcgcaaaccgtgccgggcgtattgctataagaggcatctgctcgttttgaggcataaggttcgccagtaagcttaagcacatctttgccgtgtacctgctcaagccagaccggtttagaaggcaaattgcccgcagcaaaaagtcgcttgcgattctcctcaacgtgatccgggttatcgccacaatgggcaccgaggttgagcgagtcatacgggggcaagctcacgccgccgatacgagaagagctacaggccgcaacaccttttggtagcggccactgcgggacaatcagcttactcataaccagtccacttcatccttatgctcttcgaaatcggcgcgcatcacctcaatcagctccaccatatcttgtggaataggcgcatgccattccatttcgatgccggagatcgggtgataaagacgcagcatggttgcatgaagcgcctggcggtcaaacttacgcagcatggagataaatgcttccgaagcaccttttggcggacgcggacggccaccataaaccggatcgcccaccagcggatgagtgatatgggccatatgcacgcggatctggtgcgtacgtccagtttccagacgcaaccgcagacgcgtgtgcacacggaagtgttccatgatgcgatagtgagtcaccgccggtttgcccatcggatgcaccgccatgtgagtacgtttggtcgggtggcggctgatgggttcatctactgtaccgccagcggtcatatgaccaatcgccaccgcttcatactcacgagtaatttcacgccgttgcaaagattcgactaaacgcgtctgagccggaacggtttttgccacaaccatcaggccagtggtgtctttatccagacgatggacgatgcccgcacgtggtacatcggcaatgggcggatagtaatgaagcaacgcattcagtaccgtgccatccgggttacccgcgccaggatgtaccaccaggtcgcgcggtttattaatgacgatgatatcttcatcttcatagacgatatccagcgggatatcctgcggttcaaaacgcgcttcttcttcaatctcagcattgatggcaacctgctcgccacccaatactttttctttcggcttatcacaaactttgccgtttaccagcacgcgctggtcgaggatccattcttttattcgcgaacgtgaataatccgggaacatttcggccaaagcctgatctaagcgttgaccgagttggttttcggacaccgttgcagtgagctgtactcgttgtgccatatatactgcttcttcgtttatcgttggggttttacggctttgccgtttaatatagtgtgctattgtagctggtcttaaccgggagcaggaacagagaatctcccgtattacattttgaggaaagtcaaaacgtcatgacgcgcatgaaatatctggtggcagccgccacactaagcctgtttttggcgggttgctcggggtcaaaggaagaagtacctgataatccgccaaatgaaatttacgcgactgcacaacaaaagctgcaggacggtaactggagacaggcaataacgcaactggaagcgttagataatcgctatccgtttggtccgtattcgcagcaggtgcagctggatctcatctacgcctactataaaaacgccgatttgccgttagcgcaggctgccatcgatcgttttattcgccttaacccgacccatccgaatatcgattatgtcatgtacatgcgtggcctgaccaatatggcgctggatgacagtgcgctgcaagggttctttggcgttgaccgtagcgatcgcgatcctcaacatgcacgagctgcgtttagtgacttttccaaactggtgcgcggctatccaaacagtcagtacaccaccgatgccaccaaacgtctggtattcctgaaagatcgtctggcgaaatatgaatactccgtggccgagtactatacagaacgtggcgcatgggttgccgtcgttaaccgcgtagaaggaatgttgcgcgactacccggatacccaggctacgcgtgatgcgctgccgctgatggaaaatgcataccgtcagatgcagatgaatgcgcaagctgaaaaagtagcgaaaatcatcgccgcaaacagcagcaatacataacagaaacctgaaatacaaaacggcagcccttgagctgccgtttttttattctgttagttgtgaaactgaagcgatttagtcactatcgatctcatcaaatatggctcgctttgagatattcctcaagtaaaaaaacacctcttcctgcgatttctcacaaaaaagattcgttgacaaaaagtgacaaaattatgagattcccatcacacattttgacatcaggagcggtatgctgaattcaccaagacgggaagacaagaggtaaaatttatgacaatgaacattaccagcaaacaaatggaaattactccggccatccgccaacatgtcgcagaccgtctcgccaaactggaaaaatggcaaacacatctgattaatccacatatcattctgtccaaagagccacaagggtttgttgctgacgccacaatcaatacacctaacggcgttctggttgccagtggtaaacatgaagatatgtacactgcaattaacgaattgatcaacaagctggaacggcagctcaataaactgcagcacaaaggcgaagcacgtcgtgccgcaacatcggtgaaagacgccaacttcgtcgaagaagttgaagaagagtagtcctttatattgagtgtatcgccaacgcgccttcgggcgcgttttttgttgacagcgtgaaaacagtacgggtactgtactaaagtcacttaaggaaacaaacatgaaacacacaccgtttttcttcgcattcttttttaccttcccctgaatgggaggcgtttcgtcgtgtgaaacagaatgcgaagacgaacaataaggcctcccaaatcggggggccttttttattgataacaaaaaggcaacactatgacatcggaaaacccgttactggcgctgcgagagaaaatcagcgcgctggatgaaaaattattagcattactggcagagcggcgcgaattggccgtcgaggtaggaaaagccaaactgctctcgcatcgcccggtacgtgatattgatcgcgaacgcgatttactggaaagattaattacgctcggtaaagcgcaccatctggacgcccattacattactcgcctgttccagctcatcattgaagattccgtattaactcagcaggctttgctccaacaacatctcaataaaattaatccgcactcagcacgcatcgcttttctcggccccaaaggttcttattcccatcttgcggcgcgccagtatgctgcccgtcactttgagcaattcattgaaagtggctgcgccaaatttgccgatatttttaatcaggtggaaaccggccaggccgactatgccgtcgtaccgattgaaaataccagctccggtgccataaacgacgtttacgatctgctgcaacataccagcttgtcgattgttggcgagatgacgttaactatcgaccattgtttgttggtctccggcactactgatttatccaccatcaatacggtctacagccatccgcagccattccagcaatgcagcaaattccttaatcgttatccacactggaagattgaatataccgaaagtacgtctgcggcaatggaaaaggttgcacaggcaaaatcaccgcatgttgctgcgttgggaagcgaagctggcggcactttgtacggtttgcaggtactggagcgtattgaagcgaatcagcaacaaaacttcacccgatttgtggtgttggcacgtaaagccattaacgtgtctgaccaggttccggcgaaaacgacgttgttaatggcgaccgggcaacaagccggtgcgctggttgaagcgttgctggtgctgcgcaaccacaatctgattatgacccgtctggaatcacgcccgattcacggtaatccatgggaagagatgttttatctggatattcaggccaatcttgaatcagcggaaatgcaaaaagcattgaaagagttaggggaaattacccgttcaatgaaggtattgggctgttacccaagtgagaacgtagtgcctgttgatccaacctgatgaaaaggtgccggatgatgtgaatcatccggcactggattattactggcggttgtcattcgcctgacgcaataacacgcggctttcactctgaaaacgctgtgcgtaatcgccgaaccagtgctccaccttgcggaaactgtcaataaacgcctgcttatcgccctgctccagcaactcaatcgcctcgccgaaacgcttatagtaacgtttgattaacgccagattacgctctgacgacataataatgtcggcataaagctgcggatcctgagcaaacagtcgcccgaccatcgccagctcaaggcggtaaatcggcgaagagagcgccagaagttgctcaagctgaacattttcttctgccagatgcagcccataagcaaaagtagcaaagtggcgcagagcctgaataaacgccatattctgatcgtgctcgacagcgctaatacgatgcagccgagcgccccagacctgaatttgctccagaaaccattggtatgcttccggcttacgtccatcacaccagaccacaacttgctttgccaggctaccgctgtccgggccgaacatcgggtgtaaccccagtaccgggccatcgtgcgccgccagcatggcctgtaatggtccatttttcactgatgccagatcaaccagaatacaatctttcggtaaaggcggtaatttgccgataacttgctcagtaacgtggattggcacactaacaatcaccattccggcatcggcaacaatatcagccgctcgatcccagtcatgttgctccagaatccgcacctgataacccgatagtgtcagcatcttctcgaacaggcgtcccatctgaccgccaccgccgacgataaccaccggacgcagtgacggacaaagtgttttaaatcctttgtcgttttcactggagtaagattcacgcatcacccgacgcaaaacatcctcaatcagatctggcggtacacccagagcttccgcctctgcacgacgcgaggccaacatagatgcctcgcgctccggaacataaataggcagtccaaagcggcttttcacctcgcccacttcagcaaccagttccagacgcttcgctaataaattcagcagcgctttatcgacttcatcaatttgatcgcgtaatgcggtcaattcagcaaccataataaacctcttaagccacgcgagccgtcagctgcccgttcagatcctgatgaatttcacgcagcaaggcatcggtcatttcccagctaatgcaggcatcggttacggatacaccgtatttcatttcactgcgcggttgctcagaagactgattgccctcgtggatattactttcgatcatcagaccaataattgagcgattgccatctttgatttgagcaaccacggattctgccaccgcaggctgacggcgataatctttattggaattaccgtggctgcaatctaccatcagagacgggcgcagtcccgcctgttccatctctttttcacattgcgcaacatccgcagggctatagttcggcgctttaccaccgcgcaggatgacatgcccgtccggattcccctgagtttgtagcaacgcaacctgccctgcctggttaatgccaacaaaacggtgcggctgggcggcggcgcgcatagcgttaattgctgttgccagactgccgtcggtgccgtttttaaaaccaaccggcatggaaagcccggaggccatttcacggtgagtttgcgattccgttgtacgagcaccaattgctgaccagctaaacagatcgcccaggtattgcgggctattcggatctaacgcttccgtcgccagtggcagtcccatattcaccagctcaagcagcaatttacgcgcgatctgcagcccggcttctacatcaaaagagccatccatatggggatcgttaattaaccctttccagccgacagtggtacggggtttttcaaaatagacgcgcattaccagatagaggctatcgctgacctctgcggcaagggctttaaatcgacgagcatattccagagcagtttccggatcatgaatggaacaaggaccacatactaccagcagacgaggatcgcgcccggcgataatatctgaaatggttctacgcgagtcagcaatctgggcttcttgttgcaggctcaatggaaaagcggccttcagttgttccggagtcattaaaacctgttcgtcggtaatatgtacgttattcagcgcgtctttttgcatgatggcgatcctgtttatgctcgtttgcgatagttgatcctcagcgaggatgacgtaacgataacacataaagtaaagttttcaatccatatttcgtacatttttatttacacaggcaatttagtcgcgatttcaacccttacttctgtatagataaatttacactccctttgaaaacaatccgctatgctttgaaaaaggagaaagaaatgatgaaaaagtttatcgcccccttgttggctttactggttagcggatgtcagattgatccttatactcacgcgccaaccttgaccagcaccgactggtatgatgttggtatggaagatgcgatatcgggcagcgccataaaagatgacgatgcatttagcgattcacaggcggatcgcggtctataccttaaaggatatgccgaaggacaaaagaaaacttgccagaccgattttacttatgcccggggactttccggtaaaagctttcctgccagctgcaacaatgttgaaaatgccagccaactgcatgaagtatggcaaaaaggggctgatgaaaatgccagcacaatacgattaaattaattaaaaccccacaaataaattaaacataagattttactcattgtgttttatttctcacattgatgacgatcgcatgaaaaaatgatattttaatgagcattctgaaaaaatatcgatgcatttcgagcgaagatggtggggatccctgaatgcgtttttctcaccgactgttcttacttctgattctcctgctgacgggagcaccaatactcgctcaggagccttctgacgttgcgaaaaacgtgcgtatgatggtttccggtattgtcagttacacccgctggcctgcgctatcagggccaccaaagttatgtatcttttcatcttcacgttttagtaccgccctacaagagaatgccgcgacatctttgccttatctgcctgtcatcattcacactcaacaagaggcgatgatttcaggctgcaatggtttttattttggcaacgagtcaccgacattccagatggaattaaccgaacaatatccgtcaaaggcgttattattaattgccgaacaaaataccgagtgcattattggtagcgccttttgtctgatcatccacaataatgacgtcagatttgccgtaaacctggatgccttatcgcgtagcggtgtaaaggtcaacccggatgtcttaatgctcgcacggaagaaaaatgatggataacgataattctcttaataagcgccccacgtttaaaagagcattacgcaacatcagtatgaccagcatatttatcactatgatgctgatctggttgctgctttccgtgacctcggtgctgaccctgaaacagtacgcgcaaaaaaacctggcactgacagcagcaacaatgacttacagtctggaagcagctgtcgtttttgccgatggccctgcagcaactgaaacactggcagcgctgggccagcaagggcaattttcaactgcagaagtacgtgataagcagcaaaatattctggcgtcctggcattacacccgtaaggatccaggcgatactttcagcaatttcataagccactggctcttccccgcccccatcattcagccgattcgtcacaatggtgaaaccattggcgaagtacgcttaaccgctcgcgacagttcaatcagccattttatctggttttcgctcgccgtactgaccggttgtattctgctggcatcaggcatcgcaattaccctcacccgccatttgcacaatggcctggtagaagcgctgaaaaatatcaccgatgtcgtacatgatgtgcgttccaaccgcaatttttcccgacgagtttcggaagaacgtatcgctgagtttcaccgcttcgctctcgacttcaacagtctgctggatgaaatggaagagtggcagcttcgtttacaggccaaaaatgcgcagcttctgcgtaccgcgctacatgacccattaaccgggctggctaaccgcgcagcgtttcgtagcggcatcaatacgttgatgaacaattccgatgcccgaaaaacgtcggcgttactatttcttgatggcgataatttcaaatatatcaatgatacctggggtcatgcgacgggcgatagagtcttgattgaaatcgcaaaacggttagctgaatttggcgggctgcgacataaagcataccgcctgggcggcgatgaattcgctatggtgctctatgatgtacagtcggaatctgaagtgcagcagatatgctcagcactgacacaaatctttaatctcccgtttgatcttcataatggccatcagaccaccatgacattaagcattggttacgcgatgaccattgagcacgcctctgcggaaaaattacaagagcttgccgatcacaatatgtatcaggccaaacaccagcgtgccgaaaagctggtgagataacaaggatatatcgatatgataaagcacctggtagcacccctgattttcacctcactaatactgactggctgccagtcccctcagggaaagtttactcctgagcaagtcgccgctatgcaatcttatggatttactgaatccgccggcgactggtcgctgggcttatcagatgccattctgttcgcaaaaaatgactacaaattgctcccggaaagccagcaacagatccaaaccatggcagccaaattggcctcgacagggctaacacatgcccgtatggatggacacaccgataactatggtgaagacagttacaacgaaggcttatcattgaaacgggcgaatgtcgtggccgatgcatgggctatgggtggacaaattccgcgcagcaatctcaccacacagggtttaggaaaaaaatatcccatagccagtaacaagaccgcccagggccgcgccgagaaccgccgcgtcgcagtggtgattactaccccttaaaacaccagcaaacagataaaaaaagggccagccaattggccagcccttcttaacaggatgtcgcttaagcgaaatcttagttaagacgctctttgatacgagcagccttaccagtacgctcacgcaggtagtacagtttagctttacgaacagcaccacgacgtttgacagaaatgctgtcaactaccggagagtgagtctggaagacacgctcaacgccttcgccgttggaaattttacgaacagtgaatgcagagtgcagaccgcggttacgaatagcgataaccacgccctcgaatgcctgcagacgttttttggaaccttcaacaacccatactttcacttccacggtatcacccggacggaaggaaggtacgtcctgcttcatctgctcttgttcaagttgcttaataatgttgctcataatttaatctcttatcctgggtaaactgatatctcgggggcttacgccatcccatcatgtttatgttgctgttgtgcgtgttccgttttgaactccgccagcaaccttgcttgctcttcagtcagagccaggttttccagaagttcaggtcttctaagccaggtacggcccagcgactgtttcaaacgccagcgacgtatctcggcatggttgcccgacagtaacactggcggaacttccatcccttctaacacctcaggccgcgtatagtgcgggcaatccagcaatccttcagcaaaggaatcttccgttgccgaggcttcatgtcccagtactcccggaataaaccgggaaacggagtcaatcagcgtcattgctggtaactcaccaccactgagaacgtaatcgccgattgaccattcttcgtcaatttcggtttggatcacgcgctcatctataccttcgtagcgaccgcacaccagaatcaatttttgattcgttgccagttcgctgacgcccgcttgatcaagcttgcgtccctgtggtgacagataaatcacctttgcgccttcacccgccgcggcttttgctgcatgaatggcgtcccgcaagggttgcaccatcattaacatccccggtccgccgccgtaaggacgatcgtccacggtacggtgccggtcatgcgtgaagtcgcgaggactccaactctggatgctcagcaggccatttttaactgcccggccagttaccccgtaatcggtaattgcgcggaacatttcaggaaacaggctaattatgccaatccacatagcgccgtcttttaccgtttatccggtggtttaaaaaccaggatcccaatctacttcgattgaacgagtagtgagatcgactttcttgataacctgcccatcgaggaacggtacgagacgttccttgataccaaacgcatctttcaggtttgccttaatgacgagaacgtcattagatccggtttccatcatatcgacgactttaccgagatcgtagccttcagtggttactacctggcagcccatcaggtctttccagtagtagtccccctcttcaagctgaggcagctgcgatgaatccacgacaatttcacaattcgtcagcaggttcgccgcatcacgatcgtcaacgcctttcagcttgatgatcatgtcctgattgtggtgcttccagctttccagctggacttgctgccactgacccgccttctggataaaccagggctgatagtcaaaaatgctttcggcgtcttcggtggaagaaaacactctgagccacccacgaataccgtaagacgaacccatttttcccaaaacgatgggatcaacaggtgcttgcgcggtgagttgtttgctcatcatgaccaccgtgacagattaagctgctttgtttacttctttgatcagcgcagcaacgcgatcagaaatagttgcgccctggccaacccagtgagcgatgcgatccagatccaggcgagtgccttcttctttttcgctagcgattgggttgaagaaaccaacgcgctcgatgaagcgaccgttgcgtgcattacggctgtcagcgacaacaacctggtagaacggacgctttttagcgccgtgacgtgctaaacgaatagttaccataacatcctcttgtgtgaataaaacaaccggaccccatcgaggaacggagtccggtgtcatattaaaagcccgaaaattttactcatttttgcgggaattgcaatcaacagttgctaactctgctgtaaaaggccgtcggcggtgcagccagtttggtgccggagtgcgcgcagtcaccggagcgtacacgcagtacgtgaggatgacgagcacatcccggtgccaaaatggcaaacaagccaggccgattagcgaccagggaagcctgggggcatcatacccttcatgcttctcatcatcttcgccattccgcctttcttcattttcttcatcatgcgctgcatgtcgtcgaactgcttcagaaggcggttcacgtcctgcacctgcataccgcaaccggcagcgatacgacgcttacgcgaacctttgatgatttctggcttagcgcgctctttcatcgtcatcgagttgatgatggcttccatacgcaccagcactttatcgtccatctgcgacttaacattatccgggatctgccccatgcccggcagcttgcccatcaggctagccatgccgcccatatttttcatctggcgcagttgctcaagaaaatcgttgagatcgaagccgtcgccttttttcagcttgctggctaatttctctgcctgcgcgcggtcaactttgctttcgatatcttcgatcagcgacagtacgtcgcccatgccgagaatacgcgacgcgatgcggtccggatggaacggctccagcgcctcagttttctcgccaacaccgagaaacttgatcggtttgccagtgatgtgacgaatagagagcgccgcaccgccgcgggcatcgccgtccactttggtcaacactacgccggtaagcggtaacgcttcattgaatgcttttgccgtattggccgcatcctgaccggtcatggcgtcaaccacaaacagggtttcaaccgggttaatcgacgcatggacttgtttgatctcgtccatcatcgcttcgtcaacgtgcagacgaccagcggtatccaccagcagcacgtcgtagaatttcagtttggcttctttcagcgccgcgttaacgatatctaccggcttctgaccaacatcagaagggaagaaatcaacgcccacctgctctgccagcgtctcaagctgtttgattgccgccgggcgataaacgtcggcagaaaccaccagcactttcttcttgtgcttctcgcgcaggaacttaccgagtttaccaacgctggttgttttaccggcaccttgcaggcccgccatcagcacgaccgcaggcggttgcgccgccaggttcagggtctggttctcttcgcccatcgccgcaaccagttcgttacggacgattttgacgaactcctgccccggcgtcaggctcttattaacttcatgaccaaccgctttctcttttacgcgattgataaactcacgcactaccggcagagcgacgtccgcctccagcagcgccatgcgcacttcgcgcagcgtatcttttacgttgtcttcagtgaggcgtccacggccactgatattgcgcagcgtgcgcgacaaacgatcggttaaattatcaaacattgtctctcgcctggggtggaaacggttggccgcaatcgcgacacatcatcagtattttgccgcagtataacatgaaggcgtctttgttgttatgcaacggttggagcagcgttcacctgacgctatactgcttctctttcttattgctcaaactgtcgacatcactatgcccgtttttgctctgctcgcgcttgtcgcctactccgtcagtcttgcgctgattgttcccggtctgctgcaaaaaaacggcggctggcggcgcatggctattatttctgcggtcattgcgctggtctgccacgcaatcgctctggaagcccgcatcctgcccgacggtgatagcggacaaaacctcagcctgctgaacgttggttcattggtcagtttgatgatctgtacggtaatgaccattgtggcttctcgcaatcgtggctggttgctgctacccattgtctatgcctttgcgcttatcaacctggcgctggcgaccttcatgcccaatgaatacatcacccatctggaagcaacgcctgggatgctggtgcacattggcttatcgctcttttcctatgccacgctaattatcgccgccctgtacgcgctgcaactggcgtggattgattaccaactgaagaacaagaagctggcatttaaccaggaaatgccgccattgatgagtatcgagcgtaaaatgttccacatcacgcagattggcgtggtgctgctaacgctcacgctttgcactggcctgttctacatgcacaacctatttagcatggaaaatatcgacaaggctgtgctctctatcgtggcgtggtttgtctatattgtgctgctgtggggacattaccatgaaggatggcgtggacgccgcgtcgtctggtttaacgttgcgggcgcggtaattctgacactggcctacttcggcagccgaattgtccagcagttaatcagctaaacccagaaaaggagtttcccctggaacacatttctactactacgttgatcattattctgatcatcatggtggtcatttcagcctatttttccgggtccgaaaccggaatgatgaccctcaaccgctatcgtctgcgacatatggcgaaacagggtaatcgctcggccaaacgcgtcgaaaaattgctgcgtaagccagaccgcctgataagcctggtgttaatcggcaataacctggtcaatattcttgcctccgcgctcggcactattgttgggatgcgtttgtacggcgatgcgggcgtggcaattgcgactggagtgctgacttttgtcgtactggtatttgctgaggtattgccgaaaaccattgccgcgctgtacccggaaaaagtcgcttacccgagtagttttctgctggctccgctgcaaattttgatgatgccgctggtctggttgctgaatgctatcacccgtatgctgatgcgcatgatgggtatcaaaaccgatatcgtggttagcggctctttgagcaaagaagagttgcgcactatcgtgcacgaatcacgctcacaaatttcccgtcgcaatcaggatatgctgctgtcggtgctcgatctggaaaaaatgaccgttgatgacatcatggtgccgcgcagtgaaattatcggtattgatatcaacgatgactggaaatcgattctgcgccaactctcccactcacctcacgggcgcatcgtgctctaccgtgattcgctggacgacgccatcagtatgctgcgagtacgtgaagcctggcggttgatgtcggagaaaaaagagttcaccaaagaaaccatgctgcgcgccgcggacgagatctattttgtgccggaaggtacgccgctcagcacgcagttggtaaagtttcagcgcaacaaaaagaaagtcggcctggtcgtcaacgagtatggcgacattcaggggctggtgacggttgaagatattctggaagagattgtcggcgatttcactacgtcgatgtcgccaacacttgccgaagaggtcacgccgcaaaacgacggttcggtgattatcgatggcaccgccaacgtgcgggaaatcaacaaagcctttaactggcatctaccggaagatgatgcccgcacggttaatggcgtcattcttgaggcactggaagagatccctgtcgcaggcacccgcgtgcgtattggcgagtacgatatagatattctcgacgtacaggacaatatgattaagcaggtaaaagtttttcctgtgaaaccgctgcgcgagagtgtggcggagtaacgcaatggcgaactccggttcgccttttttttatcgccgtcttttaggattccatcaattcctgtcatttacttagcaatgtaataatgtcttttcaagcattcggaaaggatattgatgttatgtcagaagattatgtaattgaatgggataaggattttgcagacgatctcaacgtcgtcgccagcgtttttttacagcacaccccaaccttatggcccactattttctctcaactttcgacgcaacctgaaatctttgaagacgaagatgaagacgaatatggattgcaggacgttctcgattgcagtggtggcgatctcgggaatcgtgacctggcgcaggcatttttacaggttctacgcggtgaaggattaattcaactcgttgactggaaaggtgaagatgaagaaggtgagctggctaattttgctgcagatcgcttttatgagctcacaaaaaacctgatagcttctgaggaattaaggagtcttcttgtcgaaataacccaagaggatgaaatctccgatgtctgtgaagccggagaccgctaccttgacgaaatctttgaacgcatccaaaccgaactcaataaaaggggctttcagatttttgatctgaatgaaggatctgacacctataacgtggtcgttctgccaatgaacgaatataaaaaaatagatgatttcaacacgccgtggctggaagtacaggattttttaagctaaaaaaatggccgacttcgcgtcggccatcagatatttacttcgccttcgctacagtaaccatcgccgcacgaatcgtacgaccattcagcgtataacccttctgcataatgccgagtacgttacctggcgcaacgtcatcagattccaccattgcgatagcctgatgcacattcgggtccagcggcacgttagtttcggcgatcacttcaacaccaaacttacgcacaacatccagcatcgacttcagcgtcagctcaatgccttcaaccatcgcagacatatccgggttagctttatcagccacttccagcgcacgatccaggctatcaatcaccggcagcaattcgttgatgaatttctccagcgcgaatttgtgggctttttcaatatccagttcagtacgacgacgcaggttttccatttcggcttttacacgcaaaatgccgtcacgttcacgggtctgggcttcagccagctgagcttcgagattcgcaattttttcatcgcgcggatccacctgctcagcagaagcttctggctcaactgcctcaatctcttcgtgctgatccatgataatttcttccggggcttgcccctcaggcgttttctgttctttactactcatgaatttctccgcgtttttttcgcattcacctcgctaacttcgcttattatggggatcagtttcagggtttcaagggaagcactcacattgtcatcaatcttcgcaacaaggacctcggaaaaatgaataatcatttcaagtgtattggcattgtgggacacccacggcaccctactgcactgacaacacatgaaatgctctaccgctggctgtgcacaaaaggttacgaggtcatcgttgagcaacaaatcgctcacgaactgcaactgaagaatgtgaaaactggcacgctcgcggagattgggcaactagctgatctcgcggtagtcgttggtggcgacggtaatatgctgggcgcggcgcgcacactcgcccgttacgatattaaagttattggaatcaaccgtggcaacctgggtttcttgactgaccttgaccccgataacgcccagcaacagttagccgatgtgctggaaggccactacatcagcgagaaacgttttttgctggaagcgcaagtctgtcagcaagattgccagaaacgcatcagcaccgcgataaatgaagtggtgcttcatccaggcaaagtggcgcatatgattgagttcgaagtgtatatcgacgagatctttgcgttttctcagcgatctgatggactaattatttcgacgccaacaggctccaccgcctattccctctctgcaggcggtcctattctgaccccctctctggatgcgattaccctggtgcccatgttcccgcatacgttgtcagcacgaccactggtcataaacagcagcagcacgatccgtctgcgtttttcgcatcgccgtaacgacctggaaatcagttgcgacagccagatagcactgccgattcaggaaggtgaagatgtcctgattcgtcgctgtgattaccatctgaatctgattcatccgaaagattacagttatttcaacacattaagcaccaagctcggctggtcaaaaaaattattctaattttacgccagcctctttactgtatataaaaccagtttatactgtacacaataacagtaatggtttttcatacaggaaaacgactatgttggcacaactgaccatcagcaactttgctatcgttcgtgagcttgagattgattttcatagcggcatgaccgtaataactggcgagaccggcgcgggtaaatctattgcaatagatgccctcggtctttgtctcggtggtcgcgctgaagccgacatggtgcgtaccggcgctgctcgcgctgacctgtgcgcccgtttttctctgaaagatacgccagcggctctgcgctggctggaagaaaaccagcttgaagacgggcatgaatgtttgcttcgtcgcgtgatcagcagcgatggtcgctcccgtggtttcatcaacggtacagctgttcctctgtcacaactgcgcgaactgggtcagttgctgattcagatccatggtcagcacgctcatcagttactcaccaaacccgagcaccaaaagttcctgcttgatggctatgccaatgaaacctctctactccaggaaatgacagcacgttatcagttgtggcatcaaagctgccgtgacctcgcgcatcatcaacagttaagtcaggaacgcgctgcccgtgcggaactgctgcaataccaattaaaagaacttaacgaatttaatccgcagcccggagagtttgaacaaatcgacgaagagtacaaacgtctggcgaacagcggtcaattgctgaccaccagccagaatgcattggcattaatggccgacggtgaagacgcaaacctgcaaagtcagctttacacggctaaacaactggtgagcgaattgattggcatggacagcaaactgtccggcgtacttgatatgctggaagaagctaccatccagattgctgaagccagcgatgaactgcgccactactgcgatcgtctggatctcgatcccaaccgactatttgaacttgaacagcgcatctcaaaacagatttcgctggcacgtaaacatcacgtcagccctgaggcattgccacagtattaccagtcgctactggaagaacagcagcaactggacgatcaggccgactcacaagaaacgcttgcgctggcggtaacgaaacatcatcagcaggcactggaaatcgcgcgcgcattacaccaacaacgccagcaatatgcagaagaacttgcacagctgatcaccgacagtatgcatgcgctctcaatgccgcatgggcagtttacgatcgatgttaaatttgacgagcatcacctgggcgctgacggtgccgatcgtattgagtttcgggtaaccaccaacccaggtcagccaatgcagcctattgccaaagtcgcatccggtggtgaattgtcccgcatcgcactggcaatccaggtcatcacggcgcgtaaaatggaaaccccggcactgatttttgatgaagtggatgtagggattagcggtccaacagcggcagttgtcggcaaactgctgcgtcaactcggcgaatcaactcaggtgatgtgtgttacccacctgccacaagtcgcgggatgtggtcatcaacactattttgtcagcaaagaaaccgatggtgcgatgacagaaacgcatatgcaatccctgaataaaaaagcgcggttacaagagctggcgcgcctgcttggtggcagtgaagtcacacgtaatacactggcgaatgcgaaagaactgcttgcagcgtaaacttttttcctgcttcacggtcagagtaaacagcaaaacgccgtaagaccggaaagcaaaaggttttaaagtgatgaaaggtctattatcatcggcatattacagatgagccacgtactgctcgggcccgaaaaggaatcaaatcactatgcgctgtaaaacgctgactgctgcagcagcagtactattgatgttgaccgcaggctgttccactctggagcgagtggtttaccgtcctgacatcaaccaggggaactatctgaccgctaacgacgtatccaaaatacgtgttggcatgacgcaacaacaagttgcgtacgcattgggtacaccgctgatgtccgatccatttggtacgaatacctggttctatgtcttccgccagcaaccaggtcatgaaggtgtaacgcagcaaacgctgacgctgacctttaacagtagcggtgtgttgaccaatattgataacaaacctgcgctgagtggtaactaataataaagttgctctcaaagacgttaaaaaaggtgctcaatgagcaccttttttctgtctgttatttattcgctgatttttctgctcgttgcctgcgaagctctttcggatcggcaatgagagggcgataaatctccacccgatcgccatcatgcacactatcgcttagttttgccggacggctgtaaatgccgactttgtttttagttaaatcgatatcggtacgcaattccagcaagccactggcgcgaatagcttcttcaaccgtcgcgccctcctgcagcgtcacgcgctgcaggtactgcttctcaggtagcgcataagccacctcaacggcaattttacctggcactgtaaacctctttcgcacgaaccgtaaaagcctggaccatattagacgccagctctttaaacacgcgaccaaaggcgagttcaatcaacttattggtaaactcaaagtcgagatgaaactcgatacgacacgcctcctggctcagcggcgtaaacttccatccaccaatcaatttcttgaacggcccatccaccagattcataagaatactttggttactggtcaactggttgcgggtagtaaacgttttgctgatcccagccttagagacatctaccgccgcagtcatctgcccaggagtggactccagaatccgacttccggtacaacccggcaaaaactgaggataagactgaacgtcattcactaactgatacatttgctccgcgctgtagggtaccagtgcggtccggctaatctgaggcataacaatttccatcaacaaaaatccaacaaataatatcatttatcctgctgtaaaaaaaacgctatcccggcgctgggtaacatcgggttcatgctaagatagagccttgtcccccgcaggattgatatggggtgttttcgatttcagattaccgatgattcacgacgcttatgacgaagaaaaaagcacataaacctggttcagcgaccatcgcgcttaacaagcgcgcccgtcacgaatactttatcgaagaagagttcgaagcgggacttgccctgcaaggctgggaggttaaatccctgcgcgcaggaaaagccaatatcagcgacagctacgtccttctgcgtgacggagaggcatttctgtttggcgctaacatcacgccaatggccgtggcctccacgcatgtggtgtgcgatcctacccgtacccgcaagttacttctcaaccaacgcgaactggactcattgtacggtcgcgtcaatcgagaaggctataccgtagtggcgctctccctgtactggaaaaatgcctggtgcaaagtgaaaatcggcgtcgccaaaggtaaaaaacagcacgataaacgttcagatatcaaagaacgcgaatggcaggtggataaagcacgtatcatgaaaaacgcccaccgttaaacctgcactccaattattgaccagttcctcaccgcgcctccctctccggcggcgcgaatgaacatcttattggctatcacatccgacacaaatgttgccatcccattgcttaatcgaataaaaatcaggctacatgggtgctaaatctttaacgataacgccattgaggctggtcatggtgctcataaatctggtatacttacctttacacattggggctgattctggattcgacgggatttgcgaaacccaaggtgcatgccgaggggcggttggcctcgtaaaaagccgcaaaaaatagtcgcaaacgacgaaaactacgctttagcagcttaataacctgcttagagccctctctccctagcctccgctcttaggacggggatcaagagaggtcaaacccaaaagagatcgcgtggaagccctgcctggggttgaagcgttaaaacttaatcaggctagtttgttagtggcgtgtccgtccgcagctggcaagcgaatgtaaagactgactaagcatgtagtaccgaggatgtaggaatttcggacgcgggttcaactcccgccagctccaccacttgctcttccggatacgtccggagaaatcctgaaagcccacatggaacaagccttgtgggcttttttgtgtcctcagttgtccgagaatatcccgctaaatccagtgattattggtatacgtttaggtatacggtaagatgtatacctaaaagcgtataccaattcataaaggagcggccaaagtggcaagaacgacacgccccctgaccaacacagaagtgctgcgcgcaaaagcgttagaaaaggatcttacattgcatgatggcgatggtctttttcttctcgttaaaacgaacggtaagaagttatggcgtttccgttatcaacgtccgacaacaaagcagcggacaatgatggggctaggtgccttcccagccatatcgcttgcagatgccaggagattaaaagctgattatctttcattattagccaatggaattgatccgcaaattcaagcgaaagtggcagaggaacagcaacaaatcgcgcttgacagtattttttcaacagtcgccgctaactggtttctgctcaaaagcaaaagcgttacccctgattacgcaaaagacatttggcgttcacttgagaaagacgtattccccactatcggtgagatccccgttcagaagatcaaagcccgaacattaattgaagctcttgagtccgtcaaagctcgaggggcgctagagaccgttcgtcgactggtgcaacgcattaacgagataatgatttatgcggttaacaccggtttgattgatgcaaatccagcatcaggtgttggtatggcatttgagaaacctaaaaagaaaaatatgccaacactacgcccagaggaattgcctaatctgatgcattcattaacaatgtcaaatctatctgtctctactcgatgtctcattgaatggcaactcctaactcttgtccgcccttctgaagcttcaggcactcaatgggctgagatcgatttagatgcgaaactctggataattccagctgaaagaatgaaagcaaaacgagaacacattgttcctttgtccccccaagctttagacattttgaatataatgaaacccatcagtgctcatcgtacacatgtttttcctagcaggagtgaccccttaaaaccaatgaatagccaaacggcaaatgccgcattaaagcgaattggcttcgctggcaaactagtagcccatggtctacgttctattgcaagcaccgccttaaacgaacgtggttacaatcctgatgttatagaagcagctcttgctcatagcgataaaaacgaagtacgtcgcgcttataatcgctcggtttatttagaaaaacgtaagcaactaatgaatgattgggggcaaattgtgcacccccaatcataaaaaacgatttcagtccaagcaactattaaaattccatagattggggactttatgtagatttaacatcaagatgttctccacagtatccgataattattttacgtttacttctatcaacccaaaagtggattcttatagtttcagacttggagcgggctgttcctataccaacgtgttggaacatctttattttttgaccattatagtcaaactctctcattttagataatgtagcagatcgctctaccgtctctgattcatttgctgaataagcatcaccaagaatatctttggccttattatctccattttcaagatactcaagaagatattctgtacaaagtttatataataaataaatcaatctatgattgtgtttgaatttcgatgagttcctcgctgaagaaaatgctgatttaagaatctcaacattattagggattaggatttctaataaactcaaaacggactcagggtttaacctattgctaattaaagatattatcttttcaacatcaacatcaccatcagtagcttttccatggtatttcctaatatcgtattttaacctttctaagtctacttctattttatttttttcaaagacaactgcatcatgctttgcatccaattcctcaatcctttttaaataatcaagctctaattcttcactagcagccttaaactcctcaaactctaagaggacttcatcgagcaaagcttcatactgagcaccatcttttaactcatttaatctctgcctaaaagaaatattatcatcacgctgtcttttggcacgaacattagctggtgataaatgcaactttttattatagccattaaaagcatgcgttattactgataatatataattattaacaggaacattacccgctttaatttcatcaacttgcttcgggagaaaaagttttgttcctatataccctgacttattcattgggtaaataatatttattgcccccccccaagatgaatagtgtcttccaagtaatcgttccatttcccaagagtccattttaccacttgttgcaacaacctgagcaagcccaataagttgctcctgtagtttttcaggtataacaggaaatccatcattaccttcactaataaaaactagcgggtaggtcctgtcatccctagaaatttcatgcataagatactgaaagtcgccatactgacttttaatataatccactttctggccgataacatccagatcgaatacacaattccgtttcaaatatgataccagagatggacgagtagcaattggttttgcatcaaccatagtgctaacatcacttatttctaacaatatagatataaacgtgcttcctttttcacgtctaattccaatttctgtaatccattgtctaccgctcacattcctatcaggatgagtgtacattatggaatatattttaggttctattctatcagccgtgtaggttctaacataggctcgctctaaattccaatcacgccgcgaaagtagctcatctgttgataggcgaatattagcaaccctattaagccaaccacacacagaacgcactacgctaaaaaaactatcttcaccgatgcaattaaacgaattaacataaactaacactacaatctcctttcactcatttaaaggggaggctgaaaaggagttatcttatatactttttgtaaattatttcaatcttttgcgcgcagtgctttccccgcctcgcccgcccgctttgtggggcggttttaatgcagttgtactgacacgctcagactgcgccgggaatggcgcggtctgcagaaaatgaggcagggaaacgcatgcaaagccatgcaccttatcgatgcatggcttttttcagtaaaaacgggcggattttcggggaattttacacagactgacgtgatgccagttgcgcacttttacgcgaaaaaatcatgt

SEQ ID NO: 77 - DNA, 27392 bp, Escherichia coli
  source 1..27392: mol_type = genomic DNA
tctgaggcagcacctggcacggctgggacggaagtcgctgtcgttctcaaaatcggtggagctgcatgacaaagtcatcgggcattatctgaacataaaacactatcaataagttggagtcattaccgctgtggccgtcggtggatatctttgtcccgacttacaacgaagatctcaacgtggtgaaaaatactatttacgcctcgctgggtatcgactggccgaaagacaagctgaacatctggatcctcgatgacggcggtagggaagagtttcgccagtttgcgcaaaacgtgggggtgaaatatatcgcccgtaccactcatgaacatgcgaaagcgggcaacatcaacaatgcgctgaaatatgccaaaggcgagttcgtgtcgattttcgactgcgaccacgtaccaacgcgatcgttcctgcaaatgaccatgggctggttcctgaaagagaaacagctggcgatgatgcagactccacaccacttcttctcgccagacccgtttgaacgcaacctggggcgttttcgtaaaacaccgaacgaaggcacgctgttctatggtctggtgcaggatggcaacgatatgtgggacgccactttcttctgcggttcctgtgcggtgattcgccgtaagccgctggatgaaattggcggcattgctgtcgaaactgtgactgaagatgcgcatacttctctgcgtttgcaccgtcgtggatatacctccgcgtatatgcgtattccgcaggcggcggggctggcgaccgaaagtctgtcggcgcatatcggtcagcgtattcgctgggcgcgcgggatggtgcaaatcttccgtctcgataacccgctcaccggtaaaggactgaagtttgctcagcggctgtgctacgtcaacgccatgttccacttcttgtcgggcattccacggctgatcttcctgactgcgccgctggcgttcctgctgcttcatgcctacatcatctatgcgccagcgttgatgatcgccctattcgtgctgccgcatatgatccatgccagcctgaccaactcgaagatccagggcaaatatcgccactctttctggagtgaaatctacgaaacggtgctggcgtggtatatcgcaccaccgacgctggtggcgctgattaacccgcacaaaggcaaatttaacgtcaccgccaaaggtggactggtggaagaagagtacgtcgactgggtgatctcgcggccctacatcttccttgttctactcaacctggtgggcgttgcggtaggcatctggcgctacttctatggcccgccaaccgagatgctcaccgtggtcgtcagtatggtgtgggtgttctacaacctgattgttcttggcggcgcagttgcggtatcggtagaaagcaaacaggtacgccgatcgcaccgcgtggagatgacgatgcccgcggcaattgcccgcgaagatggtcacctcttctcgtgtaccgttcaggatttctccgacggtggtttggggatcaagatcaacggtcaggcgcagattctggaagggcagaaagtgaatctgttgcttaaacgcggtcagcaggaatacgtcttcccgacccaggtggcgcgcgtgatgggtaatgaagttgggctgaaattaatgccgctcaccacccagcaacatatcgattttgtgcagtgtacgtttgcccgtgcggatacatgggcgctctggcaggacagctacccggaagataagccgctggaaagtctgctggatattctgaagctcggcttccgtggctaccgccatctggcggagtttgcgccttcttcggtgaagggcatattccgtgtgctgacttctctggtttcctgggttgtatcgtttattccgcgccgcccggagcggagcgaaacggcacaaccatcggatcaggctttggctcaacaatgatgataacgcgatgaaaagaaaactattctggatttgtgcagtggctatggggatgagtgcgttcccctctttcatgacgcaggcgacgccagcaacgcaaccactgatcaatgctgagccagctgtagccgcccagacggaacaaaatccgcaggtggggcaagtgatgccgggcgtgcagggcgctgatgcgccagtcgtggcgcagaacggtccttcgcgtgatgtgaagctgacctttgcgcaaattgcgccgccgccgggcagcatggtgctacgtggcattaacccgaacggcagcattgagtttggtatgcgcagcgatgaagtggtgacgaaggcgatgctcaacctcgaatacacgccatcgccatcgttactgcctgtccagtcgcagttaaaggtttatctcaatgatgagctgatgggcgtgctgccagtgaccaaagaacagttgggtaaaaaaacgctggcgcaaatgcccattaacccactgtttattaccgacttcaaccgtgtgcggctggagtttgtcggccattatcaggacgtgtgcgaaaacccggccagcaccacgctttggctggatgttgggcggagcagtggactggatctgacctatcagaccctgaatgtgaagaatgacctgtcacacttcccggtgccattctttgatccgcgtgataaccgcaccaacaccttgccgatggtctttgcgggtgcgccggatgttgggctgcaacaagcctctgccattgtcgcctcgtggtttggttcgcgttctggctggcgtgggcagaacttcccggtgctctataaccaactgccggatcgtaatgccattgtctttgcaaccaacgacaaacggccggacttcctgcgcgatcatccggcggtaaaagccccggtgattgagatgattaaccatccgcagaatccttacgtcaaactgctggtggtgtttggtcgtgacgacaaagacctgttgcaggcagcgaaaggtatcgctcagggtaacattctgttccgtggtgaaagcgtggtagtgaatgaagtgaaaccgctgctaccgcgtaagccgtacgatgcgccgaactgggtacgtaccgatcgtccggtcacatttggcgaactgaaaacctatgaagaacagttacaatccagcggtcttgagccagcagcgattaacgtttcgctaaacctgccgccggatctctacctgatgcgcagtaccggcattgatatggatattaattaccgctacaccatgccgccggtgaaagacagttcgcggatggatatcagcctgaataaccagttcctgcaatccttcaacctgagcagcaaacaggaggcgaaccgcctgctgctgcggattccggtattacaaggtttgctggatggcaaaacagatgtctctattccggcgctgaaactgggcgcgaccaaccagctgcgcttcgactttgagtatatgaacccgatgccgggcggttcggtggataactgtattaccttccagccggtgcagaatcatgtggtgattggtgacgactccaccatcgacttctcgaagtattaccacttcatcccgatgccggatctacgcgcctttgctaacgcgggcttcccattcagccggatggcggatctgtcgcaaaccatcaccgtgatgccgaaagcgcctaacgaagcacagatggaaacgttgctgaatactgttggttttatcggcgcacagacgggcttcccggcgattaatctgacggtgaccgatgatggcagcaccattcagggcaaagatgccgacatcatgatcatcggtggtatcccggacaaactgaaagacgataagcagatcgacctattggtgcaggcgaccgaaagctgggtgaaaacaccgatgcgccagaccccgttccccggcattgtgccggacgagagcgatcgcgcggcagaaacccagtcaacgctgacctcttccggtgcgatggcggcggtgattggcttccagtcgccgtataacgaccagcgcagcgtgattgcgctgctggcagatagcccacgcggttatgaaatgcttaacgatgcggtgaacgatagcggcaaacgcgccaccatgttcggttcggtcgcggtgatccgcgagtccggtatcaacagcctacgtgttggcgacgtttattacgtaggtcatctgccgtggttcgagcgcttgtggtatgcgctggcaaaccatccgattctgctggcggtgctggcggctatcagtgtgatattgctggcatgggtactgtggcgtctgctgcgaattattagtcgtcgtcgtcttaacccggataacgagtaattgaagatgaatgtgttgcgtagtggaatcgtgacgatgctgctgttggctgcctttagtgttcaggcagcctgtacctggcctgcctgggagcagtttaaaaaggattacatcagtcaggaagggcgcgtcatcgaccccagcgacgcgcgcaaaatcaccacctccgaagggcaaagttacggtatgttctttgccctggcggctaacgaccgtgtagctttcgataatattctcgactggacgcagaacaatctcgctcagggttctttaaaagaacgtttgcccgcctggctgtggggcaagaaagagaacagtaagtgggaagtgctggacagcaattcggcctccgatggtgatgtctggatggcctggtcgttgctggaggcggggcgtttgtggaaagagcagcgttataccgacatcggcagcgcgttgctaaaacgtatcgcgcgggaggaagtggtgacggtgcctgggctgggttccatgttgttaccgggcaaagtgggttttgctgaggataacagctggcgttttaaccccagctacctgccgccgacgctggcgcagtatttcacccgctttggcgcgccgtggaccacgctgcgcgaaaccaatcaacgtttattgctggaaaccgccccgaaaggtttttcgccagactgggtgcgctatgagaaagacaaaggctggcagctaaaagccgaaaaaacattgatcagcagctacgacgctatccgcgtttacatgtgggtaggcatgatgcctgacagcgatccgcaaaaagcgcggatgctcaaccggtttaaaccgatggcgacattcactgagaaaaacggttatccgccggaaaaagtggatgtggctacggggaaagcgcagggtaaaggaccggtcggtttttctgccgccatgctgccctttttacaaaaccgtgatgcgcaggccgttcagcgccagcgcgtggccgataactttcccggcagcgatgcctattacaactatgtgctgaccctgtttggacaaggctgggatcaacaccgtttccgcttctcgacaaaaggtgagttattacctgactggggccaggaatgcgcaaattcacactaaacatattcacgctttccctcggtctggccgtcatgccgatggtcgaggcagcaccaaccgctcagcaacagttgctggagcaagttcggttaggcgaagcgacccatcgtgaagacctggtgcagcagtcgttgtatcggctggaacttattgatccgaataacccggacgtcgttgccgcccgtttccgttctttgttacgtcagggcgatattgatggcgcgcaaaaacagctcgatcggctgtcgcagttagcgccgagttcaaatgcgtataaatcgtcgcggactacgatgctactttccacgccggatggtcgtcaggcactgcaacaggcaagattgcaggcgactaccggtcatgcggaagaagctgtggcgagttacaacaaactgttcaacggtgcgccgccggaaggtgacattgctgtcgagtactggagtacggtggcgaaaattccggctcgccgtggcgaagcgatcaatcagttaaaacgcatcaatgcggatgcaccgggcaatacgggcctgcaaaacaatctggcgctattgctgtttagtagcgatcgccgtgacgaaggttttgccgtcctggaacagatggcgaaatcgaacgccgggcgcgaaggggcctctaaaatctggtacgggcagattaaagacatgcccgtcagtgatgccagtgtgtcggcgctgaaaaaatatctttcgatctttagtgatggcgatagcgtggcggctgcgcaatcgcaactggcagaacagcaaaaacagctggccgatcctgctttccgcgctcgtgcgcaaggtttagcggcggtggactctggtatggcgggtaaagccattcccgaactacaacaggcagtgcgggcaaacccgaaagacagtgaagctctgggggcgctgggccaggcatattcacagaaaggcgatcgcgccaatgcagtggcgaatctggaaaaagccctcgcactggatccgcacagcagcaacaacgacaaatggaacagtctgctgaaagtaaaccgctactggctggcaatccagcagggcgatgctgcgctgaaagccaataatcctgaccgggcagaacgcctgttccagcaggcgcgtaatgtcgataacaccgacagttatgcagtgctggggctgggcgatgtggcgatggcgcgaaaagattatcccgccgccgaacgttattatcagcagaccttgcgtatggacagcggcaacactaacgccgtgcgcgggctggcaaatatttaccgccagcaatcgccagaaaaagctgaagcgtttatcgcctcactctctgccagtcagcggcgtagcattgatgatatcgaacgcagcctgcaaaacgaccgtctggcacagcaggcagaggcactggaaaaccagggcaaatgggcgcaggcggcagcacttcagcggcaacgactggcgctggaccccggcagcgtatggattacttaccgactttcgcaggatctctggcaggccggacaacgcagccaggccgatacgttaatgcgcaatctggcgcagcagaagccgaacgacccggagcaggtttacgcttacgggctgtacctctctggtcatgaccaggacagagcggcgctggcgcatatcaacagcctgccgcgtgcgcagtggagcagcaatattcaggagctggttaatcgactgcaaagcgatcaggtgctggaaaccgctaatcgcctgcgagaaagcggcaaagaggcagaagcggaagcgatgctgcaccagcaaccgccttcctcgcgtattgacctcacgctggctgactgggcgcaacaacgacgtgattacaccgccgcccgcgctgcgtatcagaatgtcctgacgcgggagccaactaacgccgatgccattcttggtctgacggaagtggatattgctgccggtgacaaagcggcggcacgtagccagctggcgaaactgcccgctaccgataacgcctcgctgaacacacagcggcgcgtggcgctggcacaggcgcagcttggcgataccgcagcggcgcagcagacgtttaataagttgatcccgcaggcaaaatctcagccaccgtcgatggaaagcgcgatggtgctgcgcgacggtgcgaagtttgaagcgcaggcgggcgatccaaagcaggcgctggaaacctacaaagacgccatggtcgcatccggtgtgactacgacgcgtccgcaggataacgacacctttacccgactgacccgtaacgacgagaaagatgactggctgaaacgcggcgtgcgcagcgatgcggcggacctctatcgccagcaggatcttaacgtcacccttgagcatgattattggggatcgagcggcaccggtggttactccgatctgaaagcgcacaccactatgttgcaggtggacgcgccgtattctgacgggcggatgttctttcgcagtgatttcgtcaatatgaacgtcggcagtttctccactaatgccgatggtaaatgggatgataactggggcacctgtacattacaggactgtagcggcaaccgcagccagtcggattccggtgccagcgtggcggtcggctggcgaaatgacgtctggagctgggatatcggcaccacgccgatgggcttcaacgtggtggatgtggtcggcggcatcagttacagcgatgatatcgggccgctgggttacaccgttaacgcccaccgtcggcccatctccagttctttgctggcctttggtgggcaaaaagactccccgagcaataccgggaaaaaatggggcggtgtgcgtgccgacggcgtggggctaagcctgagctacgataaaggtgaagcaaacggcgtctgggcatcgcttagtggcgaccagttaaccggtaaaaatgtcgaagataactggcgcgtgcgctggatgacgggctattactataaggtcatcaaccagaacaatcgccgcgtcacaatcggcctgaacaacatgatctggcattacggacctgagtggctactcactcggtcagggcggttactacagcccgcaggaatacctgtcgtttgccataccggtgatgtggcgggagcgcacggaaaactggtcgtgggagctgggggcgtctggctcgtggtcgcattcacgcaccaaaaccatgccgcgttatccgctgatgaatctgatcccgactgactggcaggaagaagctgcgcggcaatccaacgatggcggcagcagtcagggctttggctatacggcgcgggcattacttgagcgtcgcgtcacatccaactggtttgtcggtacggcaattgatatccagcaggcgaaagattacgcacccagccatttcctgctctacgtacgttattccgccgccggatggcagggtgacatggatttaccgccgcagccgctgataccttacgccgactggtaagttttcagatagcgcctctcttaatgccgctgcgatcgggtatactcgggcggcaatctgggatttccggggggagacaatttgcgcgtaagtcgctcgttaacaatcaagcagatggcaatggtggcagccgttgtcctggtgttcgtttttattttttgcaccgttttgctgttccatctggtccagcagaatcgctataacacggctacgcaactggaaagcattgctcgctctgtccgcgaacctttatcttcagccattttgaaaggcgatattcccgaagcggaagctattcttgccagcattaaaccggcaggcgtggtcagccgtgccgatgtagtgctgcccaaccagttccaggcgctgcgtaaaagttttattccagagcgcccggtgccggtaatggttactcgcctgtttgagctaccggttcaaatctcgctgggcgtttactcgctcgaacgtccggcaaacccgcagccaattgcctatctggtactacaggcggattccttccgtatgtataagttcgtgatgagcaccctctcaacgttagtgaccatttacttacttttgtcgttaatattgacggtggcgattagctggtgcattaaccgcctgattttgcatccgttacgcaatattgctcgcgaacttaacgccatcccagcccaggagcttgttggtcaccaactggcattaccgcgtctgcatcaggacgatgaaatcggtatgttggtgcgcagttacaacctcaaccagcaattgctgcagcgccattatgaagaacagaacgaaaatgcgatgcgcttcccggtgtcggatttgccgaacaaagccttgctgatggagatgctggagcaggttgtcgcgcgtaaacaaaccaccgcgctgatgatcatcacctgtgaaaccctgcgtgatactgcgggtgtgctgcaagaggcgcaacgagaaattctgctgctgacgctggtggaaaaactcaaatcggtactgtcgccacgtatgatcctcgcgcagattagcggttatgactttgctgtcattgccaacggtgtacaggaaccgtggcacgcaatcactttgggtcagcaagtgctcactatcatgagcgagcgcctgccgattgaacgtattcaactccgtccgcactgtagcattggcgtggcgatgttctacggcgatctcaccgccgaacagctttacagtcgcgctatttctgcggcatttaccgctcgccataaaggcaagaatcagattcagttctttgatccgcagcagatggaagctgcccagaagcggttgacggaagagagcgatatccttaatgcactggaaaatcatcagtttgctatttggttacagccacaggtcgagatgaccagcggtaaactggtcagtgcggaagtgttactgcgtatccagcaaccggatggcagttgggacctgccggatggcttaatcgatcgcattgagtgctgtgggctgatggttaccgtcggtcactgggtgctggaagagtcctgtcgactgttggctgcctggcaagagcgcggcattatgctgcccttgtcggtaaacctctctgcgctgcaactgatgcacccgaatatggtggcggatatgctggaactgttaacccgctatcgcattcagccgggaacactgattctggaagtgacagaaagccgacgtattgacgaccctcatgctgcggtggcaatcctccgtccgctgcgcaatgccggagttcgggtggcgctggatgatttcggcatgggctacgcagggctgcgtcagctgcagcatatgaaatcgttgccaatcgacgtactgaaaatcgacaaaatgtttgttgaaggcttgccggaagatagcagcatgattgctgcaattatcatgctggcgcagagcctgaacttacaaatgattgccgaaggcgtggagactgaagcacaacgcgactggctggcaaaagcgggcgttggtattgcccagggcctcctttttgctcgcccactccctattgaaatcttcgaagagagttacctggaagaaaaatagctaccccaaactgattacaaaactttaaaaagtgctggtttgtgcgagccagctcaaactttttaacctttttgtttcaattatgatccaggtacatttctgtgatgttgtctgggtgttattttaaggccgcaggtaccccataaccttacaagacctgtggttttactaaaggacaccctatgaaaacctctctgtttaaaagcctttactttcaggtcctgacagcgatagccattggtattctccttggccatttctatcctgaaataggcgagcaaatgaaaccgcttggcgacggcttcgttaagctcattaagatgatcatcgctcctgtcatcttttgtaccgtcgtaacgggcattgcgggcatggaaagcatgaaggcggtcggtcgtaccggcgcagtcgcactgctttactttgagattgtcagtaccatcgcgctgattattggtcttatcatcgttaacgtcgtgcagcctggtgccggaatgaacgtcgatccggcaacgcttgatgcgaaagcggtagcggtttacgccgatcaggcgaaagaccagggcattgtcgccttcattatggatgtcatcccggcgagcgtcattggcgcatttgccagcggtaacattctgcaggtgctgctgtttgccgtactgtttggttttgcgctccaccgtctgggcagcaaaggccaactgatttttaacgtcatcgaaagtttctcgcaggtcatcttcggcatcatcaatatgatcatgcgtctggcacctattggtgcgttcggggcaatggcgtttaccatcggtaaatacggcgtcggcacactggtgcaactggggcagctgattatctgtttctacattacctgtatcctgtttgtggtgctggtattgggttcaatcgctaaagcgactggtttcagtatcttcaaatttatccgctacatccgtgaagaactgctgattgtactggggacttcatcttccgagtcggcgctgccgcgtatgctcgacaagatggagaaactcggctgccgtaaatcggtggtggggctggtcatcccgacaggctactcgtttaaccttgatggcacatcgatatacctgacaatggcggcggtgtttatcgcccaggccactaacagtcagatggatatcgtccaccaaatcacgctgttaatcgtgttgctgctttcttctaaaggggcggcaggggtaacgggtagtggctttatcgtgctggcggcgacgctctctgcggtgggccatttgccggtagcgggtctggcgctgatcctcggtatcgaccgctttatgtcagaagctcgtgcgctgactaacctggtcggtaacggcgtagcgaccattgtcgttgctaagtgggtgaaagaactggaccacaaaaaactggacgatgtgctgaataatcgtgcgccggatggcaaaacgcacgaattatcctcttaatctcatcacttatgcccgcactcccttccccgagtgcgggtgtttgcgcataattgacccctgtgcctgaacttaccacctgggtgagttcaggtttatttcacttcttccgtgacattttcatgttcttgcggtctaacacgaagtgtttttaacgtcatttagactgaccgacaacgggcagtttttttattaccaggatagttgatcaggggttcacatgcagggcacaaaaattcgacttttagcgggcggtttgctgatgatggccactgctggctatgtgcaggcagatgcgctccagcctgatccagcatggcaacaggggacgctttccaacggtttacagtggcaagtgctgaccaccccccagcgtcccagcgatcgtgttgaaattcgcctgctggttaataccggttcgctcgccgaaagtacacaacagagcggttacagtcacgccatccctcgtattgcgctaacgcaaagcggtggccttgacgcagcacaggcgcgttcattgtggcagcaggggatcgaccctaaacgcccgatgccgccggtaattgtctcttatgacaccacgctgtttaatctgagtttgcccaataaccgtaacgatttgctgaaagaagcgctctcttatctggcaaatgccactggcaaattgaccatcacaccagaaaccatcaaccacgcgctgcaaagtcaggacatggtggcaacctggcctgccgatactaaagagggctggtggcgctatcgtctgaaagggtcaaccttgttaggtcacgatcctgccgatccgctgaaacaacccgttgaagcggaaaaaattaaagatttctatcagaaatggtacaccccggatgcaatgacgctactggtggtgggaaacgtggatgcgcgctcggttgtcgaccaaataaacaaaacgtttggcgaactgaaaggcaaacgtgaaacgccagctccggtgccgacgctttctccgctgcgtgcggaagcggtgagtattatgactgacgcggtgcgtcaggaccggttatctatcatgtgggatacgccgtggcagccgattcgtgaatcagccgcactgctgcgctactggcgtgcggacctggcccgcgaggcgctgttctggcatgttcagcaagcgttaagcgccagtaacagcaaagacatcggtcttggatttgactgccgtgtgctgtatctgcgtgcgcagtgtgccatcaacatcgaatcaccaaacgacaagctgaacagcaaccttaatctggtggcgcgtgaactggcgaaggttcgcgataaaggtctgccggaagaagagttcaatgcgttagtggcgcaaaagaaactggagctgcagaaactgtttgccgcctatgcgcgggctgataccgatattctgatggggcagcggatgcgttcgttgcaaaatcaggtcgtcgatatcgcgccggagcagtatcagaaactgcggcaggatttccttaacagcctgacggtggagatgttaaatcaggatctgcgtcagcagttgtcgaatgatatggcgttaatactgctgcagccgaaaggcgagccggaatttaacatgaaagcgttgcaggcggcctgggatcaaatcatggccccatcgactgctgctgccgccacctctgtcgccacggatgacgtacatcctgaagtgacggatattccacctgcacagtaatgcctgatggtgatgagttagcacaaccatcaggtatttatggatgagctggatagaggggtaacactttatccagccttttgcatatgctgcgtttacgctggcatcgcctcacgcgggataatcgcgccgcgatactgaataacggtacttgcggtcaggtgcccgcgtttcgccgcgttttccgcactgccgcccgtcaaacgtaccgccagataaccggcgctgaaagagtcgccagctgcggtggtatcgatcactttttctttcggcagtttcaccgccggaacatccactaacccttcgccagcaatggacaccaggcaagaatccgccccgcgtttcaccaccacttctttcacgcccgcgttatgggtgcgcgcaatgacgtcttccaccggctgttgaccccacagcgcgtcttcatcgtccagcgtcaggaaggcgatatccgtgcattccagcatttgttggtacacctgctgtgtctcttctttgctggcccacaggcgcggacgatagttattgtcgaaaatcacttttccgccgttggcgcggcattcgcgcagcagggaaagcagcttttcgcggctggtcgggcttaagatcgccaggctaatcccgctcaggtagagataatcgaaattcgccagctcttcgcaaatcgccgcagactgctcactctccagccagaatttggcggcggcttcgttccgccagtagtagaacgtacgctcgccggtgctgtcggtttcaatgtagtaaaggcccggcagacggttttccatccgttgggtcagggaagtatcaacgttctcgccgtgccaggcgtccagcatttgctggctaaaactgtccgttcccagcgccgttacgtaatgaacggttaatgccgcaggatcgacctgacgggcgatatagacggaagtgttcagggtatcgccgccgaaaccgcgcttaacgtccgcgcctttctcggaaagctcaatcatgcattcgccaatcacggcaatctttttggacatagtcgtgaacctgatctgtaaaaaattagcgttagtttgcgctgtggtggtttgctggtcaaccatattaaaacagtgttccattatttttttgagccagaacgtattcctgaaagattccgttgtggagtgaggaaatttaccccggccaggcggtaaagttctgcccttgcgcgccgataatctttgtcgagtccgggcagcatcacttttaaacacaggacatctttgatgataaggcaggttatccagcgaataagcaaccctgaagcaagcatcgagagcttgcaggaacggcgtttttggttgcagtgtgagcgtgcttacacctggcagccgatctatcaaacatgcggacggttaatggccgtggagctattaacggtggtcacgcatcccttgaacccttcgcaacgcctgccgccggatcgctattttactgaaatcaccgtcagccatcggatggaggttgtgaaagagcagattgatttgctggcgcaaaaagccgacttctttatagagcacggcctgctggcatcggtcaatattgatggccctacgctcatcgccctgcgtcagcaaccaaaaatcctgcgccagattgagcgtcttccctggctgcgtttcgaactggtggagcatatccgtctgccgaaagattcaacctttgcctcgatgtgtgaatttggcccgctgtggctggatgattttggtaccgggatggcaaatttctctgcactaagtgaagtgcgttatgactacatcaaaatcgcgcgagaactgtttgtgatgctgcgtcagtcgccggaaggacgcacactcttttctcagcttttacatctaatgaatcgctattgtcgcggggtgattgtcgagggcgtagaaacgccggaagagtggcgtgatgttcagaactcgcccgcattcgccgcacaaggctggtttctttcacgcccggcaccgatagaaacgctgaatacggcggttctggcgctataagctgcctcattttccgcctggctggactatctttaggactggcacaggaagaatatgaggaagcgaacgatgagcaaggcaggcaaaataaccgctgcgatttcagtggctttcttgttgttgattgtcgtggcgatcattttgattgcaacttttgactggaatcgactcaaaccgaccatcaaccagaaagtctctgcggagttgaatcgtccgttcgctatccgtggcgatctgggcgtggtgtgggagcggcaaaaacaagaaactggctggcgcagctgggtgccgtggccccatgtacacgcggaagacatcattcttggcaatccaccggatattcccgaagtcacgatggtgcatttgccacgcgtagaggcaacgctggccccgctggcgctgctgaccaaaacggtctggctgccgtggatcaagctcgaaaagcccgacgcgcgcctgattcgcctctccgaaaagaacaataactggacgtttaatctcgccaacgatgataacaaagacgcgaatgcaaagccgtcggcatggtcgtttcggctggataatattcttttcgatcaagggcggatcgctattgatgacaaagtaagcaaagcggatctggagatttttgttgatccgttaggcaagccgctgccgttcagcgaagttactggatcgaaaggtaaagcggataaagaaaaggtgggcgattacgtttttggcctgaaggcgcagggacgttataacggtgaaccgctcacgggtacgggaaaaataggcggtatgctggcgctgcgtggcgaagggacgccgtttccggtacaggctgatttccgctctggtaacacccgtgttgcttttgatggcgtcgtgaatgacccaatgaagatgggcggtgtcgatttacggcttaaattttctggcgattcactgggtgatctctatgaactgacgggcgttctgctgcccgataccccgccgtttgaaacggatggtcggctggtagcgaaaatcgacactgaaaaatcgtcggtctttgattatcgcggttttaatgggcgaattggcgatagcgatatccacggttctctggtctacaccaccggaaagccacgaccaaaactggaaggtgatgtcgagtcgcggcaattgcggctggcggacctgggaccgttaattggcgttgactccgggaaaggggcagaaaagtcgaaacggtctgaacagaagaagggcgaaaaaagcgttcagcctgcgggcaaagtgctgccttatgaccgcttcgaaaccgataaatgggacgttatggatgccgatgttcgcttcaaagggcggcgcattgagcatggcagtagcctgccgattagcgatctttctactcatatcatcctcaaaaatgctgacctgcgcctgcaaccgctgaaatttggcatggcgggcggcagcattgcggcgaatatccatctggaaggcgataaaaagccgatgcaggggcgggcagatattcaggctcgtcgactgaaactgaaagaactgatgcccgatgtggaactgatgcagaagacgctgggggaaatgaacggtgacgcggaactacgcggtagcggtaactcggtggcggcgcttttaggcaacagtaacggcaacctgaaactgttgatgaatgacgggctggtgagccgcaacctgatggagattgttgggctgaatgtcggcaactacattgtcggtgcgatatttggtgacgatgaggtgcgggtgaactgcgcggcggcgaatctgaatattgccaacggcgtggcgcgcccgcagatttttgctttcgatactgagaacgcgttgattaatgttaccggcacggcaagttttgcttcggaacagctggatttgactattgatccggagagtaaagggattcggattatcacactgcgttcgccgctgtatgtgcgtgggacgtttaaaaatccgcaggctggggtgaaagccgggccgttgattgcccgtggtgctgttgctgcggcactggcaacgctggtaacaccggcggcggcgttactggcactgatctcaccttccgaaggggaggctaatcagtgtcggacgatattgtcgcagatgaagaagtgatgaggttggattgtgtttgctggtgagttcgggagcagcgtgttcccctcaccctaaccctctccccaaaggggcgaggggactgttttgtgcgtgttgaaacaacgagtaccgcttttccgttcactttctgggggagggctgttatgttcgcgatataacatctcgctccgcttttctccctctccctttcagggagagggctggggtgagggtggctgcccacacgatacttacaacgactgatgtcgcgtctcatgggtcagcagcagggcgattaacgtcaagccagccatcgccgccagatataaccccaccgcacctaacccgtagttagtctgcaaccaggctgcgatatacggcgcaacggaagccccgagaatcgacgctacgttgtaagagaacgatgctccggtgtaacgcacttctgttgggaacagctctggtaacagcgcgcccatcggcccgaaggtcagccccatcagacttaaccccagcagcaggaaggcaaaaaccagaatcgggttgccagaaccgagcagcgggttaaaggcgaacagcgcgaacaggatgatcagcgtggtgataattaccatgcttttacggcgaccaaaggcatcagccagtaatccggcgactggcaccatcacgccaaaaccaataactgccatcatcagcatccacaacacttcgttacgtggcaggccaagcccaactggcgcggcggcggtactgaaggtcatagagtagaccgtcatgatgtaaaacagcgtatatgttgccagcatgatgaacgtacccagtacggttacgcgaacatgtttggtcagcagcgtacccagcgggatcttcacctgttttttcgctttagcgactttctcaaacaccggcgactcatgcagcgacacgcgaacatacaggccgataatgaccagcaccgccgagaagataaatggcacacgccagccccagctcataaactgctcatcggtcagtagccaggaaagcagcaagaaagtgccgttggcaaagaagaagccaatcggtgcgcccagctgtgggaaggagccatacagtgcacgtttgcgcggtggggcgttttcagtcgccagcagcgccgcgccgccccattcaccgcctaagcccagaccctgaccaaatcgagccagcgccagcagcagtggggcgaaaataccaatcgtggcatagcccggcagcagaccaatcaccacggtcgaaatccccatcgttagcaacgaggcgaccagcgtcgctttacgcccaacgcgatcgccaaaatgaccaaaaacggcagagccaatggggcgcgcgacgaaggcgatggcgaaggtggcgagcgactgtagcgttgctgccgttggatcgccctgcgggaagaagatatgcggaaacacaataacggccgcagtggcgtaaatgtaaaagtcgaagaactcaatggccgtgccaatgagagaggcgacaaggactttattacgcgagttgatcggcgtgtattcttgctcgtggtcgagtgttgtggctgttgcttgcataatcttttcttattttttggctaacgaatagccatattacgcacagcaaaagtgatatttcaatgtgtaacaaatcgcggaaatggtcaaaaaccaggcaaaaaggggataatgtttaggccagtgatttttcttctatgaaatgcttcacataattttataaatagtggataaaactggtttcaggttaaataaaagttaccaactggatttatatgctggggttatgagttggaatgaaattgtttgctcccaaatagatggctgaagaggctctggggaagagtttcaagaggttatgtgcgcattatagccggatgcgatgctggcgcatcttatccggcctacggggagccaggccgaataaaatcgtatgccggataaggcgtttacgccgcatccggcctattttaaggctgcgttttccctggcattcgcgggtcgtctttatattcggcggtggcaatccacgccgcgcaaaacagcgtcaaacgggcgaagaagtagaaaaatgccatcagccccagcacggaaccaaatgctgcgccagagggggatttcatcagcgatggcagggtgtaggtcatcacgattttaatcacttcaaaaccaatagcagccagaaatgttccgcgaatcagggcttttttgcgcggacggtggcgcggtaaccgccagaagatccagaagaaaagcagatagttggcgaagatggaaatcgccaggccaatcaaccgccacgtcggtttcagccactcaatgctgttcaggtgcagggcgctaataatcatttgctgcgccgaaccggcaaccgaggtgatcgaaagcgtcacaatcagcgcaatcaacaaaccaatcagcgaaataaaatcacgcagatattttacccagaacttctcctgatcttgcggcgagcgttcccagacatcgcgcgactgggcacgaatcgcttcacgcaggttacccatccagttgatgccggaataaagcgccaccgccaggccgacaagccctacagtcgtacgctgctgaacggcggtgttgatggtgtttttcaacgtggcggctagcgtcggatcgctgatgttttgcagaattttgtcgaagatatcctgtagcaacatcggatgggaggccagcacaaagccccctgcggcaaacgacaccatcaaaatcgggatcatcgataaaaatgagaaataggtgatagccgcaccaaactggttacccagccgatcgttaaagcgttctgtcgcgcgaatcaggtgcgcaataaccggttggcgttggactttttcggcagtggtggtgacggtttccagcgcctggctaactttgccgcctttctcgctattatccaactgcttaatcggctcgtgctccagatcctgggtgggacgtttgatctcgttttcctgcgtcatccgctcttttgtccttctgtcgtggtcattcttaaaaagtatagtcggtcagtccaggtgctctttcattacgccagccagccactgcataaacaggtttacacgccgggaaagctcccgacgctgcgggtaaaccagcgaaagggagagcggctcggcacggtagcctggcaacacttcaataagccgcccggcacgcagggcttcgcgcacggcaatgcgcgggatctgaataatccccagaccggcaagaccggcggcgagatagttttcgctactgtttaccgtcaacatgccgccagacttaaaccactggacgccattaacgctggcaacctcaaaacctaacggatgtacacccaggtgcggtgtataacgcactattgcgtgtgaagtcagatcatcggggctttgcggataaccaaagcgcgtcagatagtgcggactggcacagttgaccatggtcagtttgccgaggggacgggcgataacgccatcttccggtaacgcgccagtgcgtatcacgcaatcaaaaccatcatgaagaatatctaccggacggtcatggctactcagttccagctcaattcccggatgcagatagagaaattccgacaggcgcggcagtaacaggcttttcgcgattcctggcgggatgtcgatgcgtaatttaccgctgatactggtggcatcctgttgaaacagaccgtccagttcgctgagattactcaacacatcttttgctcgttgataataggtcatgccttctggcgtgagtttgacccgtcgcgtggtgcgctggagaagctgggtgccaagttgatgttccagtgcctgtatctggcgcgaaacacttccttttggcaaagcaaagaaatccgccgcgcgggaaaaactttccagctccgcgactttgatgaacaactgcattgcgtgaattttatccatttctttgaccgattgttgttcacagcgaaacagtaacgcgcatatcgcattgtttattgttttttctaacatctaatgccgggtttcacaatgttgtcatgacgaatgtggcgatttctcagcaggaaaagggcggaatagctttctgagaaaggtgaatccccctaaacagagcgtatttttcagcgattccctttaaagtgaatagaggacgtgttggctatttgtgcttatttttgtctcattgccgtttgttatttttgcttgtggtcgcggagtttcatttttaattgcatgcgtactaaccaccaatataaggaaatcctcaaaattgttttaaatagtgccctcgacatgtaatttcaggcgtttagctgtaactatttatatcggtaactattttctacgcgtcatctctgtagaatggccaccgccaaatggcgaattcttattttttctcgcgggtaatacccttccactacttaagtctttttaacgtattcaggtggagattcagttatgcaaatagtcatgtttgacaggcagtcaatatttattcatggaatgaaaatcagtttacagcagcgtattccaggagtgagtattcagggggccagtcaggcagacgagttatggcaaaagctggaaagttaccctgaagccttagttatgctcgatggcgatcaggatggtgagttttgctactggttgctgcaaaaaaccgtggtgcagtttcctgaggttaaggtgttaatcacggcgacggattgcaataaacggtggttacaggaagttattcattttaatgtgctggccattgtgcctcgtgattcaaccgtcgagacatttgcgttggcggtaaatagtgcggcgatggggatgatgtttctgcctggagactggcggacgacgccggaaaaggacattaaagatctcaaatcgttaagcgcccgccagcgggagattttaaccatgttagcggcgggcgaatcaaataaggagatcggcagagcgctgaatatcagtaccggaacggtaaaagcgcatctggaatccctgtatcgccgtctggaagtgaaaaatcgcacccaggcggcaatgatgttaaatatctcctcctgaagaggataattttacagccagcaggaagttagcggctggctgtaaaaatattatggttcgccgtacaaaccaattaaacggcgtaccacaccgttagtccagccaaacccatcctgcaacggatactcgccaccgccgccttcgcggggaacaccatcggcaatatggtatttctcgatcattttgtgctgttccagatagaactgattcaccgttttcagccagctgcgcgcgatttcatcacccagaaggtcatcgccatacattttaaatccctgaattgccatccattgtaacggtgcccagccattgggtttatcccactgttcaccggtttcgtactcgcttgccagaatcccgccaggtgtcagtaaccggctgcgtacggcgtttgccagacgatcggcctgttcatggttcgccatgccgacatagagcggcacaatggcggcagcggaaaacagcgccagttgttcgcgtcgccagtcgtaatcgcggtagatgccgttttcatcatcccagaggtaacggtttaccgcatcgcgacgggcactggccttctggcggaacagcgcttctgtctctttctcgcctttcagcgccgagatgttggcgatggcgctctccagtttaaacaggaaggcattcagatcgatggggatgaactgggtggtacgaatgctcgccagacgaccagtatcacgcagccaacgggaagagtaatcccaacctgaggccgctcccgcgcgtaaatcgcggtacacctcgttgggcgggcgaccagaatgtttcgcggtttcaacgtcctcaagccaggattcgtcacgcggcgtgtcgcgatcgtcccaataacggttgagcagcgatccgtccggcatccgcacaacatggcgataggcctgattagggatcaacgattctgcaccgtccatccagaaggcatattccattttaaggtggtcgagatagcggcgcgcaccgcgtacaccatcttcttcaaacaactccaccatcagcgcaaaaaccggtggttgcgatcggctcaaataataggtgcggttgccgttggggatgtgaccatagttttcgatcatccaggcgaagttatcggccatgcatttcagcaaatcttcccgaccactttccgccagccccagcatggtgaaataggaatcccaatagtaggtttcgctaaaacggccgcccgggacaatatatgactgcggtagcgccagcagagaagaccacggaatgtgatcctgtggttcgcgggttagcaccggccacagctggtcgatatgctctttcagggaattttgcgggtccgatacatactcgctggagtagacctccggcagccagaagtgattttcaacaaacttgcgcaagtcaaaatcacgatgacggcgcactttacggtagcggattaaaatatccagcgggtccattttgggtgcgcagtcgggaaaggttttactgtcggggaaaattttcgccgactgaacatgctcgaacagttcgagatagcgatcggcaggcgtcagcgcatcagaggcgggcagcccttcaatcatctcgggttccggttctgcctcgatcatctcatccagttttaattcatacgggtccagctcatagcagagatcgacttcgatcatcagttcgtctggattagggttttgaattttctgattgagcataaggatccaacctccgaaattcgtcgctaattatcgggcttttctttaagggtagtcattcgctccgcctggtgggcgacaaagcgtgcggtggatcacgtttattaacctgtcaaaaaatataacgcactaatatccatggaatttataaaaatacggatttcgtgttgtttttcattttcagaacattcaatcctgctctcgccgcaatcatgatatgccattcctgatctgggtaataggcacaggctatcttattgatagtttatattcatgtaattgattgattcctatcaaaaagcgtatctcactgttttttatgatggctttgtctcgcagagacgtttgcagcattctggaaaattttctgggtcacaataactcaccaccgtgagggaagaataatgaaaatggtctcacgtattaccgcgatcggcctggctggcgtcgcgatttgctatttagggttatctggttatgtgtggtaccacgataataaacgcagtaaacaggccgatgttcaggcatctgctgtcagtgaaaataataaggttttaggctttctccgcgaaaaaggatgcgactattgccacacgccttcggcagaattacccgcctattattatattcctggcgcgaaacagttgatggattacgacattaagcttggatataaatcttttaacctcgaggccgtgcgtgcggcactgctggctgataaacccgtttcgcaaagcgatctgaataagattgaatgggtgatgcagtatgaaactatgccaccaacgcgttataccgcgctacactgggcgggtaaggtgagtgatgaagagcgggcggaaatactggcctggattgcaaaacagcgcgcggaatattacgccagcaatgatactgctccggagcatcgcaatgaaccggtgcagcccatcccgcaaaaattgcctaccgatgcgcaaaaagtggcgttgggctttgcgctgtatcacgatccccgtttatcggctgatagcaccatttcatgcgctcattgccatgcgttgaatgcggggggcgtcgatggcagaaaaacatcgattggtgttggtggcgcagttgggccgattaacgcgccgacggtatttaactcagtatttaacgttgagcagttctgggatggtcgtgcggcaacattgcaggatcaggctggtggaccgccgttgaacccgattgaaatggcgtcgaaatcctgggacgaaattattgctaagctggaaaaagatccgcagcttaaagcgcagttcctcggcgtctatccgcaaggtttcagtggcgaaaatattactgatgccattgctgaatttgagaaaacattaattacgccggattccccatttgataaatggttgcgtggagatgaaaatgcgctgacggcgcaacagaaaaaaggctatcaattatttaaagataataaatgtgcaacttgtcatggtggtattattctcggcggacgttcctttgaaccgttggggctgaaaaaagactttaactttggggaaattacggcggcggatattggtcgtatgaatgtgactaaagaagagcgtgataaattgcgtcagaaagtacccggtttacgtaacgttgctttaacggcaccgtacttccatcgcggtgacgtgccgacgctggacggggcggtgaaactgatgctgcgctatcaggtaggcaaagagctgccgcaggaggatgtggatgatatcgtagctttcctgcacagtctgaacggggtgtacacgccgtatatgcaggataaacaataattaatttgatcgcccgaacaggaatgtttgggcgatttttattacgataataaagtctgtttttaatattatcatgttaaatgtttatattataaaaagtcgtttttctgcttaggattttgttatttaaattaagcctgtaatgccttgcttccattgcggataaatcctacttttttattgccttcaaataaatttaaggagttcgaaatggaccagaagctgttaacggatttccgctcagaactactcgattcacgttttggcgcaaaggccatttctactatcgcggagtcaaaacgatttccgctgcacgaaatgcgcgatgatgtcgcattccagattatcaatgatgaattatatcttgatggcaacgctcgtcagaacctggccactttctgccagacctgggacgacgaaaacgtccataaattgatggatttgtcgatcaataaaaactggatcgacaaagaagaatatccgcaatccgcagccatcgacctgcgttgcgtaaatatggttgccgatctgtggcatgcgcctgcgccgaaaaatggtcaggccgttggcaccaacacca

SEQ ID NO: 78 - DNA, 27301 bp, Escherichia coli
  source 1..27301: mol_type = genomic DNA
ggtgcttttgccgttacgcaccaccccgtcagtagctgaacaggagggacagctgatagaaacagaagccactggagcacctcaaaaacaccatcatacactaaatcagtaagttggcagcatcacccgggattgccagcaacacagtaaagaccaggctataaacaaaaatcatcgatgactgaatcacatacattgatgtcgtccactcagacagcggaatattgtactgttctataacgccgccgatagtcgcgcgagtcacaaccgacgccgcaataatgaaaaccgccaacaaaccaaagagaaatttcttccctttcgctgacttcagtttcgccataatcatgatgtaatccttgtgcagacaaatttcttgttacctaaacgtaacaataccatgacatttcaccgttgtctgctctgaaaacctcacctcttagctggatttacaatcaacgcattgattagttagctaatgttgctacttccttccctgactattgatgatctgaatgaattgtcgcggtaaaatagccccgccaggggtttccggcatgacgacaattatctggaggagcctgataaaacaatgatcgctgaactgtttacaaataatgcgcttaatctggtcattattttcggtagctgcgcagcattgattctgatgagcttttggtttcgccgcggaaatcgtaaaagaaaaggttttttattccatgcggtgcaatttttaatctacaccataattatcagtgctgttggtagcattattaattatgttatagaaaactataaactcaaatttatcaccccaggcgttatcgattttatctgtacgtccctgattgcggttattctgacgattaagctatttttgctgattaatcagtttgaaaaacagcagattaaaaaaggtcgcgatatcaccagtgcgcggattatgtcgcgcattatcaaaatcaccattattgtggtgcttgttctgctttatggcgaacatttcggcatgagcctttctggcttgctgacctttggtggtattggtggtctggctgtcggtatggccggtaaagatattctgagtaatttcttttccgggatcatgctctatttcgaccgtcctttcagtattggcgactggatccgttcaccggacagaaatatcgaaggtacagtagcggaaattggctggcgaattaccaaaattacgacctttgataatcgtccattgtacgtaccgaactcgctgttttcatcgatcagcgtagaaaacccaggacgaatgaccaaccgccgcattaccacgaccattggtttacgttatgaggatgcggcaaaagtgggcgttattgtcgaagccgtacgtgagatgctgaaaaatcacccggccatcgaccagcgacaaaccttactggtttatttcaaccagtttgccgactcgtcattgaatattatggtttattgctttaccaaaaccacggtatgggctgagtggcttgctgcacagcaagacgtttatttgaagattatcgatattgtacagtcacacggcgcggactttgccttccccagccagacgctgtatatggataacattacaccgcaggaacaggggcgctaaatcagacatcactggcgttatccacaagggtaacgccagttcccatcacatcaatgcttcacaatatacatagtccggctgtacgccacatcttccgggttattaatgggataacctttcagccacggcttgattaatcgtccattggtatattgataaattggtgcaatcggtgcttgctccatgaggattttttctgccgcgttgtaatcggcattacgcgctttaacggtattttccgtcgatgcctgggccagaactttgtcgtatgccggattgttaaagcgtgaaatatttcctgaatgcgttgacgttaataatgtcaggaaagtggagggttcattataatcccccacccatgaggcgcggataacatcaaaattgccggtgttacggctatcgatataggttttccattcctgattttgcaatttaacatctacgccaaggttctttttccacatcgatgctacagcaatcgcaattttttgatggttttctgaagtgttatacaaaagcgtcagcttcagcggtttttgcggaccataaccagctgcgctcaacaaagtttttgcctgcgcattcagttcttcctgactcatttgttcaaacggcgaaggttccggcgtaaatccggcggtaacatctggtgtaaaatgccacgctggcttttcgcccgtccctaatactttttcggtcatcaggcggcgatctatcgtcatacttaatgccagacgaacgcgctgatctgccgtcggccctttttgcgtgttaaacgcataataataggtcccgagctgcggcggcgtataaacctgccccggaatatccttcaacagcttctgatacatatttttcgggaaggattcggtgatatcaatatcccccgcgaggtaacgcttagtggctgcggattcctgattaattggcaggaaggtcactttttgcagtaccgttttggcgttatcccaataatgggtattcggtaccacgaccagtttttcattgactacgcgttctttaagaacataagcgccattgccgatcagatttccgggtttcgtccactctttaccgctttctacgttggctttttgcaccgggaagaaggcaaagttagcggttaaattcacaaaccacggcaacggtttatcaagctgaattttcaaggtatgggcatcaactgcggtgacgccaagctggtcaggcgtagctttaccatcaataatcgcctgtgcgttgttgattcccgccagcgcggcaaaccatgcaaatggcgatagcgttttcgggtccaccagacgctgccagctgtagacaaaatcttgcgccgttaccggtgtgccatccgcccattttgcgttatcgcgcagggtaaaagtccagatacggttgtcattacttttccactgagtcgcaacgccggggacaatctcccctttctcgttctgattcaccagtccttcaaacagatcgcgaatgacctgaatctctggcaggcccacggctttagcgggatccagcgacgcaggctcatctttaatgtggcgcaccagctcctgcttctctgccagtactgtgccgctcggaacttctgcagcatacgaaagagaaatgctgctgaccaacagcgcacaacacgtgactgaaacagagtgcttcataagtttccctctaaccgacattaaaattgatgcgtaattatttgtttcgccttaaagaaatgcaaacaacttccatcaaaaaagtgacacaggaagcataaaatgttttatgtatcaatatattaaatcagatttagtgtaaataatcgacgccaaaatgcggcaaagcacatagaacaccgaacactacgttcaggcttcgcacgttcaaaccagttttcggtatcaaaatcagcatctgtcgccattgtacgaagaataaaaaataaccaaaacgttgaaaggaactgagaatacgttaagagagaaattaaattaatgtatcagcaagtagtgctaaacagcacctttatacttcagcctatctataaataatgagaatgccgagccagcatgtcgacggtgtggatagtacaggtgataaccgggtaaatctggtgtgaatttatccaaaacacgtatcagttttttttctttaatagcccgctcaacctgatcataaggtagatacgccaatccatgcccatcaattgcagcatcaatgatcaggtctatcgtattcagtaaaagctgaccttccatgcgaacacgaacttcacgtccaccgcgtattaatctccagcgatttgctgtacccgatgtgggaagatacaaattaattgcctgatgatctattaattgtgacactgacgttggaacacttcggcgagaaaaataatccggtgagccaacaatagccattggtatatctggcccgattcgaatggcgatcatatctttatccatctccccacccagacggacgcctgcatcaaaacgttcagaaacgacatcggtcaaaccataatcaatggtgagctgaatatcaatttcaggatgcgatttcaggaatgtgcgcattgctggtaacaatatcgtttttgctgcatgttctacagtagtaatacgtattgtcccggatgggcggttctgcagctcgctcagggatgccagggctgaatctatgtcatgcaacatagggccaagaacagacaaaagatgctcgcccgcttcagttggaacaacgctgcgcgtggttcgcgtcagaagccgcaatcccaatcgttcttctatacgacgcactatctggcttaaagctgactgcgccatgctcaggcgggctgctgcacgagtgaagctacgctcctctgcaacgacgacaaacgccatcagatcagcgatttcttcacgcttcattcagtatctccatgcaatctattaatcatttaaatgataggtctaatcatgattttgggtctaatcaacttaatgatcaatatctatagtgatatcaccaaccgttaaaacgaaccaacaactccatgaggaacggaatgatgaataataaagtcagcttcactaacagcaataatccaaccatctctttgtctgcagtgatctatttccctccaaaatttgatgaaacccgtcagtatcaggcaattgtggtatctcacccaggtgggggcgttaaagaacaaacggccggaacctatgccaaaaaactggcggaaaagggatttgtcactattgcttatgacgcatcttatcaaggtgaaagtggcggcgagccgcgtcagttagaaaacccatacattcgtactgaagacatcagtgccgtgattgattacctgacaacgctttcttatgtcgacaatacccgaattggtgcgatgggaatttgtgccggtgcaggatatacagccaatgctgcaattcaggatcgccgcatcaaggccatcggtaccgttagtgcggtcaatattggttcgatgttccgtaatggttgggaaaacaatgtgaaatctattgatgccctgccatacgttgaagcgggttcaaacgccagaaccagcgatattagcagcggagaatacgccattatgccactggcaccaatgaaggagtccgatgcgccgaacgaagaactgcgtcaggcctgggagtattaccacacccctcgcgcgcagtatccaacagcaccgggttacgctactttgcgcagccttaaccagattattacctatgatgcttaccatatggcggaagtgtacctgactcagccgacgcagattgtggcgggcagccaggcagggagcaaatggatgagtgacgacctgtacgatcgagcatcaagccaggataaacgctatcacattgttgaaggcgcaaaccatatggatctttatgacggcaaagcctatgtggctgaagcaatttcagtattagctccgttctttgaggaaactctgtaatgaaacatattcaaatccgcaatagtgatatggcctggcatattgctgccaatattcagtttccaccaaattttgatgagtcaaaacagtatccggcgattatcagcgtccatccttttggcagttgtaaggagcagacgtctggcaatatctatggcaaagcattggctgaaaaaggctatctcgttctcgcttatgacgccagtttccagggagaatctggtggggagcctcgctggatagaagatccgacacagcgcgtagaggatattagccgtgttatcgattatgcagtaactctgccatatgttgatgctgaacgtattggcgtgctgggagtgtgtgggggtggtggctatgccattaatgccgcgctgacagaaaaacgaattaaagcagtagtgagtattacgggtgttaatatcgggcgtctttttcgggaaggtttcagcaattatgatccgattggcgtattgaatgcaatggcgtcacaacgaacaaaagaggctcgtggtggagaattacagatcaacgaattacttcccgccagcctggatgcagcaaaagcccatggactgaccgaacgcgatgtttatgaagcaactgactactataaaacaccacgcgggcaacaaccgggaggtgcgacaaaaatgttgttctcacatgcacagaaaacgctggcctgggatgccttcgcatttactgaagtgttactgactcagccggtgatggtagtagttggtgaaaaagtcggtgccttcggtgcttatcgtgatggactggaagtctatggccgggcgatggtttcgcaggatcgtcagttagtttcgttacccgatttctcacattatgaactgtatgacaaaccggaagcagttcaggaggcgctggaaaaagttattccttttttcaacacccatctgggataagtttcatgagaaatattatgaaaaaagtactcattcttggtgctggcggtcagatagcccgccatgtgattaatcaactggcagataaacaaaccattaaacaaactttatttgctcgtcagccagcaaaaatacacaaaccctatccaactaatagcaagattattatgggggatgtactgaatcatgcagcactgaagcaggccatgcagggacaggatattgtgtatgccaaccttacgggggaagatttagatattcaggcaaattcagtgatcgctgcgatgaaagcctgtgatgttaaacgtctgatctttgttctttccctcggcatttatgatgaagttccaggaaaatttggcgaatggaataatgcagttattggtgaacccctaaaaccattccgcagggctgcggatgcaattgaggcttctggactggattatacaattcttcgccctgcctggctgacggatgaagatattattgattatgagcttacctcacgcaatgaaccattcaaaggtacgatcgtatcacgtaagagtgtcgcagcattaattacagatatcatcgataaacctgagaaacacattggtgagaatataggcatcaatcaacccgggactgatggcgataagccattcttcatgtaaatcaattatatagctaccatcgtactgtactatgtgcagtacgatttattaaacttattaaggtgaactgatcaatcagatgcgattaacatgtgtagaaccaataagaataaaatacgccatgtatataacattacgacaattctaatatctgcacatcaatgaaaatacaaacaacttccggcaaaaaggtggtacaagatcgatgacatagcgttgaagaaaaggatttgataatccgcaaaatttgcacaacactgcctgtaatacttcctgaaccagagacgatcatgaccgtaactcgcccacgcgccgaacgcggcgcatttccgcccggaacagaacattacggacgttcattattgggcgcgccgttaatctggtttccggcccctgcagccagtcgcgaaagtggtttgattctggctggcactcacggtgatgaaaactcttcggtcgtcacgctctcctgtgctctgcggactttgacaccttctttgcgccgccatcatgtggtgctgtgtgtgaatcctgacggctgccagctggggttacgggccaatgctaatggtgtggatttaaacagaaactttccggcggcgaactggaaggaaggtgaaacagtttatcgctggaacagcgccgctgaagaacgtgatgtcgtattactgacaggtgacaaacctggctccgaacctgaaaccctggcgctgtgccagcttatacaccgcattcaacctgcctgggtggtctcattccacgatccactggcttgtattgaagatcccagacacagcgaattaggcgaatggctggcccaggcgtttgaattgcctctggtaaccagcgtcggttatgaaacgcctggctctttcggcagttggtgtgcagatctcaacttgcattgcatcaccgcagagtttccgcccatctcctccgacgaagccagcgaaaaatatctctttgcgatggcaaacttgctgcgctggcatcctaaagatgcaattcgcccgtcgtgaactgaagcgctggttccacatctaccgccagccaggtcggtccgtcaagatcggcgaaactgacctgcggcaccagcggtaaagcggcgctaatggcacgagaggtacacaacatgcagcccagcatcagactgaaaccttgtgcacgcgcttcagtcgccagcgccagcgcttccgtcagacccccggttttatcgagcttaatattaaccatctcatagcgccctttcagcgccttcaaattgctacgagtatgacaactttcatcagcacaaatcggcaacggatgaataaaattctccagcgccgcatcgtcctgcgcaggaagcggttgttcaagcatcgcaacgcctaaatccgccaatagctggcaacgtgccgccaacccttctgcacgccaggattcatttgcatcaacgatcagcgtggcatcgggcacagctgtgcgaattgccaccatccgctcactgataagatggttatccagcttcactttcagtaatttcgcgccggcctgccagagtgttgatgcgctattggccatctgatcaggcgtaccgatgactaccgtctgtgcagtggtgactgtcccgggaagcgttatgccgatcaaatcagccagcgattgctgctgttttcgcgcggccagatcccacaatgcacaatccagcgcattacgtgctgcgccggcagggagaattttttgcaactcctcccgtgtaagccctttctctaattgcggcacgacgctcataatttgcgccattaccgaggcatcactttccccataacgcggatacggcgtgcattcgccggtgcctttaatgccttcttcttccagttcaaccaccaccacgtgcgcttcactgcgacttccccgggcaatcacaaacggggtatgtaagggccaggcttcctcaaataccttaacggttctcatctttactccttgttgtcgcggtggtctgcggattaagcgcaaatagcgtttgctgtgttattgacagttagcataaactaggtgtgacgttaactatatgtaaacaggaaagataatcatgtcacaaaccgttcatttccagggcaacccggttacagtcgccaattccatcccgcaggcgggtagcaaagcgcagacttttactctcgtggcaaaagatctgtctgacgtcaccctcggtcagtttgcgggtaaacgcaaagtgctgaacattttcccgagtattgataccggtgtttgcgccgcatcagtacgtaagtttaaccaactggcaaccgagatcgacaacaccgttgtgctgtgtatttctgccgatctgccgttcgcccagtctcgtttctgcggcgcagaaggtctgaacaacgttatcaccctctccactttccgtaacgctgaattcctgcaagcctacggtgtggcaattgctgatggcccactgaaaggtctggcagcgcgtgccgttgtggttattgatgaaaatgacaatgtgattttcagccagctggtggatgaaatcaccaccgagccggattacgaagcagctctggcggtactgaaagcataagttaatatgcctgatggtgttgcaccatcaggcatattcgcgcttactcttcgttcttcttctggcttaagccatattcccgcaacttattggcaatcgcggtatgtgaaacgccgagacgttttgccagtttgcgcgtgctgggataattgcgataaagctgggttaataccgagcgttcaaaacggctggtgatttcatccagcgaaccttccatcgcatcttcgcccacggctaccgttgcggcgtcataatccggcaacaaaatatcctgtggacgcagctcataaccgtccagttgtgtcagtgcgcgatagatagcgttctttaactgccgcacatttcccggccacgcataacgcgtaagtacagtattcaggtcagcggccagtttcggacgcggcacgccctgctcgtcggcaaagcgggcgacgaacagctcagttaacggcatgatgtcctgcggacagtcacgtagcggcggcagattgagcgtcaacacgttcagacgataatagagatcttcacggaacacgcctttttgcaccagttcgaccagattcttctgcgtagcgcaaatcacccgcacatcgacatgcacctcatggtcttcgccaacccgacggaaagtgccatcattaaggaaacgcagtaatttcgcctgcatccgtggtgacatctcacctatttcatccaacagcaccgaaccaccgttcgcctgctcaaagaatcctttcttcccttccggagcatgaccaaacagttcactctcgaccgcatcttctggtatagacgcgcaattcagcgccaggtaaggtttgcccgctctggggcttgcctgatggcaggcgtaggcaaaaagatctttacctgtacctgtgtcacccgtaatcagcagcggcgcgcttagcatcgccagtttctgcgcctgttcgacaacatgcttcattttcgggctgacggcgacaatttgactaaaggcgctgacgtcctgggcggcaacattttgcaactgacggcccatacgaatcgttgatcgcaacatcaccaccgcaccggtcaggacgtgttgatcattttcatcctgaagataaacaggcgtaatctccatcaggaaattctgcccattaataacaacatgctcgttatgcgaatcttgcggttcgctttccagccaacgtaaaaaattaaagccgttaatcaattgtgcggcggtatggttgcgcaggcgatccaatttttgcccaaaaagctgacagctcgccgggtttgccatatccactttgcttttcatatcgacagagagcacaggttcaggcaacgcctccagtaacgcgctcaacgccagatgctcacgttcggaaggcatccacgggacagtacgcacatcggtaacacctgcaatacggcgtatttcggccatcagactgctgaaactctcaaactccagttcagcaaaattgaggtagattcgcccaatggggtcaatctcaataccgcgtaaatcaatgcctcttagcacgagtagatcgagtaattcgcgggtcagaccgagtcggtcttcacaaaagacttccagacgcatgggaaccttcacctgaaaaaagaacaattaatatgatgatatgacactatttggatagcaggaaggtttctgtcaacaatcattgacacaaagacggaaaaacgggcacttcggcgtaaagatatccggtcagcacccgatattgcattatttttcgctgggcgttttgcctttttgcagcgtttctttcacctgaccgataagctgacgacggaaatccccgaggcgaggtttgtcatcgtcaatccacggcagcgggcggcaaagctccatagctttaatcccgagtcgtgccgtcagaagtccagcaccaattccctgagctgcgcgggtagacaaacgagcagcgagatcttgcgacatccagtccatccccacttcgcgcaccagttcgctggctccggcaaaagcgatattcagcaataccagcttaaacagacgcaaacggctgtaataccccagttcaatgccatacagcgtggcgatgcgattaattaaacgcagattgcgccaggcgataaacgccatatcgaccaacgccagcgggctgaccgcaatcatcaacgttgattccgccgccgaacggctgatttcgcgccgcgcctgggcatctaaaactggctggaccaaatgcgcatacaaactgaccacttcacggtcgttttgcgtttcatggattgaggcataccagcgttgcagcgctggatgagactgatcaatacccgcctgctgcgccagtttttcgcaaaatgcgcggcctttgcccgtgccgtggctgtgcaacaaatcgcgcgcttcgtcgcgttcatgggcgcgctgtcgcaagcgccataagcgccgccactctgttaccacagaacctacgccagcgccgataatcaatgccccagcggcacatccacccagcgccacccagtcctgagtttgccaggcattcattgtccactgtacaccctgcccgacaacgcttgcgccaaacagagccagcccgcccatcaccattttgcgccacaggctgcgtttcggacgtaacgctgcatccattaccgcttcaacttgcccctcttcttcaggcgcttcatcgagcgtggccggggcaaaattttgcgcctgattttcgtcaaaggtctgctgcgccctgaattttggattctgatcgacctccagcggaccgtcgaaatcaatacgtggttttaacggttcggtcatcgcaatttatctcctattaaaaattcaagcgcggcatcaaggcgaatatgcggcagcggtttgtcgacatccatcacctgcggacgaaacgcctcaaactggaagccttgcttatcccagaacgcctgaccgggcaaacgagcgggaacttcgccaggataaacagtgagcggtgcgccatcgctgagtcgattaccgcgtagcgccgggattttctcaccgttaacatcaataatgccgctggtggtcgcctgcaccgaggccagccccaggcaatccatactaatcccttcaaacgccgcattttgccaggcatcctgaatcagttgttgcagtaatgaaaccatattggcgtgctgatcgatggtcacatggtccgctttagtggcagcaaacaatagcttatcgataaccggcgaaaacaaacgccggaacaaggtacgctgcccgtagtggaaactttgcatcagctgcgtcagtgccagacgcatatcattaaatgcctgtggcccactgttgagaggttgcaggcaatcaaccagcacaatctggcggtcaaagcgcagaaaatgattcttatagaaccccttcaccaccttctcgcagtaataattaaaccgctcgcgcagcattccggcattggtgtgcttatcggcctgcgccagtttggactcgccccaggcatcgacatccggccacgggaagaattgcagcgcgggcgcacctgccatatctcccggcaagacaaagcgcccaggctgaataaagtgcagcccctgctgtttacagtggtggagataatcggtccacgcggcagcaatgtctgccagccggttttcgtcggcaggcgctagcgggtccagcccttcgcacatcattcgccatttgaccgaccattcgccgcgctgaccattgagtaagcccgtcatctggcgtgaccagcttaaatagtcctgcgccagcatcggcaggtcgagcaaccattcgccgggataatccacaatctccagatacagcgtggaggtgtccttgaagtggcgtagcagcgaatcgttcgatttaaaacgtagcgccaggcggatttcactgacgccgcgcgttggcgtcggccaggcgggaggatcgccatataactgcgccagtccttcatcatatgtgaagcgcggaatgccaaagtcacgctgaggaatgcgttttacgcccagcaggcgctcttcacgcaccgcgcttaacagcggcaagcgtgctccggcgtgaatattgagcaactgattgaccatcgcagtgataaacgctgttttgccgctgcggcttagtccggttacggcgaggcgcagatgtctgtcgacaccccgattcaccagcgcattaagttcatttttaagtcgcttcattgctgtcctgtgctgctctgaagaccagaaaaaaatcattcgtaaggatatgaatgtgggggccaggccattgattatcaactgcccgtgttgtcatcgacgggcgaactccataagatgtgcagcattcacgttcggacggagttcctgacctatgtcccctactatttatgatattgccagggttgcaggcgtatcaaaatccaccgtatcacgcgtgctgaataagcaaactaatatctccccggaagcgcgcgaaaaagtgttacgggccattgaagaattacagtatcagccaaacaagctggcccgcgcgctgacctcttcgggttttgatgccattatggtgatttctacccgttcgaccaaaactacggcgggtaatccgtttttctctgaagttttgcatgccatcaccgccaaagctgaagaggaaggtttcgacgtgatattgcagacgtcgcacaatccggcagaagacttacaaaaatgtgaaagcaaaattaagcagaaaatgattaaaggcattattatgctaagttcgccagcggatgagtcattttttgcccaacttgataaatacgatattcctgtcgtggtgattggcaaagttgaaggtcaatatgcccatgtttattctgtcgataccgataattttggcgacagcattgcgttgaccgatgcattaattgaaagtgggcatcaaaatattgcctgcctgcatgctccgcttgatgtccatgtttcagtggatcgggtaaatggttataagcagagcctggctgcgcataatattgcagtgcgtgatgaatggattgttgacggcggttatacccatgaaacagcactgcaagccgcgcgggaattattaagccagtcaccgttgcctgaggcagtgtttgctactgacagcctgaaattaatgagtatttatcgtgcggcagcagagaaaaatattgctattccgcagcagttagcggtggtgggttatagtaatgaaacgctgtcgtttattttaacgcctgcgccaggcggtattgatatcccaacacaggagttaggtcaacaaagctgtgagttattattccgcttaatttctggaaaaccgtcaccacagaatattaccgttgccacgcatatgacgctgaaataaataccagctaccttgcctgaatgccggatgcgatgctagcgcatcttatccggcctacatttatagttcggataaagtactcgtgccgcatccggcaatttagcccattatcagaacgagtaatttacgccgacacctgcataatggaatttatcgctgtcgccttcgtcgtgatcctgccactcaaacgcgtattccagcgaaacggaaagcccgttctggaaatcataaccgtaaaataaacctacacggttaaaatcatggccttcacgttcaatatcatcctgccagtcccagttactccagcgatccagcccaatgcgcgtatacggcgtcaccgagtggttgccgagcgtcagcggcaaataggcgcgaatttcttgcgtagaaaactcaccgttattgcggctgtcgtccatattaaagccgcgctcgagataatagttcactcgcaaggcaaccgtttcgttgaaggtatattgcaggcctgtttccgtttcgactcgggtatcagcgtaaccggtcgtgttcagatcgttggcaaatttatacatcgacaaccaaccgttgaaacgtaaatcgtcagtcagtttcacatcccagtctggcgcgattttccagcgctgcatattcgccgtgtctttacccggttcatcaacgtagtgataaccataattacggaaaccgccggtcaggccgaaactgaaatcatcgttttcgaggaactgataatgcacctccagctccgggcgatcaaaccacgttccacgtttacccgcgctataatctaccggcccttcctgataataggccagagcaattctccacggcccgttggcggcattaaaatagactgaaggctccgccagcccatccatatcttcgccataaccctcgacgttttctatttcgtacatcgcgccgatattaaagtgccagtcgttcctttcctcggcctgtgcgcaggccattcccgcacacatcaccagtgcggtacagggtaataactttttcattattgttccttgtattattctgggggaatgccttccccctgtatttagcgaattgctatttccgtttctgcatcaaagaaatgacatttcgtcatatcaaaatgaatagtgatattttctcctgcatgataatcatttaacgcaccagcacggaccactaactcgtgccccccaaccgtggtgtagagcataaattccgcaccggttaattctgccacgctaattttggcggaaatgttattttcctcttgcgcgtccggatgaatatcttccggacgtattcccatcacgatgggcttatgcaaacttccctgtgttttcagaaccgctaatttctcttcgggaatggttaatttaagcgtttccgtaacgaatttatcgccatcgatcgtgccacgaataaaattcatcgccggtgatccaataaatccggcaacaaacatattcgctggttggttataaaccgttttcggcgcaccaacttgctgaacaatcccatccttcataatcacaatccgcgtcgccatggtcatcgcttcggtctgatcgtgggtcacgtagatcatggtggtattcagcttctggtgtagcttgctgatctctgcgcgcatttgcacgcgcagcttggcatcaaggttagagagcggttcatccattaaaaacacgcccgcttcgcgcacaatcgcccgcccgagcgccacacgctggcgttgcccgccggaaagcgcgcccggcttgcgtttcaggtactcacgcaggccgagaatttgcgccgcccagttcacccgctcatcaatcacctctttggcgattttttgcatcttcaggccaaacgccatgttgtcgtaaaccgtcatatgcggatacaacgcgtagttctggaacaccatcgctatattgcgtgctttggctggaacgtcattcattcgtttgccgtcgatcaacagatcgccgccgctgatctcctcaagcccggcaatcatgcgcagggtggtcgacttaccgcagcccgacgggccgacaaacacgatgaactctttatcggcaatttccaggttgaagtccttcaccacatgcacctggttatcgtagattttttgaatatgttgtaacgaaagctgagccatgttgattcctttgctatacgttttgccagaaggccgataaccgcgaccaggtcagagagtccgttgaaggcaacagtaattgcgccccggttaagcccgcgccgatccccaccgagcgcataccgctggcgttaatggcgtcaatgcccgcctgcgcatcttcaatgccgatacatgcctgcggcggcacgcccagcccggcacaggcggcgagaaagatttccgggtccggtttcgagtttttaagttgggaagcatccgcgcagaaggtgaaaaactcgcgcagctccagcgccgctaaaatcgtcggcgcattcagggagacagaagccagcccaaccgggatctgctgtgcacggagatctgccagcaaagagcgaatgccgggtagaacagcgctgaccgtcaactcgcgcagtgagtggacatagagcagatttttgcgatacgccagttgcgccctctcctgcgagttaaagtcgccctctttgcccccgtgttgcagaatgcgccgcagagactcatcgcggctgatcccttttagggattcgttaaactgcgcatcaatgctgatgccaatttcagcggcaatctgctgccacgcctggaaatgcagatgcgcggtatcggtgattacaccatccagatcgaaaattaccccttgcagtttcattcatcctcctgatgtgtggtagcggtcccattgaagggcaaaataaaatcacccaaacagaaaacagattcttcagccacggatataagctgaccgttcaaacgcagtgaaacgggcgcagaagttcgaatcgcaatacgctgcgcgtcaagagtgacctgtaattcgcagccctgccagaacagagggaaagacaactgttgccactgctcaggtaacgccggattgagatgcaattcaccgtcacgcacgctcaccccggcaaaaccctgaatcgcccccagccagatagcgccagttgcggcagcatggataccatcatcacaactatgcggatcagcaccaagatcgatttcagtcccctcgcgccagaactgataactttgggtcagcaggccacagcgtgcggcaacaatgccgtggattgctttacttaatgacgagtcgtgaatagtgcgcggttcataaaattgcagattggcaagacacgatgccgctgagaactgctccggcagcatgtaattgagcatcaccacatcagcttgtttgaggatttgcatctcgttcacttctgcgcgtgaataatccagcagaatggtttgcttccccgccgccgctttgtatttcgccagattaatcgccggcttagccataaacgaatcatcctgcggcaaaacgccgtcgggctgaatttctggcagccgcagttctttaaggaacatttcggcgcgatggataaacgcatcgtcgctacagccaaactggcgggcaatactcagcgcctgctggacgttgtaatacgccatatagctggtgaaggcgttattattgacatgttcggtatattcgtcaggcccaataacatcatgaatttccagacggtcgttaaccctcaccgcgcggctaatccagaactttgcagtttccagaagtagcgccatgccttcatgcgcaatgaaactttcatcccccgtggtctgccagtattgaataaccgcccaggcgatatcggccaccagatgatgttccgcctgcgccgaggccactttttgccgcagcccggtgcgaatgttaatggcggcaaattccggcgtctcttcttcgccgctgcgcgcgctttcccacggaaatagcgcgccctgccagccgttgcgtcgcgctttctcctgcgcgcctggcaagttgtgccagcgataacgcagtaaacttcgggcaaccgtcggatcgctaaacagatgaaacggtaacaaaaatacttctgtatcccagaaaacgtggcctttgtagccttcgccggttaagccttttgccgcaatgctgctgcgctcgtcgtgggcaggcgtcatgatgcgcagatgataaagcgcataatctaacgcttgctgatcgtgcgcttcgccgccatttaccgtgatacgacgtttctgccaccattgacgccagttttctgttgatactgcaagaagttggtcgtaactctgctgcgcgcacatttcaagctggcgaagcgacgcgctgccccactcgtctaaaacggcttgcctgtcatcccgccagtcgatccacaccagtttttgcaacgtcactgtctcgcctgcatgaagctgcgcactggtatgttgctgcaaacggcgctctttggcggtatagcattgctgcacatcaccgctcaccatacagcaacagctgatggccacatcactgcgtccatcctgggtggtgtagatcccctgcatcagatgctgaccaaacacccgcacctgggtttcgtcgagatgttggcgaccgtggttggtttgcgtggcgtcgatacctgttgaaatcagcactgacgcgtcggcgtccagtggcgtaatagtgatttccagcacaatgagcggcagttggtctgccgaaacaaagcgacggctggcgatggtgtaacctgtgccgttgctggtacgccagacaacgctacggcgtaattctccactggcaaagtcaagttcacgctgccaggcttcgcgggataacgagaaaacctcaccatttatggcaatctccatccccaagatatcaggcaggttcaccagttcgttgatttcaccttttcccgcccgatgatacagccccgccagatacatccctcgcgtctggcgcgtgtaatcttcttcatggctggcgcgaagcccaagatagccgttcccctgcgccatcagcgatgcatacttgttcagggtatgctggctgaaatggggttctgataacgttactggcctggtcataattccacacgcgtccctgtttctgcggattgatacaacgccgccaccagttgctggatgatgtacccctgctcggcgtcggctatcatcacgggcttgccctgtacgtgattgataaaggcttccatgctgcgcaaatggcggttgtcgtctgccagttcccgttgcatcagcgtcattaattcaccgttgttatcggtgtagatatgtgctggaaacagcgtcgcaccggctttatcaccacaaaagctgacgttcataatcgactgttcgcggatgttgagtgcaaatgacgtttccagccacagaatgccgccgttatgaaattcaatggtgccaaacagcgaatcttcgacgctataagttgccggatcccactcgccaaattgaccacagctcttttgcgtgccgatcttttgaaagctatgcgcattcacgcttttcaccgccggaaagcccagcacatacatcgcagcatccagcatatgaatgccgatgtcgatcagcgggccaccaccctgcagttctttattggtaaagacgccccagccaggaacgccgcagcgacgcagggcgcgggcggtggtaacgtaaatctctcccaaaacgccgttggtcacctggtcacgcagctgttgcgtatcgagcgcaaaacgatggtgaaagtcgtaggccagcaccttgcccagtttgcgcgcggtatcgcacatttcccgcgcctgttctggcgtcatggcgggcggtttttcgcacatcacatggcagcccgcttccagtgccatcagggtatgttcgtaatgaaaacggttaggtgagcagacgctaaccacatcaggtttcaccgccagcagcatggcctgcggatcgtcccacacggatgcattcccgtatttttctgccagcgcctgcgcctgggaaaggcggctgtcacagacagccaccagttccagatcgttgcgggtgcagtagtacgaagcatgaaccttatccgccacctggcctgcgcctattatcgcgacccgcagcggagagcttgtcattgcacttttcacaaagacctcttagcaggtacgcaaccaggccaacgaatcacggtacgcctgggcaggatcttccgcccggatacgcccttcgtacactacatagccctgatagttatccgcgcgcagctgttcaaacagcgcgtggaaatccagggtgccgctgcccggctggtagcgatggttatccgcaatatgcacatgaccgagcaggtcgcggttgtcatgcagcgcctgcgccaggttatcttcttcgatattcatgtgatagaaatcgccgataatctgtacatgtttaagatcgttttcgacgatgtaacggcgggcatcggcgagggtgttgatcatatgatcctgatagcggtttaacggttcgagatacaccacggttccggtacgcgcggcgacctgttccagtacgcgcagggaatcactcaccattttgcggtcgccgtccaggctacgcggcgaggtcatcggcggtaagcggaaggtaaacatgccccacgctgccggaacgacgatacctttaccccccacttctgccagcgcttcgagaatgcgttcgatctgctttaagccattaagacgacgctcttcgataaagtcgccaatccaaccgtcatagccaccgcaggcggtggtcaccggtaaaccggtttctttgattgctgctttgacttcttcgagattgttgaccagcagtttgccgtcaatctcaaaaccatcgaagcccatctctttgatataacgaaatttctccagaatgttttccggaaagaatgcctgattctgtgtgcctattttcattttttcattcctttgaattaaaacgtaacgcccattttgatgctctgttccggatgctgatcgacatactgcatgtagctttccgggctattggcaaaggtcactaccgggtcgattaaatcttcgcaattgagataaccgttcatcagcagttcccagcaggtttcttcaatacgcttacggctccagcgcggataatccgggttcggttcgctgcacgcgcgggagaaaacaattttggcgttattgaaatgcgcttcgcgtccgaggttaaaaccttcagcaaatggtttggcaaacgcgacataagagatggtgccgccataagcaaggccacgcagcgccgattgcagcgcgtcggcgtaaccgctggtttcgataatcacatcggcaccctgcttgccggtcagcgttttgatctcttttcctacgtcagtgccaatggggttaaggcagaaatcagcaccgtggcgacgggcaatatcacagcgataggcgataggatcgacgccaatcaccaccgacgcgccagcgcgtttcgccagttggatggctatttgaccaatcgcgccaagccctaccaccaccacaaaatcacccacgcgcacgttggcatcgcgcacgccgctcatggcaaactgcgccgggtcgtaacaaacggcgtttttccacgagctgccttgcggcattttgcgcagcttgtagttattcaccgcgttaatgatgaccgtctcggagagcgggccgtagccgcatacgctgtcgcccaccgcgtagtcggtaacgtcgctgccgcactcgataatgtcgccaaccaccatgttgccaagctggaatttgccaaactcaatgccgcgcggcgcatctgccggacgcggagtgaacatctgccattcgccgttaaagtcttcatcgataaacgggctggcggcgcggaagtcgaccacttccgttccgtgtttcggtgcgccgaaacgcacgcggattttcacttcattggctaaaatcgcccgatcttcatactcaaccagcgcagcaacacgcggtgctgtggctactaactttttcatttaaaactccttgtaaagaaactggccgctttagcccttcacgccaccggcggtcaaaccactcttaataaaacgttccgaaagcgcatacataatcaccaccggcaatgcggtcaccagtgaggccgccatcatccgtccccagatgtaatctggcgtactgaacagcgcgttcaggcccaccggtaaggtgaaattgctggcgctggagaggaagatcgacgcaaacagatagtcgttccacgccaccataaagcagtagacgaacacggatatcagcccggacatcgccaacggcacggtgatgcggaagataatttgcagacggttgaggccatccatcatcgccgcttcttcgatctcatcggggatggtgtcgaagtagcttttcagcataaacacggcggtgggcagagtttgcgtcaccatggtgatgatcagcgccatctcagtgtcgtaaatgcccagcgcggtgatgattttgaacagcggcaccaccagcaaaatgccagagaacatatacaccgtgtaaaagctggcattgatggtcatccgacctttaaagcgcaggcgggaaagcgcgtaagccccaagaatgccgaggaataccgccaccacggatgaaaccacagacaccaccagactgttacggaagtagtcgacaaacgggaaaatcatcgggttaaaaatgtcgacgtaatgctccagcgtccactgctgcggcagcagcgtaggatgcagtgagatcgcctctttcgcgcccttgaacgaggtcatcagcatcacaaaaaatggaaacagcgtgatgatgagaaacagcgccagcccgcagtaaaaaccgatgcgactgagtgtgcgtttatttgttgccattgaggttcacccgtttcctggtcagcagaatgacagcgaaaataatgatgaagagcaccaccgaaatcgccgccgctttccctaagtcattaaaggcaaaggcggttttgtagagatagacgccgagaatatcgaccttggtggtcagcagataaacatcagcaaacatgtagaacatccagatagtgcgcagggtcaccaccgtcgccaggaccggcataattgcgggcagcgtgacgatgcgaaaccgctgccaggcattagcgccatccatctctgcagcttcgtacagcgatttgtcgatggtctgcaaaatcgccagaaacgagataaaggcatacgggaagtagcgccagatggcgaacagcaccaccagcacaaagctactgcccggattatcgaaccacagcggtgcctgctcatagagatgcagaagatcgacgccgaggtagttcacaatgccgtagccgttgttgaacatgtatttccaggcaaacaccagcgaaatggacggcgttacgtaggagaggatcaccagcgaacgcgcggttttgcgcagatggaactcgcggttgaaaaacatcgccactgccagcccgagcacggtgctgcccgccaccaccagcgcggtataccagaccgtcatccacagcgagtgccagaagccgggatcggagaggatacgcacatagttactcaccccaacaaaggttgactcgatgttgggattgagcggcagacgtaaaaaactgatttcgatattcgacaccatcggccacgccaccagaccgcccagcagtaataagctgggcgcgagaagcaacagcgcaaagggcatatcggaacgacctgaaaaaagcctgttcattgcggattcctgtccggggtttagtgctgttcgatcagttcatccagctttttctggctcgcttgcagcgtgccagggagatcggctttacccacggtgacgttatgcaccatggagctcaccactccagaccccgtcacatcacccatgcgggtaaagtttttatcccctactgcaccaaagacctgaatatttggcagttcaccgattagctgattcggtagttcacccagcgccttaataacgtcgttgtctttccaggtggcggtagtgacaaccgctttattcaccggcagcgcagcacctggcgacatcatcacccagtcggcaatgttgtctgcctgctccataaaggtgacaaatttttctgctgcttccgtctcttcggtcttttgcccggcggtaatggtcagcgaggtcaacatgccgtagaccgcagagtttttctcggttggcaccacgaaaccgacgtttttcgggtcgccttctttaatcacagccggaaggatataggtggagtaaatcgccatcggcgcggtgccgttcataaaggcgtctttcacttccatgatgtcgttagaacccggcatagtgttggcagcaaggtcgcggtaataggtcagtgcctgcatcatctctggtgtatcaagggtgattttgccttcggcgttaaagacgttagcctggttggataacgcaaactgggagaaggattgttccgtcaacacgctttctgctgtaggcagcgcaatgccgtattttttattcgccgggtcattcagtttctgtgcaacgtccagcagctgttgccagtttttcggctcctcaagccccgcttttgccagcacatctttgcgataccagataccgccaatccaggcgctgacaggaacaccggtccatgcgctaccatcttcggtacgcacaatacgcagtacgccatcgtaaaacgcgccttcaccaacgttgctgatgactgtggcaaccgctttgcgatcgataagctgctctttgtccatcactttggcgtagtcatggctggtttcgatcacttccggcagcgaaccgctacgtgaaagagtaatgactttagtgttataggcatcttcttccacgggcacttgcttaacggtgatgccagggttttctttttcaaaacgggcaatcaatttactgataacggcctggcgctcctgctccaccgaagaatgcataaattcgatggatacattcgttttattttcttctttacagcctgaaatcagggcgcaggaaaccagtgctgataacagcacgatttttgatttaatcatgagatgttcctttttatttaatccacataacctgccaggggcgcagcgttatttcattacccaatatatcaacttcactaatcagatcccgaccatgcagattagtaatatttacatgctgaatatttttactgacattaaacaatccagtcagacaattaccatcagcgttacttctttgaatacgcattacggatgaattaatcgtatcaatggtaaaattattatccggatgaaactcgttatggctgcgacgaagtgtaattaaacgcgacaactcatgatataccgcatgccttaatgtagcttcatcgttcagttctcgggttatctctttactgtgatattttttacggttaatcgcacggttatatccgagtttttcgacacctgcgtaatcattacgcgagccaagaatactttgaatatatatcgctggcacaccggggaaacttaacaaaatcgcatgggcgagaataaacctggcgcaacgttcttcatcgctactctcacggcggcttaacgcatccatataggtcacatttatttcatacggactgcgtgtaccgtcgggattatttttccagtttactaatgcaccttcctgctgtaacgcctcgatcagctctaatatttcgctttcaggcaacaagccccgtagcgggtttagcccgatgccatcgtgagaggcgaggaagttaaaccaggtggtgttgctggaaggtagtgtcaggttttgcgcccacgcacaaagcgcctcaacgttctgtttttgcaccgcatgcagcaccagtggcggcagcgagaactggtacaccatatgtgcttcgtcatcgcctgcgccaaagtaagcaatgttgtctttatgcggaacattggtctcggtaatgatcactgtacctggcgcaacgttatcaataatcgaccgtaacagtttgataatcagatgtgttttttccagatggatgcagcttgttcccggctctttccacataaagccaacggcatccaggcggacatactcagcactgatgaatcccctaatgattttggtaaaaatcattaagttaaggtggatacacatcttgtcatatgatcaaatggtttcgcgaaaaatcaataatcagacaacaagatgtgcgaactcgatat

SEQ ID NO: 79 - DNA, 26444 bp, Escherichia coli
  source 1..26444: mol_type = genomic DNA
gccatgatcaaactcttcaatttaaaagtttgatgctcaaagaattaaacttcgtaatgaattacgtgttcactcttgagacttggtattcatttttcgtcttgcgacgttaagaatccgtatcttcgagtgcccacacagattgtctgataaattgttaaagagcagttgcgacgcagctttcagctcactgtcgcgaggtggcgtatattacgctttcctctttcagagtcaaccctgaatttcaggattttttctcttcgttgttacgaccatcttgtgaagtgtttcacgttgtcgtctcaacggaggcgcattatagggatcccaattttttgcacaagtacttttttgatctttttttctgtttgttgttttttcaccctttttgctgcattcgcacacaaaacggtgcttttttgcatactaaaagacttgcacaaggccaataatgcccccaaagtcattagtaaatcatttattgctgaggtaagtatgtctgatgttttacgcccataccgcgatctttttccacaaatcggtcagcgcgtaatgatcgacgatagcagtgtcgtgattggtgacgttcgtctggctgatgatgtggggatctggccgctcgttgtgattcgtggagatgtacattatgtacagatcggagcacgcaccaatatccaggatggcagtatgttgcatgtcactcataaatcctcgtacaacccagatggcaacccattaaccattggcgaagatgtcactgttggtcacaaggtgatgctccacggctgcaccattggcaatcgagttttggttgggatgggctcaattttacttgatggcgcaatagtagaagatgatgtgatgattggtgcgggtagtctggtcccacaaaataaacggctggagagcggatatctgtatctcggtagccccgtcaaacagatccgcccgttaagtgatgaagagaaggctgggttacgctattccgcgaataattacgtgaaatggaaggacgaatatctggatcagggtaaccagacccagccttgatcatcttcactttgttcctgaattaagttttccgcttcttcttccagatcccagcgatgctgacgaaaactcgctaaccactgttctggcgtatctccagtaaaacgatacgccagactctcgccagagatcgcacatgtcagttgcatgccattcacgagagcgggaaaacatacacattttttattctcgtcccactcttctctgtccggaaactggatggcctgattcacgcggacaattcctcctgcaattgctttataactggttctacgtcaggcagaacaccgtgccagagaagaaaggcatgagccgcctgtgccaccagcattcctaaaccatcagcattacgctttgagcctcgctgctcacaccatgccagaaaaggagtttttcctttctgatagaacatgtcatagcaataaatgcctggatgaatgagcgatgacgggatcgccggaatatcaccactgatgccactggatgttgcattaataatgagatcaaactcatgaccttccagttcgtccatacccaacgcctgaatactgccagtgtgcgcaaacaatttagccaactcttccgcgcgggataccgtccgattagtgattgtcaccgcacagtccagggaaagaagtggcagtagtacgccgcgagatgctccaccagcgccgatgagcagaatacgtaaaccaggacggataaaagacagacgttccagatcgcttaacaaacctataccatcggtattgtcacccagcaggcgtccatcttctaaccgcttgagggtattaacagcaccagccaacgctgcccgttcagtaagctcatccgctctggcaaaagcctcttctttaaaaggcaccgtcacattcgcacctttaccaccagcacgaaagaaagcgttcagtgtgttgatgaaatcattgatgggtgccaacacgcgcccatagggatgttcaatattcagttgctgagcaaattgctgatgaatgaatggcgatttgctgtgggctatcggattaccaaaaacagcataggtttccattatgttacccctgtcgaaacagttcacccgtcagggcatcgcggatttctgaaggatttaaacgcccccccgtttcaccaggcacaaccgggaacgccgcgccaaattgtgcgcgaacttcgtctactgttcgacaaggtggcaatccactcaagttggcactggtagaaaccagcggtttaccataagcctggcacaaagcaaccaccaacggatggtcggtgactcgtacagcaagcgaatcaaagcggcccgtcaaccagcgcggtgttgtcgcaggcgcgggaaagacaaaggtgacaggacctggccagcgggaaaaaatggtttcacgctgcgcatcagtcagcatggtgtcatcaatatagggtttaagctgctcgtaatttgccgcgattaaaatcagccccttatcaaccggacgctgttttaactccaacagtcgcatcactgctgtttcgctatcaggatcgcacccgacaccgaaaacggcttccgttggataggcgatgacacgttcttcattgaggacatctatcgcagctgcgatagcgtctccttgcaggttattattcacgttattattccgccgaaaccggctttccacattgtttactggcacaaaagtgttttacaccctgcgcggttttcttttcgatgagtagtggataatgacactcagggcattctccagctatgggtttgaagttaatggcaaattgacactccgggtagcgatcacaggagtgaaatgttttgccataacgggagcggcgctggaccagatggcccgtccggcattgggggcatgtaattgctgtttcgtccggtttatcgataagttcggtatgttcgcattcagggtagttactgcaaccaataaacataccaaagcgtccctggcgtaataccagatttgcgccacatgcagggcaaacctgcccctccagaactttgacaatatgtccatccgctgaagatttcagaggacggacgtagtcacacgccggatactgtgagcatccaagaaacggaccgtgtttcccggatcgaataaccagttcagccccgcactttgggcaggactcattattacgcaccgtgaacagtgctgatttcgtcataacaacttatgctgaattaaagaaatgattaatgcagcataccttcattcacttcaaagagtaattcttccatttgctggtacgcattttcgcagcccggaatattgaacaacaccatcaggattacccatttcaggtcttccaggtcgaactctgcggtatccagcgcgagcactcgctctatcaccatttcacgggtttcaaggttaagcacctgaatttgctcaaggaaaagcagaaaaccacgacagctggcatccagtctttcacactcctcaggggtataaatacgcatggagagtggatcagaggccagttgcatcggttctgccagtccttcctgataatccgcaagcttttccagccaaagcagggcattgtagatatcttctcgatcaaatcctgcgtcggtaagatcctgttcaagtttgtcttgatccacacgcaactcagcttctgtgtgaatataggtttcaaacaaatacattagtacgtcgaacatggcatgccctcctcaatcggacatagccgccgggtacagctgcgatccatcctgctaactccagttcgagtagttgagtaactacctctggcacaggttggccggcacgttcagcgacgacgtcaacaggtgttacctcatctcctacgttagccaggagctcaggaaatggcaatgccacgtcttgctgatctggtgaataaaatgaattttcaggggcgtctggcaaccagtgcaatccaaattgcaagttttccagaatttcttccggttccgtcacaagaatcgcaccttgttttattaaccagtgaggcccttcgcttcccggattccctattggacctggcaaggcaaaaacttcacgcccctgctcaagcgcacaacgtgctgtcaccagcgaaccactgcgcaaagccgcttccaccaccagtacacctttacttagaccactgataatgcgatttcttcgtgggaaattgtaagcaaggggtggaacatcgaggggaaattccgagacgagagctccgccatgttcaagcagactggcagccagtcgggcatggcggcggggatgaatggtattaagtccattccccaatacagcaatgctgacgccatttacctgtaaggcagctttatgcgccacaccatcgattccacgcgccagtccactcgtaattgtcactccacgcgtcgccagagtttcgcaaaataaccgtccccatcgctcgccataccatgaatgcgcccgactccccactacggcaagctgaaatgaatgcagcgcgtgcagttctccttcaacaaacagtgcaccggggtaatctgtcgtcatcagaagttgaggaggataaaattcgctgtccgcagggattaaatgatggttgggttgctccaaccaacaaagtgagctttcgatactctttcgcggaaatgaaagaaagcgttgtgcctgccgcaatgtaagccctgtttgctgcaatccaaccgcatcaatttgcgactgttttgccagccagtgagctatacggaccatatcatcgccgtacaagctgctgatactcattaaacgcagccaaatttctgtatcgaccatccttatctccctgccataagcagccttagcaatctttgcgattggtcagtgatgctgtcaatcagagggggatttgtctagaatagaagaaataatctttctaactcctgaacacatctctggagatttatgtcagttttgcaagtgttacatattccggacgagcggcttcgcaaagttgctaaaccggtagaagaagtgaatgcagaaattcagcgtatcgtcgatgatatgttcgagacgatgtacgcagaagaaggtattggcctggcggcaacccaggttgatatccatcaacgtatcattgttattgatgtttcggaaaaccgtgacgaacggctggtgttaatcaatccggagcttttagaaaaaagcggcgaaacaggcattgaagaaggttgcctgtcgatccctgaacaacgtgctttagtgccacgcgcagagaaagttaaaattcgcgccctggaccgcgacggtaaaccatttgaactggaagcagacggtctgttagccatctgtattcagcatgagatggatcacctggtcggcaaactgtttatggattatctgtcaccgttgaaacaacaacgtattcgtcagaaagttgaaaaactggatcgtctgaaagcccgggcttaaggataagaactaacgtgtcagaatcactacgtattatttttgcgggtacacctgactttgcagcgcgtcatctcgacgcgctgttgtcttctggtcataacgtcgttggcgtgttcacccagccagaccgaccggcaggacgcggtaaaaaactgatgcccagcccgattaaagttctggctgaggaaaaaggtctgcccgtttttcaacctgtttccctgcgtccacaagaaaaccagcaactggtcgccgatctgcaggctgatgttatggtcgtcgtcgcctatggtttaattctgcctaaagctgtgctggagatgccgcgtcttggctgtatcaacgttcatggttcactgctgccacgctggcgcggtgctgcaccaatccaacgctcactatgggcgggtgatgcagaaactggtgtgaccattatgcaaatggatgttggtttagacaccggtgacatgctctataagctctcctgcccgattactgcagaagataccagtggtacgctgtacgacaagctggcagagcttggcccacaagggcttatcaccacgttgaaacaactggcagacggcacggcgaaaccagaagttcaggacgaaactcttgtcacttacgccgagaagttgagtaaagaagaagcgcgtattgactggtcgctttcggcagcgcagcttgaacgctgcattcgcgctttcaacccatggccaatgagctggctggaaattgaaggacaaccggttaaagtctggaaagcgtcggtcattgatacggcaaccaacgctgcaccaggaacgatccttgaagccaataaacaaggcattcaggttgcgactggtgatggcatcctgaacctgctctcgttacaacctgcgggtaagaaagcgatgagcgcgcaagacctcctgaactctcgtcgggaatggtttgttccgggcaaccgtctggtctgatagtccactcttctaagcccggtcttgccgggcatttttatacttatgaaaaaacaacgtaatttacgtagcatggcggcccaggccgttgaacaagtcgtcgagcaagggcaatcattaagcaacattctgccaccgctccagcaaaaagtttccgataaagacaaagcacttcttcaagagttgtgctttggcgtactgcgtacgctttcgcagttagactggctgattaataagttaatggcccgtccgatgaccggcaaacagcggaccgtgcattacctgattatggttggtttgtatcaactgctttatacccgcattccacctcatgctgcgctggctgaaacggttgaaggcgctatcgcaattaagcgtccgcaacttaaagggttgataaacggtgtattacgccagttccagcgtcagcaagaagagttattagccgagtttaatgccagtgatgcacgttatctgcatccttcctggttgctgaagcgtctgcaaaaagcgtatccagagcagtggcaatccatcgtcgaagccaataaccagcgtccgccaatgtggctgcgcgttaatcgtacgcatcattcccgcgacagctggcttgcattgttggatgaagcaggaatgaaaggtttcccgcatgcggattaccctgatgctgtacggctggaaacacctgcacctgttcatgcgctacctggttttgaagacggatgggttaccgttcaggatgcatcagcacaaggttgcatgacctggcttgcgccacaaaacggtgaacacattctggatctttgtgccgcccccggcggtaaaacaacgcatatccttgaggtggcaccagaagcgcaggttgttgcggttgatattgacgaacagcgcctctctcgcgtttacgacaatttaaaacgccttggtatgaaagcgaccgtgaaacaaggtgatggccgctacccttcccaatggtgtggcgagcaacagtttgatcgcattttattagatgcgccttgttcagcaaccggtgtgattcgtcgccatccggatattaaatggttacgtcgcgatcgcgatatcccggaactcgcgcaattgcagtctgaaattctcgacgccatttggccgcatttaaaatccggtggaaccctggtctatgccacctgttcggtgttaccggaagagaatagcctgcagattaaagcctttttgcaacgtaccgctgatgccgaactttgcgaaacaggaacaccagagcaaccgggtaaacaaaatctgcctggtgccgaagagggcgacggcttcttttacgctaagctaatcaaaaagtgatgagataacgggtcgcgactgatgaaaattatcattctgggtgccggccaggttggcggcacactggcggaaaacctggttggcgagaacaacgatatcactgttgtcgataccaacggtgagcgtctgcggaccttgcaggataaatttgacctgcgagtcgtgcaggggcatggctctcatccacgcgtattgcgggaggcaggtgccgacgacgccgatatgctggttgctgtaaccagttcagatgaaaccaatatggttgcctgccaggtagcctactcacttttcaacacccctaatcgcatcgctcgcatccgctcaccagactacgtgcgcgatgccgataagctatttcattcagatgctgtaccgattgatcatctgatcgcaccagagcagttggttatcgataatatttaccgactgattgagtatcccggcgcattgcaggtggtgaacttcgctgagggtaaagtcagcctcgctgtggttaaagcctattatggcggcccgctgattggtaacgcactttcgaccatgcgcgaacatatgccacatatcgatactcgtgtggcagcaattttccgccacgatcgccccattcgtccacaaggttcgaccattgtggaagctggtgatgaagtgttctttattgccgcttcacagcatatccgtgcggtgatgagtgaattacagcgactggaaaaaccgtataagcggatcatgctggttggtggcggtaatatcggtgcagggctggcgcgtcgtctggaaaaagattacagcgttaaactcatcgaacgtaatcagcagcgcgctgccgaactggcggaaaagttgcagaatacgatcgtcttttttggtgatgcgtcggatcaagaactgctggccgaagaacatatcgatcaagttgatctgtttattgccgtcaccaacgatgacgaggccaatatcatgtccgccatgcttgccaaacgtatgggtgcgaaaaaggtgatggtattgatccagcgtcgcgcttatgtggatctggttcaggggagcgtgatcgatattgcgatttcaccacaacaagcaactatttctgcgttgcttagccatgtgcgaaaagcagatattgttggtgtttcctcattgcgccgcggcgtagcagaagctattgaagccgttgctcacggtgatgaaagcacctcacgcgttgtcggcagagtcattgacgaaatcaagctaccgccaggaacgattattggagcggtggtacgtggaaacgacgtgatgattgccaatgacaatctgcgcattgagcaaggcgatcacgtaattatgttcctcacagataaaaagtttattaccgacgtcgaaagactcttccagccaagccctttcttcttgtaattaataaggcgtctaatgacgccttattatttccctttgattatcaaggattaattaaattcattcctggcaggaaaatggcttaacatttgttagacttatggttgtcggcttcatagggagaataacatgagcattattaaagaatttcgcgaatttgcgatgcgcgggaacgtggtggatttggcggtgggtgtcattatcggtgcggcattcgggaagattgtatcttcactggttgccgatatcatcatgccacctctgggcttattaattggcgggatcgactttaaacagtttgctgtcacgctacgcgatgcgcagggggatatccctgctgttgtgatgcattacggtgtcttcattcaaaacgtctttgattttctgattgtggcctttgccatctttatggcgattaagctaatcaacaaactgaatcggaaaaaagaagaaccagctgccgcacctgcaccaactaaagaagaagtattactggcagaaattcgtgatttgctgaaagagcagaataaccgctcttaacaagcgcctgaaagcagaagaccagtggtaaaaaagtgatttactttcttgccactggcctcccagttcccccgattgccatgttttccttttcgcatgtaactgcctttccccttcttatttttctctacgcgctgtcggaataagggatcatgtagtaatgcttctatcgcattatcctttatctgccctttagtatgctgatatcggctcataaaaactccaattggttattttacggcgcgagtgtaatcctgccagtgcaaaaaatcaacagccactcttaacgccactcgccccttgttcaagagcttcaagaatcgaacaataaacactgctatgggcggtcccacaacaggcatcgttaaggcgttgcaaggaacgctgcatactctgcaactcggctatccgtgcttcgacttcctgcaatctttcctgcacaatgccttttgactcctgacaggtatggtgttcaggatcgatgcggatcgacagcaactcgcggatcgactccagactgaaacctagttgtctggcatggcggataaatttcaatcgctggagatcgctttcggtatacaggcgaaacccgccttcagtacgcacttcatgctccatcatctgctgtttttcgtaataacgaatcgtgtcaggtgttacttccgccatttttgccagctcaccaatgcgatacatacatactccactagttatcgttgattttgtccaacaacttgtcagcataatcgccgcgtaaaaaatcggtactcaatccagcttgtcgcagcttcaattccagtaatgacaatcgacggctaacctcttgatattgcggatcatcgtgacggatacctctcaggatatccagaagctgaattgcttctctccgttgctcaagttctggcggtaagcaaccggcattcttcagcaagcgataccccgcacgtaattccggtggcacgtgagaatcatcatccagtatcaatggttcgccgctacctgccaggttatcaaactcacctttcgcttgcgcttctgctatatgacgctctgcccactggtcaagtaaccacataaatactccaggggatgaacaaaaagagtacagctattgtagataagtggggatgctacgggtataaaaaaacccgccggggcgggtttttttacgttgcttcagattactctgcagcagcttctgctttctctgaacgatcaaccagctcgatgtaagccatcggcgcgttgtcgcctgcacggaagccacacttcagaatacgagtgtaaccaccggcacggctcgcgaaacgcgggcccagttcgttaaacagttttgccacgatctcgttatcacgagtacgggcgaatgccagacgacgattagcaacgctatcagtcttggcaagagtaatcagcggctcaactacgcggcgcagctctttcgctttaggcagagtcgtcttgatgatttcatgacgaaccagtgaacctgccatattgcggaacatagcctggcgatggctgctgttgcggttcagttgacgaccactcttacgatggcgcatgaccttatccttctcagtaaaaccttaacctgtgatccggttactcgtcagcgatgcttgccggtggccagttttccaggcgcatgcccagagacagtccacgggaagccagcacgtctttaatctcagtaagagattttttaccaaggttaggcgttttaaggagctcaacctcggtacgttgtaccagatcaccgatatagtggatagcttctgctttaaggcagttagcagagcggacagtcaattccagatcgtcaacagggcgcagcaggatcggatcgaactctggtttctcttctttcacttcaggctgacgtacatcacgtaagtcaacgaaagcttccagttgttcagccagaatggttgccgcacgacgaatcgcctcttcaggatcgattgtgccgttggtttccatttcgatgaccagcttgtccaggtcggtacgctgttctacacgcgctgcttcaacattgtaggcaatacgctccacagggctgtagcatgcgtcgaccagcagacggccgattgggcgctcatcttcttccgaatgaattcgggtagaagccggcacataaccacgaccgcgctgaactttgatacgcatgctaatagacgcgttctcatcggtcaggtggcagatcacgtgctgcggcttgacgatttcgacatcaccgtcgtgggtgatatcggctgcagtcacagggccaatgccagatttattcaaggtaagaataacttcatctttgccctgaactctcaccgccagccctttcaggttgagcaggatttccaggatatcttcctgaacgccttctttggtgctgtactcatgtagtacaccatcaatctcaacctcggtcaccgcgcaacccggcatcgatgagagcagaatacggcgcagtgcgttacccagagtatggccaaagccacgctctaaaggctcaagggtcaccttggcgtgcgtcgaactcacttgctcgatatcaaccaggcgcggttttagaaactctgtcacagaaccctgcattgtgtcctctctttggtactaagctttacttggagtaaagctcgacgatcaggtgttcgttaatgtccgcagacagatcagaacgctccggcttacgcttaaacgtaccttccatcttgccagcatcaacttccagccaggttggcttttcacgctgctcagccagctccagagcggctttcacgcgagactgcttcttcgctttctcacgaatgcttacaacgtcattcggactaacctgataagaagcgatgttaacaacacgaccgtttaccataattgctttatggctaaccagctgacgtgcttctgcacgagtggcaccgaagcccatacggtatacaacgttgtccagacgaccttccagcagagccaacaggttttcaccggtgttgcctttcagacgtgctgcttctttgtagtagttacggaactgacgctccagcacaccatagatacggcgaactttttgcttttcacgcaactgcacaccatagtcagacagacgcggtttacgcgcaccgtgctggccaggagcttgttcaattttacacttggtatcgatcgcgcgaacgccagacttaaggaataagtcggtgccctcacgacggctcagcttgagcttaggacccaaatatcttgccattttctttctccaacaaacctggaaaacgaggcgttatacgcgacgttttttcggcggacgacaaccgttatgagggatcggagtcacatcagtaatattagtgatgcggaaacctgcggcgttcagagcacgaatagtagattcgcggcctggacccggacctttaaccataacttccagattcttgatgccgtattctttcacggcgtcagcgcaacgctctgctgcaacctgagctgcaaacggagtggatttgcgagaaccacggaaaccggaaccaccggctgttgcccaacccaacgcgttaccctgacgatcagtgatagtcacgatggtgttgttgaaagaagcatggatatgagccacgccgtcagagacttgttttcttacacgtttacgtgcacgaattggtgcctttgccattattcaatcaccccgattatttcttgatcggtttgcgcggacccttacgggtacgtgcgttggtcttggtacgctgaccgcgaaccgggagaccacgacgatgacgcaaaccgcgatagcaaccaagatccatcaggcgcttgatgctcatgctgatttcacggcgcagatcaccttcaacgacaaatttggcaacttcgtcacgcagcgtgtcgatttgtccttcagacagctcactgatcttaacatcttcagcgatacccgctgcagccaggatggctttagaacgggtcttgccgacgccataaatcgaagttaatgcgattacggcatgcttatgatcaggaatgttaatgcctgctatacgggccactatgcactcctactatttaatatgtacgttccatgctgaaaagcccgttttcaggatactcaaatggaaacgcacagacatacaaaagattggctggctaatctagccagctcaacccaactttgcaagaaaaatatgcgaaaaaatcagccttggcgctgtttatgcttcggctcggcactgcaaatcacacggatgacaccatcacgcttaacgattttgcagttacggcataatttcttgacggaagcacgaactttcatttttactctccgtaacttctcgggcgaccaattatcggccgtagcctttcaggttcgccttcttcaatgcagactcatactgactggacatcatcagagtttgcacttgagccataaagtccataatcacgacaacaacgataagcagtgaggtcccaccgaagtagaacggtactttcattgcatcacgcatgaactccgggatcaggcagataaaggtaatatacagcgcaccaaccagggtcaggcgggtcattactttatcgatatacttcgccgtttgctctcccggacgaattcctggtacaaatgcaccggacttcttcaggttatctgctgtttcacgcgggttgaaaaccaacgccgtgtagaagaaacagaagaagatgattgcagacgcatagagtaacacataaagcggttgcccaggctgcaaatacagcgaaattgttgtcagccagttccaaccagtaccgcccccgaaccatgacgcgatggtcgccgggaacagaataatactggaagcgaagattgccgggattacccccgccatattcactttcagcggtaaatgtgtgctctgtgcagcatagacacgacgaccttgctgacgtttcgcgtagtttaccacaatgcggcgttgaccacgctcaacaaatacaacaaagaacgtcactgcaaatactaatactgcaaccaacagcaacacgaggaagtgcaggtcgccttgacgcgcttgctcgatagtatgggcaatggctggcgggagtcccgcgacaataccggcgaagataatgattgaaataccgttgccgatacctcgttcagtaatctgttcgcccaaccacatcaggaacatcgttcctgtgaccagacttacaacagcggtgaagtagaatgcaaagcctgggttaatcaccaggccttgcataccaggcatattcggcagaccggtagcaataccgatcgactggaatattgccagcaccagagtaccgtaacgggtgtactggctgatcttacgacgaccagactccccttctttcttaatttctgccaacgttgggtgaaccaccgtcagcagctggataatgatcgacgccgaaatatacggcatgatccccagagcaaagatagaagcacggctgagagcacccccagagaacatgttaaacatctcaatgatggtgcctcgctgttgctcaagcagtttggcaagtacagcggcatcaataccagggatcggaataaaagagccaatacggaacacaatcagcgcaccgataacaaacagcagtctgcgtttcagctcgcctaagccacctttggcactttgaaaatctaatcccggttgtttagccatctgctacttattcctcgattttaccgccagcagcttcgatagcagcacgagcgcctttagtaacacgcaggccacgaacagttaccggagtcgttacttcgccagccaggatcactttcgcgaactcgatctggataccgataatgttagccgctttcagcgtgttcaggtctacaacaccgccttctactttagccaggtcagacagacgaacttcggctgtaatcgctgctttacgagaagtgaagccgaatttcggcagacgacggtacagaggcatctgaccaccctcgaaaccgcgacgtacgccaccgccagaacgagatttctgacctttgtgaccacgaccaccggttttaccgaggccagaaccgataccacgacccaggcgtttacccgcctttttggagccttcggccggagacagagtatttaaacgcatctcttactcctcaactttaaccatgaaggaaaccgcgttgatcataccgcgaatagcaggagtatcctcgcgctctacggtgtgaccaatacgacgcagacccaggccaagcagcgttgccttgtgtttaggcagacgaccgattgcactgcgggtttgagtaattttaatagtctttgccatggtttatttccccagaatttcttcaacggatttaccacgcttggcagcgaccatttctggagaattcatattttccaggccatcaatagttgcacgaaccacgttgatcgggttggtggaaccatatgctttagccagaacgttatgaaccccagcgacttccagaacggcgcgcattgcaccaccggcgatgataccggtaccttcggaagccggctgcatgaatacgcgagaacccgtgtgaacacctttaacagggtgttgcagagtgccgttattcagcgcgacgttaatcatattgcgacgggctttttccatcgctttctggatcgctgctggaacttcacgcgctttaccgtaaccaaaaccaacgcgaccgttaccatcgccaactacagtcagagctgtgaaggagaaaatacgaccacctttaacggttttagatacgcggtttaccgcgatcagcttttcctgcagttcgccagcttgtttttcgatgtgagccatcttacacctctaccttagaactgaaggccagcttcacgggcagcatctgccagtgcctggacacgaccatgatattggaacccggaacggtcaaaggatacatctttgatgcctttttccagagcgcgttcagcgacagctttacccacagctgcagccgcgtctttgttaccggtgtacttcagttgttcagcgatagctttttctacagtagaagcagctaccagaacttcagaaccgttcggtgcaattacctgtgcgtaaatgtgacgcggggtacgatgtaccaccaggcgagttgcgcccagctcctggagcttgcggcgtgcgcgggtcgcacgacggatacgagcagatttcttatccatagtgttaccttacttcttcttagcctctttggtacgcacgacttcgtcggcgtaacgaacacccttgcctttataaggctcaggacgacggtaggcgcgcagatccgctgcaacctggccgatcacctgcttatcagcgcctttcagcacgatttcagtctgagtcggacattcagcagtgatacccgcaggcagctgatggtcaacaggatgagagaaacccagagacaggttaatcacattgcctttaaccgctgcacggtaacctacaccaaccagctgcagcttcttagtgaagccttcggtaacaccgataaccattgagttcagcagggcacgcgcggtaccagcctgtgcccaaccgtctgcgtaaccatcacgcggaccgaaggtcagggtattatctgcatgtttaacttcaacagcatcgttgagagtacgagtcagctcgccgtttttacctttgatcgtaataacctgaccgttgatttttacgtcaacgccggcaggaacaacgaccggtgctttagcaacacgagacattttttcctccgattaggctacgtagcagataatttcgccaccaagaccagcctggcgcgctgcacgatcagtcataacacctttagaggtagaaacaactgcgatacccagacccgccataactttcggcagctcatctttacgtttatagatgcgcagacctgggcggctgacacgctgaatgctttctacaacagctttgccctggaaatacttcagagtaagttccagttcaggcttggtgtcgccttcaactttaaaatcttcaataaaaccttcttccttcagcacgttggcgattgccactttcagcttggaggaaggcatggtgaccgcagctttgttcgcggcctgaccgttacggatacgggtcagcatatccgcgatcggatcttgcatgctcatctgtctttactcccgtgattcaattggtgacaattaccagctagcctttttcagacccgggatttcaccgcgcatagcggcttcacggaccttaatacggctcaacccgaacttccgcaggaaaccatgcggacgacctgtttgacggcagcggttacgctgacgagacgggctggaatcacgcggcagagtctgcagcttgagaacagcgttccaacgatcttcgtcggaagcgttcacatcagagatgatcgctttcagttcagcgcgtttcgcgaagtatttatcagctaaagctacgcgttttacttcgcgtgctttcattgattgcttagccatttagtaaccctaccttacttgcggaacgggaagtcaaaggcagccagcagagcgcggccttcttcgtcagatttcgcagtagtggtaatggtaatatccaaaccacgaacgcggtcgactttatcgtagtcgatttctgggaagatgatctgctcacggacacccatgctgtagttaccacgaccgtcgaaagacttagcggacaggccacggaagtcacggatacgaggtacagcaatagtgatcaggcgctcaaagaactcccacatgcgttcgccacgcagagttactttacagccgatcggatagccctgacggattttgaagcctgcaacagatttgcgtgctttggtgatcagcggtttttgaccggagattgctgccaggtctgctgctgcgttatccagcagttttttgtcagcgatcgcttcaccaacacccatgttcagggtgatcttctcgacccgagggacttgcatgacagaattgtagttaaactcagtcatgagttttttaactacttcgtctttgtagtaatcatgcagtttcgccatcgtactactccaaattacttgatagtttcgctgttagacttgaagaaacggacttttttgccgtcttcgaatctaaagcctacacggtcagccttgccggttgccgcattgaagattgctacgttggaaacctgaatagcggcttctttttcaacgatgccacccggttggttcagggccggaaccggcttctgatgtttcttaaccaggttgataccttcaacaatgaccttgccggaagacaggacattcttaactttaccgcgtttacctttatctttaccggttaacacgataacttcgtcatcacgacggattttcgctgccatgattcgctccttagagtacttctggtgccagagagataattttcatgaacttctcactacgaagctcacgagttaccggcccaaaaatacgcgtaccgataggctgctcgctgttgttgttcagaagaacacaagcattaccatcgaagcgaatgacagaaccgtccgggcgacgaacacccttcttggtgcgcaccactaccgccttcagcacatcaccttttttgaccttaccacgcggaattgcttctttgatggtgatcttgatgatgtcgcctacgcctgcgtagcgacggtgcgagccacccagaaccttgatacacattacgcgacgtgcaccggagttgtcggcgacgttcagcatagtctgttcttggatcattttagtgctccgctaatgtcaactactactgagacccgaaaatcaggtcgttaaaaatccccatatcgagggcgcggcattataacaccgcttcaaggatatgggtagaaaaaataaacggctcatttctgagccgtttattcgtatcgagagagtgtactgtattacagaaccgctttctctacaacgcgaaccagcgtccaggatttagtcttggacagcggacggcattcgcggatttcaaccacgtcaccgataccgcattcgttgttctcgtcatgtacgtgcagtttggtcgtacgcttgatgaatttaccgtagatcgggtgtttcacaaaacgttcgatagcaacaacaatggatttctccattttgtcgctaacaacgcgaccttgcagagtacggattttatcggtcattacgcacccgccttctcgttcagtaaagtcttaacgcgtgcgacatcgcgacgcacttgcttcaacaggtgagactgttgcagctggccacttgcagcctgcatacgcaggttgaactgctcacgcagcaggttcagcagctcggtgttcagctcttcaacgctcttctcacgcagctcttttgctttcattacatcaccgtcttagttacaaaggtggttttaatcggcagtttcgctgctgccagcttgaatgcttcacgggccagctcttccggaacaccgtccatttcatacaggactttacccggctgaatcaaggcaacccaatactccacgttacctttacctttacccatacgcactgccagcggcttttcagtgatcggtttgtccgggaacacacggatccagatcttaccttgacgcttaactgcacgggtcatagcacgacgtgctgcttcgatctgacgggcagtcagacgaccacggccaacagctttcagaccgaagctgccgaagctaacatccgtaccctgcgccagaccgcggttacggcctttgtgcattttacggaattttgtacgctttggttgtaacatcagcgacgctccttatttacggcctttacgctgctgctttttaggctgagcagccggtttttccggttgttcaacagcagccataccacccaggatctcgcctttgaagatccacactttaacgccgattacaccgtaagtggtgtgcgcttcagaggtgttgtagtcgatgtcagcacgcagagtgtgcagcggtacgcgaccttcgcggtaccattcggtacgtgcgatttccgcgccgcccagacggccgctaacttcaactttaatacctttagcgcccagacgcattgcgttctgtacagcacgcttcatagcacgacggaacataacgcgacgttccagctgagaagtgatgctgtcagcaaccagttttgcgtccagttcaggcttacgaacttcggcgatgttgatctgtgcaggaacgccagcgatgtccgctacgaccttacgcagtttttctacgtcttcaccttttttaccgataacgatacccgggcgagcagtgtgaatggttacacggatgctcttagccggacgctcgataacgatacgagatacggacgctttagccagttccttagtcaggtactgacgtactttaaaatcgctgtccaggttgtcagcgaattctttggtgttcgcaaaccaggtagagttccatggttttacaatacccaggcgaataccattaggatgtactttctgacccattgctagtctccagagtctcagcgatcggacacaaccacagtgatgtggctggtgcgcttcaggatgcgatctgcacgaccttttgcacgcggcataatgcgcttcatgctcgggccttcgtctacgaaaattttcgtaactttcagatcgtcaatgtcagcgccatcgttgtgttcagcgttagcaatggcagattccagaactttcttgaccagtacagccgctttcttgttggtgtaggtcaaaatatccagagcctgcgacactttcttaccgcgaatcaggtcagcaacaaggcgaaccttctgagcagaagaacgagcatggcgatgtttagcgatagtttccatctcttcctcctaccttatttcttcttcgcttttttatcagcagcgtggccgcgataagtacgagtcggtgcgaattcacccagtttgtgaccgaccatttcgtcggttacaaataccggaacgtgctgacgaccattatggacagcgatggtcaaaccgatcatgttaggaaagatcgttgaacgacgggaccaagtgcgcaggggcttcttgtctccgctttccaccgctttctctaccttcttcagcaagtgcaggtcaataaaaggacctttcttgagagaacgtggcatggcttatcctctaaaattatttgctacggcgacgtacgatgaatttatcagtacgcttgttgctgcgggtcttcttacctttggtctgaacgccccacggagttaccgggtgcttaccaaagttacgaccttcaccaccaccatgtgggtggtctaccgggttcatcgcggtaccgcgaacggtcggacgaacaccacgccagcgtgcagcacctgctttacccagaacgcgcagcatatgctcagcattgccaacttcgcccagagttgcacggcagtctgcttctactttacgcatttcaccagaacgcagacgcagggtgacataagcaccatcacgagcaacgatctgaacgtaagtaccagcggaacgtgccagctgaccgcctttacctggtttcatttctacgttatgaacagtagaaccaaccgggatgttgcgcatcggcagggtgttacctggtttgattgcagcatcaacgccagactgaatctggtcgccagctttcaggcctttaggggccaggatgtaacggcgttcaccgtctttgtacagaaccagcgcgatgttcgcggaacggttcggatcgtactcaagacgttcaacaactgccgggataccgtctttgttgcgtttgaagtcaacaatacggtaagcctgcttgtggccaccaccgatatgacgagtggtgatacggccattgttgttacgaccaccggatttgctgtttttttccagcaacggagcaaaaggtttgcccttgtgcagctcagggttaaccactttaactacgtggcgacgacccggagatgtcggtttacatttaacaactgccattgtattactcctccgacttactcagcgccgccaacgaagtccagattctggccttctttcagggtgacgtaagcttttttccagtcgctacgacgaccgatacgctgtccgtgacgtttaactttccctttaactaccagggtgttaacgacttcgacttcgacttcaaacagtttctgcacagcagctttgatttctgctttggtcgcgtctttagcaactttgagtacgatggtgttggatttttccatcgcagtagacgctttttcagaaacgtgcggtgcacgcagcaccttcagcagacgttcttcacgaatcatgccagcatctcctcaacttgcttaacagcatcagcagtcattacgactttgtcgaaggcgatcaggctaaccgggtcgataccagttgcatcgcgtacgtcaaccttgtgcaggttgcgcgcagccaggaacaggttttcgtccagctcaccggtgatgatcagcacatcttccagagccatgtctttcagtttctgtgccagcagcttagttttcggcgcttctacagagaacttctcgacaacgatcagacgatcctgacgtaccagttcggacaggatgcttttcagcgcgccgcggtacatcttcttgttaactttttgactgtggtcctgcggacgagcagcaaaggtcacgccaccagaacgccagatcgggctcttgatagaaccagaacgcgcacggccggtgcctttctggcgccacggttttttaccggaaccagttacttcagcacgagtcttctgagcacgagtaccctgacgagcaccagctgcataagcaacaacaacctggtgaaccagcgcttcgttgaaatcacgaccgaaggtagtttcggaaacagtcagcgcgctctgcgcgtctttcaatactaattccattgctatctccttacgccttcacagctggtttaacgatcaggtcgctaccggttgcacccgggacagcacctttaaccagcagcaggttgcgctcagcgtcaacgcgtactacgtcaaggctctgaacggttacacgttcgttacccatctgacctgccattttcttgcctttgaacactttgcccggagtctggttctgaccgatagaacccggaacgcggtgagacaaggagttaccgtgagtagcgtcctgggtacggaagttccagcgcttaacggtacctgcgaaacctttacctttagaggtgccagttacgtcaacttttttaacgtcagcaaacagttcaacgctaatgctctgacctacagtgaactcttcgccttcagccaggcggaattcccacagaccacggccagcttctacgccagctttagcgaagtggccagcttcaggcttggtcacacggttagcttttttagcaccggtggtcacctgaatagcacggtagccatcgttagccaggtctttaacctgagtaacgcggtttgcttcaacttcgattacggttactgggatagaaacgccgtcttctgtgaagatacgggtcatacccacttttttaccgactaaaccaatcattgtttcaacctctcaatcgctcaatgacctgattaacccaggctgatctgcacgtctacaccggcagccagatccagacgcatcagagcatcaacggttttctcggttggctcaacgatgtcaaccagacgcaagtgagtacggatttcgtactgatcgcgcgcgtctttgttgacgtgcggggagatcagaacagtgaagcgctctttgcgtgtcggcagcgggatcggaccacggacctgcgcaccagtgcgcttggcagtctcgacgatttccgcggttgcttgatcgatcagacgatgatcaaacgctttcaggcggatacggattctttggttctgcatgagaccagagctccaattattttataaacgaaaatgattactcctcagacccattacgattgatgggagagtgtaaccgttcttacgtagctccccgattgggagcattgttaggtagccaaattcggctaactgaggttcagattgaacctgctgtcaactacgacaagcccgcgcattatacgcaaatctgagcctgacgcaagcatcgggtagaaattaatcgcaacgcgcagattgcgagctgtattccacgaaatttgtaaggttgtgaagatagcgtttttcaccggaaccaggttaacaaatcagcgatttctctgttgctgagcatccggagttattcgatggtgatactccaattacagaggatgttttatggacgctaaccttccctttctgattttgtacgcttgtttatctgtcctactttttttatgggatgcaaagcatggcttgttacctgacagatttacctgcccgttactctggtcaggtcttttgttctctcaggtttgtaatcctgacggtttagccgatgcgttatggggggcgattattggttacggcacattcgctgtcatttactgggggtatcgcatactgcgtcataaagaaggattaggctatggtgatgtgaagtttctcgccgcccttggtgcctggcatacctggaccttcttgccacgactggttttccttgctgcctcattcgcttgcggagccgtagttgttggtctgctcatgagaggaaaagagtcattaaaaaacccgctgccgtttgggccatttctggcggctgcgggtttcgttgtaggttgggatagtttgctagcaggccgttaatctttaacttttatttgtgattgcaggtaattttgtaaaccgattttaccgatgagatccagctcagtttcgagccagtcaatatgaccttcttcatcggcaaggatctcgatcatcatatcacggctaacatagtcatgaacgctgtcggcatacgcgatagcctcacggagatccttcgcgccttccagttctaatcgcaggtcggattgcagcatctcctcgacatcttcaccaatccccagtttgcctaaatcctgtaagttggggattccttctaaaaacaaaatacgctcgatatatttatcagcgtgtttcatctcatcgatggattcatggtattcgacgtcattgagacgcatcaggccccagtttttaaacatccgggcatggagaaaatactgattgattgcgacaagctcatttcccaatagtttattgagataatttatgattttaacatcacctttcattttatagtccctccgcttccactattagagcgtagatggggctagcgggatgtcaaaaaataagcgtggtcttcaggcaatctctttaaattctggcatctgcatcaactcgtcctgcatcacttcgcgcgcggcgcgaatgcacttaccgcattgatttcccacaggaataaacttacgcaattgttggaaagattgcggatgaaactgacggactgcctggcgaatttttttgtcacttacaccattacacaaacaaacgtacatgattgctcccgttcaaattctgcgcaaagtgtaaatgagaatggttatgattacaatagcacagttttatttgcgccatagttcagcgagcaaaattacgactaaatatttcgagctcaaattacgggcagcaaaaagggcgccgaagcgcccttttcaattcaaaactaattaacgtgtaattagcccagaactttagcaacaacgcccgcgccaacggtacggccgccttcacggattgcgaaacgcagaccgtcgtccatcgcgatcgggtggatcagggtaacaaccattttgatgttgtcgcccggcattaccatctctacgc

SEQ ID NO: 80 - DNA, 24540 bp, Escherichia coli
  source 1..24540: mol_type = genomic DNA
aatccggtagcggcgtaaaaatcgcggaagggatgaaaaaaacagcgcctgacggcgctgtgtctggcatgcctgcaatccgggaaaccggaccaggaaaaaacttgcaggccataacagtatctacgcgtcccctgcaatattttgaatttgcacgattttgtaggccggataaggcgctcgtgccgcatccggcataaacaaagcgcactttgccagaaatccaggcccgcattaaaagcgggcttttttatgtgccttaccagacgggcatttcgtcttgcaggaagggattatgcaggcgttcataaccaagtgtggataatggtccgtgacccggaataaatgtcacgtcatcccccagtggcagcaatttatctttgattgaagaaatcagttgattatgatcgccacgcgggaagtcactgcgccctactccgcctttgaaaataacatcgccagaaatcagcagctttgcccgatcatcaaaaaacacgacatgacccggcgtatgcccagggcaatgtaacacctgtaaagtcacattccctatgctgatggtatcgccttcgttcagccaacgatctggcgtcagcggctggcactcttccagaccaaacatacgactttgcgcaggcaagccttgcagccagaactcatcttctttttccgggccaaaaaccggcacgccgtaatgttgcgccagttccgccgctgcgccaacgtggtccagatgaccatgcgtcagcaggatctgcatcagtgtcaggccgctgtcatcaacttcctgtttgattttttccgcatcgccgccaggatcgaccagtgcggccagacgggtttgttcacaccagattaatgaacagttctgggagaatgcggtgaccggaataatacgatagttcatactgcccctgtttcgttaagcaattactaccagtgccgtgctggcccggtatcaatatgcacaaagttactacgtggataatatcctacaccacctgcgcgcatagataacgcggctttgcgaatattgcttaacgcgataccttcaatatggaaatccatcgcctggcctttagtgtgatagcttttcttcgctactccacggctgcgggcgcgtagttcattgttggtatcaatagaacgataaccggaaatgagttgcaccggtttgcgcgtgcctaacaacccttgcaggcgatacaactggtcgaataatcctgggtcgatggactttattttgttcgcgcggtaatcgcggaaaaaatggttaagttttgccaattcttcctgaatatagcctctgccatcgaaaaactccgctttgattgactctccggtatgaagattattgagtgtcaaaatgcgcgggcgtggggtagagagtgttgcaaacgcaggggtcggcaggatggcggcaccgagtgcaacgccaccaagcgccagcaatttgcggcgattagcgtcgaatttgtccatgataatcaagtctacaggtcaatgttatcgtttatatgcacttctggcgcacaagaggcaccttaaccgcccgtaaagcagacgtcaagatgactcaaccccagcagtgacgggggctgcagagaatcgcccccaatcatgctaattattacgacaactgatttccccgaactacttcatttacctgattaattgttccgctttcgatacgatttgcgagctggatcgcgcaggcagatcataattgtaaatatctgtacgatactgggtacgaccatctgcaccaacaaaggccgtcaggtagtagagattcaccggaatcgactgccgaatattgacgtaacgtgtatcaccctgcttcagcgcatcagaaatacgtttgtcattccagcctgcatcctgcaacagcatattcgccagatcggaagctttattcactcgtacacagcctgagctcaatgcgcgtgtatcacgcttgaacagattgtggttcggcgtgtcatgcaaataaatggcctctgaactcggcatattgaatttatagcgccccagcgagttccgtgggcctggagcctgctggaagcggaacggtaaattcgaggccgtgattgtagaccagtcaacctgccatgggtcaatcgcttctctgctgttccagccgcgcatcaccgtatagccatggctttcgagatatcccggatcgttgcgcacttttggcagaatatctttgcgtgccagagttggaggtacgttccacggcgggtttaccactacgttgttaagggcactgctcatcatcggcgttttgcgatcggggcgaccgacaatgactcgcgaatccagcacctgattgccgttctgatagtagaccagcgaataggccggaatgttaaccatgatcccggtagaaagctctgttggcagcaagcgcaatcgctggatgttgagagccaacacgccagcacgctgggcgggcgttacgtttaaccagtcacgtgttgccgggccaatagcaccatctgcccccaatccttgccatgcctgaaaacgtttaacggcttccaccagttcattatcgtaggcggcgcgaacggcaggcgcaggtttactacgagatgtcgtttgcttgtccatcggcttagtttctgctgtttcaacagtaacagcggatgggctgactaccgcgtcagttggcgtgtcatcgccaggtagagtaattttcggccccccgtccaacatgcctgtgcgttgcaatatttcgcgcaacgccggtacgtcgttactccactgccctgggcgcaacgttgctttgccggtcagttggggccacggtttggtgtcactgagtaaggccagtaacgattcatgcatcgccgcatattgcggatgctgcggtgccagtccagcaacaaacgtaggcaattgacctttatccagcgccagctgccattggttaatcaccgagagcggcggcgttgcaagtgcataaggtttactgctatatagccagcgagtgcctttgaccggaatatttgcaatgaaatggagatagcccatcatcgcatcagagagcactacgtcgcgtgccatcccgttaacaccaggatcggtcagtaactctacccatttattaaactgcggctggaaaccggcaatcgccacctctgccagctgttgctggaaggctttaacagcatcacggttttcccacatgggttgcatatcgcgtgcggcatacaacagttgaagctggttaagataaaccggcttgtaacctgcgggtaattgagattcgatttgcgtgcgggctttttctgccgcaccttcaggcaatggctggatccccgccattattgccgtggcttgcgcctgcggcagtgcctcgccctgttcactgacagccaccgggctgtcgccagggattacttcaggctcatcggcctgcgcattgaacagtggagcgaatgttacggccaggcacaaactgattgccgacagccgacgaccacacatcatattaagcaacatcccttgccccctgtttttatcatactctgaatagccaggctgttattttacgacttgcctgtacaacgccaatactcacgaaagtatgacgagcaagcctgttactcatcaggcttatcttcagtatataaacgccgatacgtttttacataacctaatgtaaagaagtttaaagaaaagcgcgccgtaatgtgccacttttttagtgcagaaacggagttttcggaaaaagaaaaggcggcattgctgccgccttaattttaactcgcctgagaaggcgcttcgtcacttcctggaagcgtttcagggagttgcggcgcaaatcctcgcaggccgacgacgtgaacgtgttcggtattctggaagactttacgcaccagtttataggtggtgcctttctccgggctgatattttccggcgctgcgatgatgagctgcatttgcaaacgttcacacaattcaaacagcgtggcgatagaacgagcatccagtcgcgctgcttcatcgaggaacagcaggcggcaaggagagatatctttaccgcgcaggcggcgagattcatcttcccagctttgtaccaccatcaccagaatcgacataccggtaccaatcgcctcaccggtcgacaatgcaccagactctgcgcgcaaccagccatcggaaccacgattaacctcaacttccatttccagatagttgcggtaatccagcagttcttcgccaatggtctgcggcgtgcgctgccccatatcaatctgcggattaagacgctgatacaatttcgccagcgcttccgagaaggtcagacggttgctgttaaacagatcctgatgctgctcgtgctgttcagagagcacatccagcagcatggcgtgcgtttcacgcacgttcacgttcagacgtacgctgttcacctgaccaaacgatacgttctgcaacccctggttgagcatacggatacggttctgctcgcgctgaatggttttgcgaatgatgttcgccacgctgcgggaactgatcgccagtttctgttcgcgggaggttaactcctcggtcagtcggctaagttcgatttccatctgctcgatggcttccaccggatcatcggtacgaataatatcctgacgaatacgttcacgcagatgctgataaaccgccacgaagaactgaattttacgttccggacgttttggatcttccgacatgcgcagcacgtcgcgcagatgttcgttatccgccaccgccagacgcagcgcacccaatgccttatccgacatagagcgcaaatcatcagcggagagataagccagctcgcgacggtgtaagcgccgttcaacgccgttatctttcaccatgcgcatcactgcacaccagcccgctttggcggtcactacctgctcgcgcatctcaaagtaatcccgctccagcttgcgcagtttgcgggtcagattgtccatctccgcttcgcagaaagtcagtgctttttccagctggttgcggcgggaccggttattactcagttgcgcatgcagctcgtcacggcgaattcgcgcccgctcttctgccccgctatcggcgcgcacgccgatatcctgcaattcacgttgcagatcgttgagtagctcttttttggtgtcgtaagaacttttcagcgaagccagcacctggttgtactgactcaactgcgctgcgtgaccacgcaacgcttcacgagcgcgagtacgctccgcttccgcctgttccagacgttcacgcagcttttcgttgagatcgctattaccgctcagcatttctgccgagtcagaatagctaaagtgcgcacgacgctgcaccacttccgtcagggcaaacgcctgctgacgggcatcgcgctgcatctgctgagagtacgcgtaatcttcttttagctgttcgaactgttccgggtcgctctgcaataccgaaacgatcggttccagtttcgccagttgattgccaaactgctgaacaaaacgcgcggcttcctgggcttcatccagacgttcgcggatttcatcgacgcgatccgccaggctgtcatcagccaacaggttgagacgcggcagaatgcggttcagcgccgtaacgccttctttcgcctgctcaaactgaatacgctgctgctggttatcattttcatgattactcaacgcccgctccagttcgacgcgacggctgttcagttgacggatttctgcttccgggtcagactcaaacgcaaccgccagatgactgccgataaagcggctgaacgcctgatgcagacgctgagttttctgtacatcaaaggagagcgtggcgaagcgttcggaaagcacttcacgctcggcatggaggctttcaatacggctttcacgcgcagcacgaccaaacagcggcacttccgggaaacgtgaataacgccactgacgatcggcgattttcaccactaccgctttttccagctcatcaacgctgaacacgctgtcatcgaatgactgcggatccccttcgatcaaatagagatcttccgggcaatcggtcaagccttccaggtgttcagttacctgtgacagatctggcaccacgatggcgtggcgtgacgggccatacagcgctgagaagtacggcgcatcttccaggctaacgtcgtcataaatttctgacagcagcacgccgccaaaatgctccgccagcgcgttcagacgctgatcttcagagccgccaggctggcttaaacgttcgatctcttcatcgacagcgtttttgcgcgcgcccacttcatcgcgttcaacaatcgcctctcgctcacgctccagcaactgttgcagatattcggtgacgtcctggctggaggtaaactcttcaccgcactgctcgctcaactggttgagactgttttgcgctgccagccaaaccggcgcacgctgcatcaaactctgaatgcgagactgcagctgttcctgttcctggcgcagtgccatgcgctcttcacgggcgttagacacgctatcggaaagagaggcaatgcgcgcttccagctcctgatgcagagcttccagttcatcaatatcaaaattcttgccctgacgtttgcagaagtctgccagcaggcgttcggcttcttgctgctcgcgcagacgctgttccagttcacttaagcgcatccgcaacggttgaacctgctctgccaggtgacgctgatcgaccccttcgcgcaatagttcgcgagcgacatcccacgcctcgttacgcgccagcgggccgttgattgccaccaccagctgataagcctgctcaaactggctgtgcgcggtttgcgccatgctcattttctgctcaagagagagcattttttcagtcgcttccagctctttcgcctggaaggtttccagccattcggcggcgcagtcggcggttaagtccggcagatggcacagttctttggcacgattaagcgcagcaatcgcctggttatactggatcgcgcgcgtttgctggacgtccagcgcctgctggtagtcagcaagctggcttttcagctcgtccacttccagttcggcagcttccgcacgagcctcattctcttcctggcgttcgatggcttctgccaccacttcattttgctcttccagacggatctgcagctcatcgagatccgcttcgtagcgttcgatcttctcctgctgacgcagtgcggtttgcaccaggttcaggtgatcactggccgcctgataatccgcttccagatcgccttcggcaccgttgtgctctgccagctcacgcgccatatcgacgtgtttgtactgctcagccgccagttgctgacgcgaagtatgtagctcgcgacgaaactccagggctttgtcgagatggacacggcgctcgttggcgtgacgcatgtagtccgccgccacgtagttggtggcttcgctgatcagatgcttaaacaggtcgcggtccgactgggtgacacgaatcgcttccagcgtcatacggttttcacgcagcgccgcttccatgtcctggaacgctttacgcacgccgctgttttctggcaacaggtagtcgcgcagagaacgggtaatggcactggagatcccgccatacagcgaagcttcgatcagacgatagaatttgctacggtcagatgcggagcgcagacgacgcgcgatgatgcccagatcgaacatcagcgagtggtaatcagtaatggagttgaactgtttaaactgcacgccttccatcgcctcgagcttgtctttcagctcgttaagcggcagcacgcgcgcctggcgttcgttcagggtttcggtcaccagctgtgtcggctgcaccgacatcggcagtccctgaatggcaaacggcttgatatccactttacgatcgcgtccggcaacctgttgcagacgcacaccgaccaccacgcgctggtggcgcgagttaatggtgtcgagcatcgaataacagacacccgctttcagcttaccgtgcagacctttatcgcgcgaaccgctggtggccccggcttccgtagtgttacggaaatgcagcagggtcaggtcggggatcagcgccgtaacgaacgccgccatggtggtggatttacccgccccgttaccgccagaaagcgtcgtgaccagctcgtcaaggtcaaaagttcgggcaaaaaagccgttccagttaatcagcgtcagtgagcgaaatttaccgcgttcaatcattattcttcctctccgctatctggctgattctcttcggtttcatcgttgagttgcagatgattttcaatcggcattgcttcgccatcacgaatcaggcgacgctgtgcttcacggggatcgtcgccagcacgcacatcggctccgaagcggaacaccgattcggtaatgcgaaacttgctgctgtcgtggcccataaaccacaccatgcctaaacgacgcagacggttgagcgaagaacgtactttctcctgcaacttctgacggtcaacgtctgaaccggttgaacggttgttcaccagtttcagcagttttgcttcatcggccagggtgagcagttcgtcgtacagttcctgctgggtgaaaatcccctcattcgccagccgttccgggctgagatagagataacagaggattttcccgaccatcatatccagttccgacaagacggaacgcgggataagagtggtggaacgtgggcgtaaatagaagaacccttccggtgcgcgaataagctcaacgttataacgcgcgtaaaactcttccagatattcctgaaaatccatcaggaatgcatgattatccagttcgtcgaggccaatatggcggcctgaacgtaaggcgctgtccagcgccggaaataacggattcgccagcgcctgcgccagcttaaccggcatcacttgttcaatatttgtcgatgacatgcgcctgtaccttggctccgtaatcattaatcggctgccatttcgctggcagtccggtgaaatctgcttgcgctacgccaagacgtaccgcctgatcaataacaatgcgcgcaacgtcaaagtgacgtgcacgcggatactgtgacagatattcgcgtaccaccagaccaagatccagcggcacttgtctggttttgtacacggcaagttgttcttcgatgatcgccgccagctgttcgcggatctcgttaaactcttcgtattccagatcctcaggaagttccccagtcacttcttcatcgcgcagtgccatctcttcgtcacgcatatccagcagacgatcggcattggcataagttagcgcccacggctcatcaaaataggtttgtaccgactgacgtaaccgctgagcaaagacgcggtttttatccatatcgatcgcggtacgaataaatttgtgtacgtggcggtcgtagccaatccacaagtcgatggattgctggccccaactgataatacgatcgagtttgctctgcagatcgaacaccagacgatcgacgaaatgcagatcgtcatgggtcatcgtcgcatcctgaatgcgcaacagattagcctgcaatttgtcgcctgccgcttccagcgtatcctgcaattcacgcagcgttccggaagtttccgaaagcaacaattcacagctggaaatcgccgcccgccagtctttgttcagcaactgggcgatatcgtccttcacctgctgctgctgttcgtccatcagacgttgcgtcaggtcgatactgtcgaaaatttctgctaccgaatatttcagtggcgcatagacattacggtgccagtgaaattcatcaccgccctcttcggcggcatctgctgcgcgtttgagctcacccgccacaatcgacaactgcatagaaagacgcagcgtagaaaactcgcgctgacggatgtagtagtcagtaatgccgatgccgagcggcgtcagacggtaaattgcgttcccttccgcctgctcgctggtaaagcggttcagcagacgttgacgcaccatgtcgttgatcgcgttattggcgcgcacgccgatggtttcgctggtttgctcaaacgcatcactcacatggcggaatgcatccaccagctcgccttcactcatctcaccatccagacgctcgccgttcagcgtggcaaccgccagcagaaaagagagtcggtctaccggcagcgagatggagaagtcattttttctggcccaggcaaccagttcggggactgtctgggaaaattcactcatactttatccttgctctgcggtttgcgcgcggtgacatgaatataacgccccagggtaatatacggttcctgacggcaataacgcgtttctaattcaagtaatgcttcatagcagtcgcgctgctggtgcttctcgcgcagataatcatgaaacacgcgaacgcctgtcttacccataatttgccaaccagcttcttccagccacagataaacctgcgccgggtcgcgtggataatctggcgaaagcgtccgttttttctttttcggcattcccgcctgcacgtaatcaaaattcccggcgaccatgttatgcatcaacaaaccatgcgcattgtagaacattaacgacaacacgccgcctggacgcaacactgaccacagggtctgcaatacactgcggggatcggccacccactcgagcaccgcatggaacaatatcagatcaacgggcgtttccaaatgcgaagcaacatcctgagcggcgcaatgtataaattgcatgttgtcgctcacaccttttgcttctgccgcctgttttgcgcggtcgatcatctgcgcagaaagatcgcataaaatgacctgatgcccacgctcggccattttgattgcggtctgcccttctccaccgccagcatccagcacacgcagtttttgcgggcccatttccgccagcacgcgatcgagatcctgccacagaatagcctgtcgaagctgccctttggtggtgccgtaaatgttacgggaaaacttttccgcaatatcatcaaaattgcgatcctgcattgctttctccaccggttggctaagacgttttctgataaagacgctattttgtcacagccacggcgagaatgaacccgtctggtgtaatatcgctggcgatcccttgctatatggttaaaaaaggaaccagaaaggatgctttttacactgaaaaaagtgattggcaatatgttgctgccacttccgctgatgttgttaattattggcgctggcctggcgctgctgtggtttagccgttttcaaaaaaccgggaagatttttattagcattgggtggctggcactcttgttattgagtttgcaaccggtagccgaccgcctgctgcgtcccatcgaaagcacctatccgacatggaataattcgcaaaaagtggactatatcgtggtgctcggaggtggttatacctggaacccgcagtgggcaccgagctctaatttaatcaataacagtctgccacgcctgaatgaaggtattcgcttatggcgcgaaaatccgggatcaaaactgatcttcacgggaggcgtagcaaaaaccaatacggtgagtacagcggaagtaggtgccagagttgcgcaatcgctgggcgtgccgcgcgagcaaattatcaccctggatttgccaaaagataccgaagaagaagctgcggcagtgaaacaggcgattggtgacgcccctttcctgctggtgacctccgcatcacatctgccgcgggcgatgatcttttttcagcaggaagggttaaatccgctaccagccccggcgaatcagttggccatcgactcgccgcttaatccgtgggaacgggcaatcccttctccggtctggctgatgcatagcgatcgtgttggctatgaaacgcttggccgcatctggcagtggctgaaaggtccgtcaggcgagccacggcaagagtgattttgatgccagatcgaagttgcgccgactaaatcgtccggtattaaccagttgcgcaacttcatcccataacacatacaaccaacgccgccagatgaacgactccgccactggcgcgcgttgcaggtaactccagagcaaatcttccgccagagaattatccattagtcggaacagttcgtattctcgcggtgcccaaagcattagtcccggcccgaccatcgccagtaactgatcgctgcgcgaatctttcagcatgctgcgtaaacagaagttaccgtgaatcaacacacaattgtcgttaaagccttcaaataatgccgggagacattcgcgagtgcgaaacaggatccgcttatcctgcatcgtcagaccggtgttattgaactgattgagcgtggtccatagcacttcaacatgttgccggtaccatgagggccagaaattttcctgagtattgtcgaccgcgccgacgcaaccgcgactgtcctgacggtgccaggccagtaaggcttcaacgatttggtctttgagttgttcccagcgttctggtgttcgggctggtgcctccaccgaaacaccacgcatccgctccagtagcaggacatcggggccggggtgttcttcatgcgtcatcacaccataaatagtcggcatacggacagtcccacttcttgccagcatggtggttttccatgccagttgtcgggcttttccgggcgtactaaagcttcttgccattaacggcattgggtttccctggctgtcatacaaagcccacaacgccgtatccgctttttcattgacgcactcaatacgactgagtttttcgcccagtaaatggcttaattcggcacgcagctgttccattcagattaccctcataaaagctactgctttcataatgagcgccaatataaaagatgtcacctgaatgagatcaattgttgaaaagaaaaattgaggaaaatcgtaacggtacgacactcctcccaaaattggctgaagtgtcgtgaagtgaaattagcgcatttcagcgcgaacgcgctcaagatcttcaggggtatccacacctgtgccaggaacttcctgagcaacagcaacatggattttttcgccgtaccacagaacacgaagctgctctaacatttcgatgtgttctaacggacttgcctgccagttgacgtaacgacggataaagcctgcacggtagccataaataccaagatgacgcaggaagttatcgccaacggtttcaaggccttctgcaaaacgatcacgatcccaaggaatggtggcgcgagagaagtacagtgcatacccttcagcgtcgagaaccactttcaccgcattcgggttaaacgcttcttccgcattgtggattggcaccgccagagtcgccatacccacctgacgctgagcgaggttatcagcaacctgacgaatgattgtcgcagggatcatcggttcatcaccctgcacattaacgatcaccgtgtcgtcgctgaatgcgcatttttcgacaacttccgccaggcgttctgtccctgactggtgatcggcgcgcgtcatacatacttcaccgccagcggcttcaacggcgcgggcgacatcctcatgatcggttgccacgatgatgcgatcggcacctgattcgcgagcacgttcaagaacatgaacaatcatgggtttgccattaatatcaaccaatggtttaccgggcagacgcgttgacgcgtagcgcgcgggaataatgaccacaaaactcatgatttactctcatcagcagtcagcacgcgggcttccgtttccagcaacactggaatgccatcacgcagcgggaaagccaggttgtccagtttgcaaataagttcttgtttttcttggttataccaaagttttccgttgcaaaccgggcaggcaatgatttcaagcagacgatgatccatagttcctccagatggatcgggttatgaatgcataaatcttatcataatcatttatgcgacggggtctatttcccagccagtgcggcaatcagtaaagagaccttgcgggcagcgtcctaatgtcacccgcgttgcctgctgccagctcgcgaaatcagtaatcgcctgacgtaaccctttttgcagcattgtcgttggtttaatgccttcctgtaaccacagagagataacttcaaggatgcctgtctggcgatgcattttggcatccattcgcccaactaattgcccacgatgtaataatggcagaacaaaatagccatactggcgtttcggcgctggggtatagcactccagccggtagctaaaatcaaaaagctgctctgcgcgtttgcgatcccagacaacaggatcaaaaggcgaaagtaccgcgctgtgcgttgcagtgagctttccggccagcgcacgctcgagtagcggcagcaaatcagcatgcagccaaagattgcccaatttttcaacatgcacagcaatgatttgctgctgttcagccctcgcttcgcgccacgccgccagtgccggacgtttcagccgatagtaatctgccagccactgttcgcggaatattcccaggctacgcgcactgttatccagcatgatgatttctgcttctgtttgcgaaacgagatcgcgctcatcatcccagtcaggcatgacacggtgggttaaatcataaacgcgctggaagttgcgccgttcaatcaccatcacctttccggcagtaaataaaccttccagatgccgtttatgcggcttccattcccaccagccgcttgcacctttacgaggatgctcaaaatcggctgaacgtaccggccccttatcatgaatatgctgaattaactgtgcaatttccgcctcatgttcctgcatccaggcgtctttgtatttccagcccattttttcaggtgccagcatgcggtggcgaataagacgaaagtcgctgcgtggcataaagcaggcttcatgcgcccagtattccattaattcgccacgcgccagagactcatccagccactgggcaggataatttcccagacgactgaaaagcaccagatatggactacgggcaacaatattgatggtatcgatttgcagcaaggacatgcgggagatcgttgccggaatatcctccaacgacgctcgacggcggggtttgtttaacaggccttgtgcggcaaggtgaagattacgcgcatcagcaagggagaggtgcggcagcgacattcatgactccatcaatcgaacgctgccgcggcgtaactagttgccagaagccagcgaggttagttgcgtaagcagtttcgctggttcatcacctgaaagctgtgcgtctacaggcaaataccaccaattttcttctgcaaaggcccggcatttcaccgcatctttttcagtcattaccagcgtttgcccggtgcttaccaacgcgctgacatccgcatggttcaaagactgatgatcggccagcggtacacatttttccggttgtacgccgcacatcttcagcgtggcaaaaaagcgcggcggatgcccaatccctgccatcgccaccacatgttcaagctgagcaacatcacaacgcgtaccggtacgtaaattcaccgcctgacccggcagcagatgcatggggatttcaccgctgcgggggacaccgccgttgacgattaccgcatcaactgactttaagcgccccgctcgctcacgcattggccccgccggcaaccaccagccattgccaaagcgacgcacaccatcaataacgacaatttccacatcacgcgccagacggtaatgctgtaaaccgtcgtcggttacgatgatctgcacatcagggtgttgcgccagaatggcatttaccgcatcagaacgaacgggagaaaccgcaacaggcgcatcagtgcgttgataaatcaacacaggttcatcacccgcctgtgctgttgtggtatctgccgacaataacagcggataagattcagccttaccaccatatccccgcgatacgacccccacgcgaattccgcgctgttgcaactgttccaccagccagacaacgaccggggtttttccgttgccgcctgcggtgagattaccaaccacgacaaccggtacgggggcacgccaggcgcgcttcagttttagtttatagcaaagacggatcgcgccactcaccaggccatacaaccaggagagtggcagcaatagccgccacaaaggggattcaccagaccagattttttcgatcattggccaaactgcattttgtgaagttgcgcgtaaacgccgcggtgctcaagcaaatcgttatgcgtaccgcgttccacaatgacaccatcctcgacgaccacgatttcgtctgccttttcaatggtagacaagcggtgggcaatcaccagagaggtacggtttttctgcaactcatccagtgccgcctgaatcgcacgttcggattcggtatccagagccgaggtagcttcgtccagaatcagaatcgggctatcacgcaacaaggctcgagcgatagcaatacgctgacgctgaccgccagagagcagcacgccgttttcaccaatcactgtatcgagaccgttatccatcttattgatgaagtccatggcgtaggccatacgcgccgcttcttcaatttgctcacggctgtactgttcagtccgtgcgtaagcaatgttgttagcaaccgtatcgttaaacagatggacattctgcgacaccagagcaacctggttacgtaacgacgccagggtatactcgcgcagatcgtgaccatccatcaggatttcgccttcatcaatatcgtaaaaacgcgtgatcaggctggcgatggttgatttacctgaaccagagcgtccaaccagagcaaccgtcttccctgccggaattttcaggttgatgttacgcaatgcaggtacgtcacgtcccggataagtaaaggtgacattgcggaattccacgtcgccagtcgcacgctcgatcacgcgcttaccttcgtctttctcctgctcactgtccagaatggtaaacagcgtctgacaagccgccataccgcgctggaactgggcgttaacgttggtcagcgatttcagcggacgcatcagtgcaatcattgaagagaaaacaacggtaatcgtaccggcagtcaggctatccatgacacttgggaagctcgccgcatacagaacaaacgccagcgccaaagaggcgatcagctgaatgatcggatcagagatggaagaggctgaaaccattttcatcccctgaagacgcattcggttgctgactttatcaaagcgtttcgtttccacttcctgaccaccgaaaatcaatacttctttgtggcccttcagcatttgttcggcgctggtggtcacctgccccatggtgttctgcatgtttttactgatgttgcgaaaacgcttcgatactacgcgaatcgcaatcgaaacaatcggtgccagcacaatcaaaatgatcgacagttgccaactgtaatagaacatcatgatgaacaggccgatgattgacgcaccttcacgcacaaccgttatcagtgcgccggaagaagaagaagcaacctgttcggaatcgtaggtgatacgtgacaacagcgtccccgttgactgtttgtcaaaaaatgaaaccggcattcccatcatgtgaccaaacaggcggcgacgcatggtcattaccacctttcctgatacccaggagatacagtagctggagacatagctggtgataccacgtaaaatcatcagcccgatcaccaccagcggcatccacaccagcacggagcgatctgttttaccaaagccatcatcaagaagtggcttaaggagcgataacatgaaggtatcgctggctgcgttgaggattaacgctacgcccgccacgatcagacccgctttaaaaggcgcaatggttggccacagtcggcggaacgtctgccacgtagagagatctttgtcgttatgcattcaaaaaaccagcatttgttgaaatagccgcatattctacccgttatccactggcacgccaaaccactgatgataccaacgaggtaaaatttgctctctgaggctgctaatccgccagccttgcgctgaaaaattgaccgtcacttgaccctgatgtggagtatcaagccattgatatccttgctgttgatagcgatgcttaactttgtttgagggcaatcgccatgcgttatagcgcgatgccgatgcgagtgccacttttccattcactcgctgaattaatggcaacgatgatgaggtattactgccatggtgaggtacctgaagcaatgttgtctgcacttgctgccagtaacggcttagcatcttttgttcagcggggacttcaatatcaccggttagaagaatgctattcgtcccgtcatcaaccttaaccacacaggaatggttatttcctttatcgttgctagcttgtaaaggccagtgcacgctgaaacgcaatccttgccattgccacgcttcgccacgcacacagggctgatgatgttcccagtttaacggacttctgatccataacatcggccatgtgtgcaatattgagtccagccctccccggtgatccagatgttcatgactcagaataacgccttccggttcaagattatgccagtggagccaggggataatcagttgttgcccactatccccttcgggccaggccagtcctgtgtcatagagaatcgctttgccgtttctggctatcaccattgccagcccttgcccgacatcaagcatgtacacctgccactcgtcaggtcgaggtttttgccacagcggccagcacatcagcaagcctacagccacacacattgctggcaacgttcgccaggcgtttaatcgccataccaccagtaagaaccatggggaaaatgatagccattgccaacgttcagcaatgttgatccacccttctggcaaactctttaacccccagaaaagtaaagccaaagaccggtcggcaagaaaccataacccttgctccaggattaacggcccgcttaaatgcacaaccatcgcggcgaggatcaacggaaccgtgataaatgtcaccaagggaattgctaatagatttgcaataaacgaggtcagactaatgccatgaaatatcacgatttgcacgggcataagcagaagtgtgatacccagttgcagatggatgagggaaacaactgcacgcaataccggcggcagttgccactcaggacagggaaaccactgatacaaaaaaatcagtgccgcgaccgcagcggcagagagccataaactttgcgagagaatggcaacaggatccatcagcaaaattgccgccagacaacatatccatacatcccagccactccactgtcgcccacttaacttaagcattccccacgtagcaagcgccaccacggtacgcaatgcaggaggttgcattcccgtcaaccaggcataaaaagcagcacagcagattccaacaattaattgcatttgccagtggatccagcgcccaggcagaaaaacttgcccaccgcgaatgagtccggcagccagcaacgccgcaaaagcgatgtgcaatcccgatatcgccattaaatgcgccgttccagtatcacgcatgatatttttgatttctttggggacggataaccgttcccccatacctaaaccaagaataaccgcattccacggatagggttgcagcgttgtttgtagtgacgccagatactgtgcacgcaggctacaattcggttcaataacacttgcctgcagaaagcggccggtgagcggctgatgctgggcaatggcataacgctggctatcaaagccgccatcattaagttgaccatgaacggcacgaactttgagtttcattgaccacagttgtccggcacaaaccgcttgcggaagatattcgccatacagcacaaggcctggcgcagggaatatacgtcgaccttgtagataagtaatttgaccgtaatgagtggtcatgccgtcagtagcagtgatctcaacaattgcatcctgcgtcgcgccagttaaggtttctcctgcccacaaaatttgctttgctgataatatgccccaaacgaaaaacagcaacgtcagcgcgatataacggacggttttaacagggataaatgccagtacgcaggcgaagagagtcagaaacgcaagggttaatgtcccaggcaattggggcaaaatcagcaacggaaaaattccgcaaattatgcatacgccgactgtcgttattttcatgcacccctccctgtttatggaaagtgtgcaactttgttgagcggttgtctggtgggaattttgcgttccccgaggcacattcagaagaatttaacgaaagggtgaaaactgctcaaaactctgcgaggcagcttccagttcctgattagagaaatgaaaaaagcacccgacaggtgcttttctcgcgttcaagtttgagtaaaaacttaaccgtaaatattggcgcgatcgcgcagttctttaccaggtttaaagtgaggaacgtattttccttccagttctactttatcgccagtcttcggattacgtccggtacgtggtgcgcggtagtgcaaagagaaactgccgaaaccgcggatttcaatacgctcgccctgcgcaagagtcgaggccatatgctccagcatctcttttactgcatcttcaaccgtcttggcgggaatgtgcgattgctgggtggcaagtctttctatcaattctgacttggtcatgattcctccggttccttaaaggcaaattaagcggctgctgttgctgcattgattaagggcagccgtagccgcccttagtgcttgattacaggacgaaacctgcaatctgtcaagtaaactcaacaaacttcggaataaaaatcccgaagagtcagagaattactcgcctttagctgctttgaaagcttcagccattgcgttgttggagaagtttgcatcttcctgtttgttaacagttgcgattgcatctttctcgtcagcttcgtctttcgcacgaacagacaggctgattgcgcggtttttacgatcaacgccggtgaatttagcttcaacttcgtcgccaacgctcagaaccagggtagcgtcttcaacgcggtcacgggatgcttcagaagcacgcaggtaaccttcaacgccgtcagccagttctacggttgcgcctttagcgtcaactgcagttactttaccggttacgatagcgcctttcttgttcagagcaacccagttgttgaacggatcttctgcgagctgtttaacgcccagggagatacgttcacgttctgcgtcaacctgcagaacaactgcagcgatttcgtcgccttttttgtattcacgaactgcttcttcgcctgcaacgttccaggagatgtcagacaggtgaaccaggccgtcgatgccgccgtccaggccgatgaagataccgaagtcagtgatagacttgattttaccttcaacacggtcgcccttgttgtgggtttccgcgaactgctgccacgggttagctttgcactgtttcagacccagggagatacgacgacgttcttcgtcgatatccagaaccataacttccactacatcgccaacgttaacaactttggacgggtggatgtttttgttggtccaatccatttcggaaacgtgtaccaggccttcaacgccttcttcgatttcaacgaagcagccgtagtcggtcaggttggtcacgcgaccagtcagtttggtaccttccggataacgtttagcgatagctacccacggatcttcgcccaactgtttcaggcccagggatacacgggtacgttcgcggtcgaacttcagcactttaacagtgatttcgtcgcccacgttgacgatttcgctcggatgcttaacgcgtttccaggccatgtcagtgatgtgcagcaggccgtcaacgccgcccagatcaacgaatgcaccgtagtcagtgaggttcttaacgatacctttaacttccatgccttcctgcaggttttccagcagctgatcgcgctctgcgctgttttcggattcgataacggcacgacgagaaacaacaacgttgttgcgcttctgatccagcttgattactttaaattcaagctctttgccttccaggtgcagagtgtcacgcaccggacgaacgtctaccagagaacctggcaggaacgcacgaataccgttcagctcaacagtgaagccgcccttaactttgccgttgataacaccggtaacagtttcagcatcttcgtaagctttttccagcgtgatccaggcttcgtgacgtttagctttctcacgggacagcagagtttcaccgaagccgtcttctactgcgtccagagcaacgtcaacttcgtcacctacctggatttccagctcgccctgggcgtttttgaactgctcagccgggatggcggactcagatttcagaccagcgtcaaccagtactacgtctttgtcgatagcaacaacaacgccacgaacgatagaacccgggcgggtttcgatttcttttaaggactcttcaaagagttgagcaaaagattcagtcatgtttaatcttcaggtttatatttaacgtccacctggctccatgccggatggggttgtttaacatacccgctgtcattccattgcaacgggggtactgcaaattcggtcgcttatgcgagagccaatttctggcgcgcgtattgtagcgctttttcaatcacttgctcaatgcttaaggtggtggaatccaacactaaagcatcggctgccggaaccagtggcgctaccgctcggttacgatcgcggtcgtcgcgttctttgatctcggccaaaaggcgctcaaagttaacactaaagcccttctcctgcaactgtagcatgcggcgatgcgcacgttcttccgaggaggcgtcaaggaaaattttcactggcgcatcagggaataccaccgttcccatgtcgcggccatcggcaatcaggcctggtaattcgcgaaacgcgcgttggcgacgcaataatgcttcacgaacgcgtgggaatgccgcgacttgtgaagctgcattcgccacttcctgagtacgaatttcgccgctgacatcttccccttcgaggatcacttccagattgccattggttgacacaaaacgtacatccagatgggatgccagcggtaccagcgcatcttctgacgcaacatcaacatggtgatgtaatgccgccaatgccagtacgcgataaattgcacccgaatccagcagatgccattgcaatgcttccgccatagccttacacaaggtgcctttccctgcaccgcttgggccatcaatggtaataaccggggcaattgccgtcatctttatctccttaaaacaggcgtaccgttaacataaccgcgcgcattatacgcgccgacgccacaaatcgttaacgttgtgtgcaaaaaccagttttgtctgtattcagatggggatttattgcgcaattatagcgggctggcagaagaccagcccgaaagatgacaatgatttacttaccagaggcgatacgatcacggatgtgttgcgcacgctctgttgatggtgggtgagagtcaaacatggactgggtgcgaccgccatccaggctagccagtttttcaaagctaccaaccagcccctgggtactgatgccacgtttcttcaacagatcaaaggagaaatcatctgcttcggactctttatcacgggagtatttagcattgatagcgccttctgcgatatcacccaattgtgagcgggaaagctgggaagcaacaccgctggtagctgaaatggcatcgcgtgcggcaacgatcgcataagaagctttcatttcagccagcgagtgacccaacgcgacgtggcccagttcatggcccagaacaccttcaatttcgttgtcattcatcatgtccatcaggccactgtatacacgaacacagccgttcgccatcgcccatgcgttgacgtcgctggtcatataaaccttatagttgaccggcgtgccattaatattgttacccaatgctttggcgatttttgccagacgtttaccgtacttgctggatttacttgcgacttgattgccgctgtccatttcggcacagccctgattggcaatcgcttttgcatcggcatcgcttaatgttgctgctttataggcatttaaaccggagctgatagccatattggtatcaataccgtgggtattttgacaccctgtcagtaatgctgcagaggtcgcaatcgccagcagtaatttagtattcttcatgtgaatcatccgttgattaatcatatataaatattatgtatcaacaacttacattgacaagcgacgctaccattaatcaaaatgactcacaaggtccgaaaaaaaacgccgacaatgtgccgtaatgccagtcagttaagcaactgactggctctttttcggggctgtggggtatttccagggcctctcctttaccactctcgggaaggccctttcccttcttgtcggtaatttcacaagttgtccca

SEQ ID NO: 81 - DNA, 23610 bp, Escherichia coli
  source 1..23610: mol_type = genomic DNA
tttacgcacctcttttcctaacaaaacgccagccatctcaaaattagaactagtgttagacatatatccaagcctatctcttattttaagatacatctactgtctggtatttcagggggccagctcagcgttaacaaacgtcattaaggagcctggcgggcaataaagatagccaccttcgcttaaggcaaatgttttgccttcggctttggcagtgatatttccagagatcacatacaggaacgtttcaatgccttcgccaccgaagccctgttggttgccaccgttttgatgcagtgtgaccagataatcaacaaaagaggcacccagctttggcgtggagaggattgtcgcgtcacaattttcaaagcccggaataatattttttaccagaccgtctggtgttaacagtgcgaaattaccgtgtttcacaatcgcacggttagccagtaaatcatcgcggtaaccggtgacgttatttaaatatcccatttataactccttatttctgccaggcaagttgataaagcatgagtgccaacgttttgaccccttcggcaaggtcggtaatattggtgcgttccgccgggttatggctgatcccgttgatgctggggataaaaatcatgcaggttggtacgcgaggcgcgaaaatttgcgcgtcgtgcccggcaccactgtgcatcacccggtaattcagtttttctctttcacacaattctgtcagggtggcgaccagctccttattcatcggcacgggttcttcgtccatccataaatcgatatcaataccaatgtccatttcatcgcaaatcgcccgcatgtcgttttctaactgttgggtgaaatcgcgcagcacggcagcgtcggtatgacgacaatcaatggtgaacgtggttttacccggcaccacatttaccgtattcgggcgcggctctactttgccaaaggtcagaaccagcggatcgcccatccttttcgctttttcgaccgactgatggcaaatgcgactgaaagcgtaaactgtatcacgacgataacccatcggcgtggtgcctgcatggtttgattcgccgttcagcgttaccgtataacgacgctgcccgacaattgcattcaccacgccaattgattgcccattactttccagcacacagccctgttcaatatgcagttcaacaaaggctttaatatcctgacgcggagttagtggggcgttcggaagagtaaatccgcaagccttcatcgcatcgacaaaactatttcctttggcatcacagatattccgcacgtcgtcaggattcgccagcccaaagatatttttactgccccagaagacatacgggaagcggctgccttcttcttctgccatcgccaccacttcgaccgtacgtagcggcgcgccgtattgcgttttcagccagtcaattgccagccacgccgccagcgcgccgaattgcccgtcgaggttaccgccgttaaccacggtatcgatatgcgaaccgctcagaaccacttcttgtggatattcggtgccactcaggcgaccatataaattccccacttcatcgaaacgtgtttccagcccgcttgctgccattctttttttaaattgctgctgagtttccagccattccggcgaataaagtaaacgggtcataccacccgttgggtcagcgccaaaagaggaaagccagggcagcgtttcttctatggcttgacgaaaatgtgtaatcataagaaagtcctgtctcaataattattgcgcaaagggatttttcgtttcgtatgacgtgttataaagcgcgtcggaaattaaatactggtaaatatcatcaacaatttcgatgccttcgacggcggctttgcgttgtttaatatcctgatcctgtccgggataataaacctgattaaaaccgggcgcgggggtaatggcatttagttcgcgcatggtctggctaagatgttgacgaaataatttgctggagaagaaaaagttcgggttaataacgatatgtaattgccccaaattacgcccggcgtgtaaatcgtcatacatcgaactaacctgtcgcccgaacggtaagccgagtaagacgcctgagaggacgtcaatcatcatcatcaggccatacccttttggcccggcggcggggagcagagcatgtaccgcgaacggatcggttgttggtgcaccgtttttatcgaccgcccaggtatccgggatagacatattacgcgagcgggcgtcgagcacttttccccatgcctgtacggtagtcgccatatcaaaggtaaggatctcgtcgccttctcccggcgcggcaaaggccagtgggttagtaccgtagtaaatttccgcgccgccaaacggcaccaccattggatcggactggcacatcgaaataccaattaatccggcgcgggctgcctgctgcacaaaataagagattgcgccgctgtgacccatccggctgataccgaccaccgcaacgccattttgctgggcggttttgatggcatgttccatacccattttcgccgcgacctgtccggcggcattgtcggcatgtaaaattgccgagcacggcccggtttcctcaagacgaaactccggttcgcggttggtgccgccttttgaaatgcgttccgcgtagtattccacgcgcaccgcgccatgagagtggatccctctggcatcggcgtaaaccaatacttcagccacggttgcagcgtgctcacgttttaacccagcctggcagagtttattctcaattagctggtggagtgtttcccgactgattttcatctgtcttcctttttaacgacggtgtgaagcatgactgcaattaacatacagggaaaatatctggattatgtgatccagacaggcaaaaaaatatagttagaatttatttgataatccgctcgcttttaacctggtttttaaaacaaccacgcttattaaaaaataacacgtaatagcatggcggttatttgaattcttttgttaataatccctgtgtgatattcatcaccttatttatccgttgtcatcgataccgtaatcgccacattaacactgctcgtgcaattgccatgggtgcaatttttaaggagttgttatgatccacgcctttattaaaaaagggtgttttcaggattcggtcagtttaatgattatttcacgaaaactcagcgaatcagaaaatgttgatgatgtttccgtaatgatgggtacgcccgccaataaagcgttattagataccacaggtttctggcatgacgattttaataacgccacgccgaacgatatttgcgtggcaattcgtagcgaagcggcggatgcggggatcgcgcaggcgattatgcagcagcttgaagaggcgctaaaacaactggcgcaggggtcaggcagcagccagtccttgacgcaggtgcgtcgctgggacagtgcctgtcagaaattatccgatgccaatctggcgctgatttcagtggctggcgagtatgcggcggagctggcgaatcaggcgctggatcgcaacctcaacgtgatgatgttctccgataacgtcacgctggaagatgaaatccaacttaaaacccgcgcgcgaaaaaaaggcttgctggtgatggggccggactgcggtacgtcgatgattgccgccacgccgctggcttttgctaacgtgatgccggaaggcaacattggcgtcattggcgcttccggtaccgggattcaggagctgtgctcacagattgcgctggcaggggagggaattactcacgcgattggccttggcgggcgcgacctcagccgtgaagtgggcggcatcagtgcgctgacggcgctggaaatgctcagtgcagacgagaaaagcgaagtgctggcatttgtttcaaaaccgcctgccgaagctgtgcgtctgaaaattgttaatgccatgaaagcaaccggcaaaccgacggtggcgctgtttttaggttataccccggcggtggcccgcgacgagaatgtctggtttgcctcctcgctggatgaggccgcacgcctggcttgcctgctttcacgcgttacggcgcgacgtaacgcgataacgcctgccagcagcggatttatttgcggtttgtataccggcggtacgctggctgccgaagcggcgggattacttgccgggcaccttggcgtggaagccgacgatacccatcatcacggcatgatgctggacgccgatggtcaccagatcattgatctgggcgatgatttctacaccgtcgggcgtccccatccgatgatcgacccagccttacgcaaccagttaattgccgatctcggcgctaaaccgcaagtgcgcgtgttgctgcttgatgtcgtgattggcttcggtgcgaccgccgatcctgctgcctcgctggtgagcgcctggcaaaaagcctgtgccgcgcgttcagacagccaaccgctgtacgccattgccacggtgacaggtaccgaacgtgacccgcaatgccgctcgcagcaaatcgccacgctggaagatgcggggatcgcggtagtgagttcgctaccggaagccaccttgctggcggcagcgttaattcatccgctctcgtctgccacacagcaacacacaccgtcattactggaaaacgtcgccgtgattaacatcggattacgcagctttgcgctggagctacaaagcgccagcaaaccggttgtgcattaccaatggtcgccagtcgccggcggcaataaaaaactggctcgtttattagaacgtttgcaataaggggttcccatgtttacatcagtggcgcaagccaatgctgcggttatcgaacaaattcgtcgcgctcgtccacactggctggatgtgcaaccggcttcttcacttatcagcgaactaaaccagggcaaaacactgcttcacgccgggccgccaatgcgctggcaggagatgaccgggccaatgaaaggggcatgtgtgggtgcatgtctgtttgaaggctgggcgaaagatgaagcgcaggcactggcaatgctggagcagggggaagtgaacttcattccttgtcaccatgtgaatgccgtcgggccaatgggcggcattacttctgccagtatgccgatgctggtggtcgagaacgtgaccgacggcaaccgggcgtactgcaacctcaacgaaggtatcggcaaagtgatgcgttttggcgcttacggcgaagatgtcctgactcgccatcgctggatgcgcgatgtgttaatgccagtattaagcgcggcgctggggcgcatggagcacggtatcgatctcacggcgatgatggcgcagggcattaccatgggcgatgagttccatcaacgcaatattgcttcctcagcactgttaatgcgtgtgctggccccacaaattgctcgcctcgatcatgataaacagcacatcgcggaagtgatggatttcctcagcgtgaccgatcagttcttcctcaaccttgcgatggcttactgcaaggcggcgatggatgctggcgcgatgatccgcgcaggcagcatcgttacggctatgacccgcaacggcaatatgttcgggattcgggtaagcgggctgggcgaacgctggtttactgcgcctgtaaacactccgcaaggcctgtttttcaccggcttctcgcaggagcaggcgaacccggatatgggcgatagcgcgattaccgaaacctttggtatcggaggtgcggcaatgatcgcagcgcctggcgtaacgcgctttgtcggtgcgggtggcatggaagcggccagggcggtatctgaagagatggcggaaatcttccttgagcgcaatatgcagttgcagatccccggctgggatttccagggcgcgtgcctggggctggatattcgtcgcgtggtagaaaccggcattacgccactcatcaataccggtatcgcccataaagaggcggggatcgggcagattggcgcaggcactgtgcgggcaccgctggcgtgttttgaacaggcgctggaagcactggctgaaagcatggggattggttgaggaacgcgcaatgacgatcatccatcctctgcttgccagccgtagtgcaccgaattatcgccagtcctggcggttagcgggagtgtggcgacgggcgattaacctgatgacggaaagcggcgaactgttaacgctgcatcgtcagggtagtggtttcggccccggaggatgggtgcttcgccgcgcgcaattcgatgcgttatgcggtggattatgcggcaatgaacgaccacaggttgtggctcaagggattcacctcgggcgtttcacggttaaacagccacagcgttattgtttgctgcgtattacgccgccttcgcatcctcaaccgcttgcagctgcatggatgcaacgcgcggaggaaaccggacttttcggaccactggcgatggcggcaagcgatccgctgcccgctgaattacgccagtttcgtcactgttttcaggccgcgctcaatggcgttaagaccgactggcggcactggctgggtaaaggccccggattaacgccaagtcatgatgacacgttgagcggaatgctgctggcggcctggtattatggcgctttagatgcgcgcgccggtcgcccgttttttgcctgttccgacaatcttcaactcgttaccacagcggtgagcgtcagttatttacgttatgccgcgcaaggatatttcgcctcgccactcctgcactttgtccatgctctgagttgcccgaagcgtaccgctgttgcgattgattcgctgctggcgctggggcatacgtcaggggcagatacgctgctggggttctggcttggccaacaattattacaaggaaaaccatgaaaacactggttgtagctcttgggggcaacgccttactccagcgcggtgaggcgctgacggcagaaaatcaatatcgcaatatcgccagtgctgtacccgcgctggcgcgcctggcccgttcttatcggctggcgattgttcacggcaatgggccgcaggtggggctgctggcattgcagaatctggcgtggaaagaggtagatccgtatccgctggatgtgctggtggcggaaagccaggggatgattggctatatgctggcgcagagtttgagcgcacagccgcagatgccgcctgtcacgacggtgctgacgcgcattgaggtttcgcctgatgatccggcgtttttgcagccagagaaatttattggtccggtttatcagccagaagaacaaaaggcactggaagcggcttacggctggcagatgaaacgtgatggtaaatatttgcgccgggtggtggcgtctccgcaaccgcgtaaaattctcgacagcgaagccatcgagttgttgctcaaagaggggcatgtggtgatttgcagtggcggcggcggtgtgcctgtgacggaagatggggcagggagtgaagcggtgattgataaagatctcgccgctgcgttgctcgccgagcagattaatgccgatggactggtgatcctcaccgatgctgacgcggtttatgaaaactggggaacgccgcagcaacgcgccattcgccatgccacaccggatgagttagcgccatttgccaaagccgatggttcgatggggccgaaggtaacggcggtaagtggttatgtcagaagccgtggtaaacccgcgtggattggggcgttatcgcgaattgaagagacgctggcgggcgaagcggggacctgtatttcgctgtagtgatgagagcatccggcaatcggtgcaccatgcctgatgcgacgcttgacgcgtcttatcaggcctacaatgggtaccggagcggtaagccggataaggcgtttacgccgcatccggcaatcaaatgagcacctgcttaactgaacttactctgcgcccacatcacgccgctggcatactccggcggcagcagcgggatcaaggcttccagcgtcgcggtcagacgcgatgtgtcgctgtcggtcaaattcagatgccccactttacgccccggacggacttctttgtcgtaccagtgcagatgcaccagcggcagtttcagccagtcataattcacatcgctaccaatcaggttgatcatcaccgacggactattcactaccggttgcggtaacggcagatcggtaatcgcccgcagatgcagctcaaactggctgatgctggcaccgttttgtgtccagtgaccgctgttatgcacacgcggtgccagttcgttgatcagcagaccttgcggggtgacaaaacactccatcgccatcacgcccacatagcccagctcctgcataatcgccgacagcatctcttcggcttgcgcttgctgctgcgcattggcctgcggaaaagcgacgctggtgcgcaaaataccgtcctgatgcaggttatgcgtcagcggataaaacacggtgctgccatcaaatccgcgtgcgccaaccagcgacacttcaccagagaagttaatgccctgctcgacaatacatacgccgtaacactctgccggtaactgtttggtttcattggcacgtaaacgccattgaccgcgaccgtcatagccaccagtgcgacgcttaacaatcgccagttcacctaaacgctcaaacaccgcaggccactcgctgcgatcggcaagtaactgccacggtgcggtcggcaggtggagcttatcgaaaagctgcttctgagtcagacggtcggcaataatcgggaacacatcgcggttcacaaaggccggatgacgcgccagctcgcgggttaatgcggtttccggccagcgttcgatctcagcggtaatcacgctttgttgaaaaggcaccgccgccggttcagcgtccagcccgaccggccagacagcaatgcctaacggttcacctgcctgacgcagcatacggcctaactgcccgttaccgaggacgcaaacctgtttcatgccgcacctcgcgggtccgggttttccagcacttcgtcggtctgggctttgcgccagtcattcagacgctggtgcagttctttatcatgagtcgcaagaatttgtgctgccagtaacgccgcgtttgccgcgccagctttaccaatcgccagcgtacccaccggaatgccgcgcggcatttgtacgatggagtagaggctatcgacaccgctcagtgcggcgctctgtactggcacgcccagcactggcaccagcgttttggcggcaatcataccaggcaggtgcgctgcgccgcctgcgcccgcaataatcacctgataaccgttctcttcggcgctttcggcgaagctgaacagcttatcgggggtgcggtgagcagaaaccacttcaacgtggtgcgggacattcaggatttcgaagatttcggcggcgaactgcatggtagcccagtcgcttttggaccccatcacgatggcgacacgcgccggattattgcgggaagacatgcgtcttaaaactcctgtggtgcacaactctcggctttagagggcacagagaatagcacggaaagagagcaaggaaaacggttgcgtggctgtgaaatcagcaaagttgcgggttttttaaaacggaaaatgaatcagctcaacgtcatccgccgtgactttcaccatcgaaccttccgtatgccaggcaccgagtaccacgcgaaaagcaggttgctggttggcgataagttcatgtaccgccgggcgatgggtatgtccgtggatcagccattgcacctgatgtttttccatcgcactgactaccgcgttttggttaacgtccatgatcgccagcgatttactgctgttggcttctttactgttcgctcgcattcgcgcggcaatgcgtttgcgcacaaacaacggcagggcgaggaatagcatttgcagccagggtttgtggactttggcgcgaaaagcctgataacccgcgtcatcggtgcacagcgtgtcgccatgcataatcaacacccggcgaccataaagttcgagcaccttttcttccggcaataatgtcatgccgctttcacgggcaaagcgtttgccgagcagaaaatcacggttgccatgaatgaaataacagggaacgccggaatcggacaccgctttgatcgctgccgccatctggcgatggagtgggttgggatcgtcgtcgccaatccatgcttcaaacagatcgccaagaatatacagcgcgtcggccttgcgggcttcccccgctaaaaaacgcagaaaaccggcggtgatcgccggttcttccacgcagagatgaagatctgcaataaagagtgtcgccacgattactcgctaacggtcacgctttcaatgataacgtcttcttttggcacgtcctggtgcataccgctacgaccggttgcaacacctttgattttgtctaccacgtccatgccgtcaaccacttcagcaaacacgcagtagccccaaccttgcaggctttcgccagagaagttcaggaagtcgttatcaaccacgttgatgaagaactgtgcagttgcagagtgcggagcctgagtacgtgccattgccagcgtaccacgggtatttttcaggccgttgttggcttcgtttttgatcggttctttggtggctttttgtttcatgcccggttcaaaaccgccgccctgaatcataaagccgttgataacacggtggaaaatggtgttgttgtaaaaaccttcgcggcagtagtccaggaagtttttaactgtttcaggtgctttatcgtcaaaagttttgatgacaatatcgccgtgattggtgtggaaagtaaccatttttgcatcctgttccgtttgattggtgcttcaacccagttcgggtcatatatagggtggtgttatagcataaccgcacgatcggatcatcacgcaatgtatgctgattcgcgcgggaaatatgggtattatacgcaactcaattacccacacatgtctaaacggaatcttcgatgctaaaaatcttcaatactctgacacgccaaaaagaggaatttaagcctattcacgccggggaagtcggcatgtacgtgtgtggaatcaccgtttacgatctctgtcatatcggtcacgggcgtacctttgttgcttttgacgtggttgcgcgctatctgcgtttcctcggctataaactgaagtatgtgcgcaacattaccgatatcgacgacaaaatcatcaaacgcgccaatgaaaatggcgaaagctttgtggcgctggtggatcgcatgatcgccgaaatgcacaaagattttgatgctttgaacattctgcgcccggatatggagccgcgcgcgacgcaccatatcgcagaaattattgaactcactgaacaactgatcgccaaaggtcacgcttatgtggcggacaacggcgacgtgatgttcgacgtcccgaccgatccaacttatggcgtgctgtcgcgtcaggatctcgaccagctgcaggctggcgcgcgcgttgacgtggttgatgacaaacgcaacccgatggacttcgttctgtggaagatgtcgaaagagggcgaaccgagctggccgtctccgtggggcgcgggtcgtcctggctggcacattgaatgttcggccatgaactgcaagcagctgggtaaccactttgatatccacggcggcggttcagacctgatgttcccgcaccacgagaacgaaatcgcgcagtccacctgtgcccatgatggtcagtatgtgaactactggatgcactccggaatggtgatggttgaccgcgagaagatgtccaaatcgctgggtaacttctttaccgtgcgcgatgtgctgaaatactacgacgcggaaaccgtgcgttacttcctgatgtcgggccactatcgcagccagttgaactacagcgaagagaacctgaagcaggcgcgtgcggcgctggagcgtctctacactgcgctgcgcggcacagataaaaccgttgcgcctgccggtggcgaagcgtttgaagcgcgctttattgaagcgatggacgacgatttcaacaccccggaagcctattccgtactgtttgatatggcgcgtgaagtaaaccgtctgaaagcagaagatatggcagcggcgaatgcaatggcatctcacctgcgtaaactttccgctgtattgggcctgctggagcaagaaccggaagcgttcctgcaaagcggcgcgcaggcagacgacagcgaagtggctgagattgaagcgttaattcaacagcgtctggatgcccgtaaagcgaaagactgggcggcggcagatgcggcgcgtgaccgtcttaacgagatggggatcgtgctggaagatggcccgcaagggaccacctggcgtcgtaagtaattgcgctgttgccggatgcgagttttcgcatccggttatcgcctgcgccaccacaacattcccataagcaccatccccggcaaccacacccacatcaattcagaaattatcacctgatgcccgtacggcgtggtgtaacgagacaatgcaaacggcgcgactttaatcacctgccagggagcgaaaaagcgttcatctgaccacggccacagccagccaacgcccttaccgccagtggttaccgaatccagcaagctgtgcgatagcaacgagacggttaaaaacagccagcagcgaatcagcccagccctgaaccatcggcgtccaatcagcacacataacagcgggacaacaaacgcaaacaccagcgaatgggtaaacccgcgatgaccaaaaacattgccgtaagcaacgccaaatttaaacgacaatacgtcggcgtcgggcagcatcgccaggatgattccggcaaataacagacgcggagggatgactttcgaacccaaccctaaaccaatgcataggggaacggcggcgtgcgtaataacggttggcatgatggtcgcttcggcaaaatgtcgatgctatcagcatggatgaacggggcgtagagggcaaaagtctgaaaagagaaccggcctgttgatacaggccgggaaagggatcaggcaacaacctgtacgctgtgacctgcaaaactcactgtctgaccggcgacgattttgcagcgtttgcgcgtttcaaccgcaccgtcgactttcacctggccttcggcaatcgcgattttcgcctgcgcgccgctttcgctccagccttccagtttcagcaagtcgcacagctcaacgtgcggatgtttacctaaagaaaatgtcgccatgttactcatcctgtggatcatgatattcaacgcacgcctgtagcgtgttttcaatcagcgtggcaaccgtcatcgggccaacgccgccgggaacaggcgtaatgtatgaggcgcgtttagccgcgtcttcaaacacgacgtcgcccacaactttgccattttccagacggttgatgccgacatcaatcacaattgcgccttctttgatccagtcaccaggaataaagcccggcttgccgacggcaacgatcaacagatcggcattttctacgtggtgacgcagatttttagtgaaacggtgagtcacggtagtggtgcaacctgcgagcaacagttccatgctcattggacgaccgacgatattcgatgcgccaatcaccacggcgttgaggccgaaggtatcaatgttgtaacgctcaagcagcgtgacgataccgcgcggggtgcagggacgcagacgcggcgcgcgctggcacagacgaccgacgttataaggatggaaaccgtccacgtctttgtccggatgaatacgttccagcactttgacgttatcaatacccgccggtaacggcagttgaaccagaatgccatcgatggtgttgtcggcattcagcgcatcgataagctccaacagctccgcttcgctggtggtttccgggaggtcataagagcgggagacgaacccgacttcttcacaagccttgcgtttgcttgcgacataaatttgcgatgcagggttactacccaccagcacaacggccagtcctggtgcccgcagtccggctgcaatacgcgcctgaactttttgagcaacttcagagcgcacctgctgcgcaatcgttttaccgtcaataatctttgctgccatcagagagaggattccatctgttacgtaggtcgaaggggatgcgcctattttgtcagaagcggggcgcgctgtcaggtttcgtttcagatttatcgcgtgaagcgacctcttgcgaaggttaggcgcaccgtcgctgaggtcgctgagattgaaagcttcatttttcgtccatgatggcgttgtaaatctggaactgatttatttccttgtttaaggattaagataatttaagaaatacctgacaatataaaaagaattttcagcctggtgatttaccgcttcaggtctatatttgtgttgaatatattttgcgcggaagtattcatctaacggggctctctattttttagattagagtgcatattttcaattaagacattcttagaggataaaaaggaattttactactatcagtgtcttaaataaagtaatcggttatatacggatgtggagtcgataaatgagattgaaggaatatatatgaaattaagatttatttcgtctgcgctggctgccgcactattcgccgctacgggtagttatgctgccgttgtagatggcggtacaattcactttgaaggcgaactggtgaatgctgcctgttcagtgaatactgactcggcagaccaggttgtcacactcggtcaatatcgtaccgatattttcaatgctgttggtaatacctctgcattaattccattcaccattcagttgaacgactgcgatcctgttgttgccgctaatgctgccgttgcattttctggtcaggctgatgcaatcaatgataatttattggccattgcatccagtaccaatacaacaacagcaacgggtgtcggtattgaaatacttgataatacatccgcaattctcaaacctgatgggaatagcttctcaaccaaccagaacttgatccccgggaccaacgttcttcatttttctgcacgttataaaggcaccggtacaagtgcatcagcagggcaagcaaatgctgacgcgacttttattatgagatacgaataatcaaaaccacgttgttttgaattatatatcacgtcttataacaaagtaatgtaccggttgtctgaagcggtatggtggcaatgtaaatcgaaatcatgttcactttgtatcatgccgctttattaaatgaaaagggaatgatgtgttgtaagaaaccaaagcaatcatttctttatatttcttatttttgccgtcaggaatacacaaggcgtattaactatgatgactaaaataaagttattgatgctcattatattttatttaatcatttcggccagctcccatgctgccggagggatcgcattaggtgccacgcgtattatttatcccgctgatgctaaacagactgcggtatggattagaaatagccataccaatgagcgctttctggtcaattcgtggattgaaaacagcagcggtgtaaaagaaaagtcattcatcattacaccgccactgtttgttagtgaacccaaaagcgaaaataccttgcgtattatttacaccggtccaccgctggcggcagatcgtgagtctctgttctggatgaatgttaagacgatcccttcggtagataaaaatgcattgaacggcaggaatgttttgcaactggcgattttatcgcgcatgaaattatttctccgtccaattcaattacaagaattacccgcagaagcgccggacacactcaagttttcgcgatccggtaactatatcaatgttcataatccatcacctttttatgtcaccctcgttaacctgcaagtgggcagccaaaagttggggaatgctatggcggcacccagagttagttcacaaattcccttaccctcaggagtgcagggaaagctgaaatttcagaccgttaatgattatggttcagtaaccccggtcagagaagtgaacttaaactaaccgaatcatctgacaatatcagagctaattatgaaaatacccactactacggatattccgcagaggtatacctggtgtctggccggaatttgttattcatctcttgccattttaccctcctttttaagctatgcggaaagttatttcaacccggcatttttattagagaatggcacatccgttgctgatttatctcgctttgagagaggtaatcatcaacctgcgcgcgtgtatcgggtggatctctggcgtaatgatgagttcattggttcacaggatatcgtatttgaatcgacaacagaaaatacaggtgataaatcaggtgggttaatgccctgttttaaccaggtactccttgaacgaattggccttaatagcagtgcatttcccgagttagcccagcagcaaaacaataaatgcatcaatttactgaaagctgtacctgatgccacaattaactttgattttgcagcgatgcgcctgaacatcactattcctcagatagcgttgttgagtagcgctcacggttacattccgcctgaagagtgggatgaaggtattcctgctttactcctgaattataatttcaccggtaacagaggtaatggtaacgatagctatttttttagtgaactcagcgggattaatattggcccgtggcgtttacgcaacaatggttcctggaactattttcgcggaaatggatatcattcagagcagtggaataatattggcacctgggtacagcgcgccattattccgctgaaaagtgaactggtaatgggagacggcaatacaggaagtgatattttcgatggtgttggatttcgtggtatacggctttactcttccgataatatgtatcctgatagccagcaaggatttgccccaacggtacgtgggattgcccgtacggcggcccagctaacgattcggcaaaatggttttattatctatcaaagctatgtttcccccggcgcttttgaaattacagatttgcacccgacatcttcaaatggcgatctggacgtcaccatcgacgagcgcgatggtaatcagcagaattacactatcccgtattcaacagtgccaattttacaacgcgaagggcgtttcaaatttgacctgacggcgggcgattttcgtagcggtaatagtcagcaatcatcgcctttcttttttcagggcacggcactcggcggtttaccacaggaatttactgcctacggcgggacgcaattatctgccaattacaccgcctttttattaggactggggcgcaatctcggaaactggggggcagtgtcgctggatgtgacccatgcgcgcagtcagttagccgacgacagtcgtcatgagggggattccattcgcttcctctatgcgaaatcgatgaacaccttcggcaccaattttcagttaatgggttaccgctattcgacacaaggtttttatacccttgatgatgttgcgtatcgtcgaatggaggggtacgaatatgattacgattacgacggtgagcatcgggatgaaccgataatcgtgaattaccacaatttacgctttagccgtaaagaccgtttgcagttaaatatttcacaatcacttaatgactttggctcgctttatatctctggtacccatcaaaaatactggaatacttcggattcagatacctggtatcaggtggggtataccagcagctgggttggcatcagttattcactctcattttcgtggaatgaatctgtagggatccccgataacgaacgtattgtcggacttaatgtttcagtgcctttcaatgttctgaccaaacgtcgctacacccgggaaaatgcgctcgaccgcgcttatgcctcctttaacgccaaccgtaacagcaacgggcaaaatagctggctggcaggtgtaggtgggaccttactggaaggccacaacctgagttatcacgtaagccagggtgatacctcgaataatgggtatacgggcagcgccacggcaaactggcaggccgcttacgctacgctgggggtcgggtataactacgaccgcgatcaacatgacgttaactggcagctgtctggcggtgtggtcgggcatgaaaatggcataacgctgagccagcctttaggggataccaatgttttgattaaagcgcctggcgcaggcggtgtacgcattgaaaatcaaactggcattttaaccgactggcgcggctatgcggtgatgccgtatgccacggtttatcggtataaccgtatcgcgcttgataccaatacgatggggaattccatcgatgttgaaaaaaatattagcagcgttgtgccgacgcaaggcgcgttggttcgtgccaattttgatacccgcataggcgtgcgggcgctcattaccgttacccagggcggaaaaccggtgccgtttggatcactggtacgggaaaacagtatcggaataaccagtatgtgggtgatgacgggcaagtttatttaagtggtgcgccattgtctggtgaattactggttcagtggggagacggcgcgaactcacgctgcattgcgcactatgtattgccgaagcaaagcttacagcaagccgtcactgttatttcggcagtttgcacacatcctggctcataaaggaaattatcaatgaagataatctgcagattattattggcgatggcatgtttgtgtctggcaaacatatcctgggctactgtttgtgcaaatagtactggcgtagcagaagatgaacactatgatctctcaaatatctttaatagcaccaataaccagccagggcagattgttgttttaccggaaaaatccggctgggtaggtgtctcagcaatttgtccacccggtacgctggtgaattatacataccgtagttatgtcaccaactttattgttcaggaaactatcgataattataaatatatgcaattaaatgattatctattaggtgcgatgagtctggttgatagtgtgatggatattcagttccccccgcaaaattatattctgatgggaacagatcctaacgtttcgcaaaaccttccattcggggtgatggattctcgtttaatatttcgtttaaaggttattcgtccctttattaacatggtggagatccccagacaggtgatgtttaccgtgtatgtgacatcaacgccttacgatccgttggttacacctgtttataccattagttttggtggccgggttgaagtaccgcaaaactgcgaattaaatgccgggcagattgttgaatttgattttggtgatatcggcgcatcgttatttagtgcggcagggccgggtaatcgacctgctggtgtcatgccgcaaaccaagagcattgcggtcaaatgtacgaatgttgctgcgcaggcttatttaacaatgcgtctggaagccagtgccgtttctggtcaggcgatggtgtcggacaatcaggatttaggttttattgtcgccgatcagaacgatacgccgatcacgcctaacgatctcaatagcgttattcctttccgtctggatgcagctgcggcagccaatgtcacacttcgcgcctggcctatcagtattaccggtcaaaaaccgaccgaagggccgtttagcgcgctggggtatttacgcgtcgattatcaatgaggtacggagaatgagaagagcactctttagctgtttctgcgggttactgtggatttccagtggatgggcagctgaccctttgggaacgattaatatcaatttgcacggtaacgttgttgatttctcctgtaccgtaaacactgcggatattgataagacggtagatttaggcagatggcctacgacacaattactgaacgctggcgataccacggcactcgtcccttttagcctgcggctggagggatgtcctccgggttcagttgcgattttatttacgggaacgccggcatccgataccaacctgctggctctggatgatcccgcaatggcacaaaccgtcgccatcgaattacgtaatagcgatcgctcccggctcgcactgggggaggcgagcccgactgaggaagtagatgcaaatggcaatgtcacactaaatttttttgccaattatcgagcgttagccagcggtgttcggccaggtgtggcgaaagcggatgcgatatttatgatcaattataattaatattatattaattcgtataatttggcgtagtcgataagctctacaattgaatgcaaacctagcttgccataaatattagatttatgcgcactaactgttttattgctaagtaataacttatcggcaatttctttattagataatccgctaaccagataacgtaatatggtcacttcacgattagatagcacagtgaccgttgaactattcgtactacatttattgctttttatatagttaagcgtttcgctaggaaaaaacgtgtatccggagaggatcatctgaacggcatgaaaaatatcattctgatcattgcatttactgacaaaaccgttagcaccagcttgtatcgctctgccagcataaaagcattctgatttcgatgataaaaataacactttcactgtgctctggatttgtttgatccttttcaggaaggtaaaaccgtctgttccgggcaagtctatatccataatgattaaatcaacaggacgggttcggagataatcgatggttatgcggtaatcatccgttttcaggacaatctgcaattcactgtttttttgcaacagaacttcaatagacattctgatgataggatgagtatccataatgatcaccgacgttggtttcatagttaccagtctcataggagcggacaattttccgttagggcggtaaattgtactttgatacatgaaaatacgggttttcttgattcagacgcgcagcggtgtgtgtttgtttgccgctatagcgaaataaatcagaaaatcagacgcggtcgttcacttgttcagcaaccagatcaaaagccattgactcagcaagggttgaccgtataattcacgcgattacaccgcattgcggtatcaacgcgcccttagctcagttggatagagcaacgaccttctaagtcgtgggccgcaggttcgaatcctgcagggcgcgccatttcttcttcatttatgcccgtcttatccgtttccgctttgcccttcaccacatcactttttgtcgctgtttggcgagataattcaacggtgtcaggccgtaaaacgccttaaaaacagagataaagtatgacgtgctgctatagccacataattgcgccacctgagtgatatttttgttatccatcaataacatctgtacggcgtaacgcatacgacactctgtgacaatctggctatagctggtattttcgttttttaatttctttttgagcaggctggggcttaaacatagcgaactggcgacaattcgcagattccagtaatgctgaatatcgctttgaataatgcggcagacgctgtcgcggacgctgctgcgtaagatatacatcagtagggcaataaaccgcgattgctcaagaaagttagacaatacggtaaaaagcaatacgcgcgtcaactccgcttcgcagggtttgctgggttgctgcttgctgtggttggcggctagccggaacacttccggtgtacggctatgacaagcaataaccggggttgccagccgcgaccagggctttacacaggttaagttcttatttaaaaacaacagataatcgttgatgatgttacggttgatgtgggtgattaatacgtgatttaacgttgagagttcaatgacgttattgttgcacgcgaaggcggccaggtagtttttcggaagggtaaacgtagcatggttattgacgcttacctctacctctttttcggtcaggatcaccacgcaaggttcactgctgctcaattgcatttcgcactcctcagatatcagaaactccgctcaaaggatctatgcttcctgcatgagtgatcggcccgttcgccgataacgatcttctttctttagcacgctttttagcaattaatcttgatggaattctgacgagagcgaaagaggtaagccaggtcgtacccgacttacctggaggagatttaatactcgagaatgccgtgcgcgacgggcaaatagcgcagagagaaatagagagtgtctttaccgcaagaggaacgtttcgctaacagcgaggcgatctctgcatccggtttcggtttcgctgtaaaggttttgcctttgccggcgacaaacagttcataaacaatgccgctggcaggggcgggactttggcaatcggcgctggcctgtagataacgttcacgctgttcagcggtaagtttatccacgccgctgccatcctgtacccagacattaacgccggttgctttaacttgttccagcagttggcgatagccatcgggcgacatgtttccggcgaaaaaactactgatataaaccggttttgctgaaacatcgctaatcagccgctgcgcgttgtttaaccatgttagcaaaggctgacgggcagcttcgctgcgccagttcaggtcgtcaatttccgcgctgatgtaccagccatccggcgttacgccaggcgcggcgctccataatctggcttgctggagatcggcagccagcaggcgattaagatagctttccagcgctgcggacgactgtttctggtgcataaaaaattccggatcggcgttcagcccgacaatcagcttcaggccagcctgttgcgcagctgcggcacgcttaaacaataacgcgcgctgttctggctgggtgaatgcatcgccgtaacgggtccattgcaaaaccagggtatcgaagccttgcaaacgtaactgactcatcagcccctgccactgggtatcggtaacctgactatctcggttttgtggttgccagataatacctttcatcgcaaaggaaaaagggctgaccaaaagcagtgtcagcaatacgaaaatgaacttacgcatttaccagtgcactccaatggtgagaaacgcgttgttgcgctctccgttacgttgattaatcgccttaaaggtatgttgatactcgacgccgagactgactttgtgcggccaggcgtcgtagtgcgtctcgccggtccagatattccagcggactccgactccgccaagctgcgcgccctgagtgcctttatcacgatagccgttgtcctgaacgtgagcgtaaggctcaatagtctgtccgttagctaccttctgatgccagctgacgcgataatctgccgtccacgcctgaatatcctggcggatatattgcgccgcatcgaggtacaggttttgggcaaaccagcctgaaccgttcgggtgccattcgtcgctgtatttgccgccattaaagaatgagggaaggtgcgaataagcggggaaattcttctcggctgactcagtcatttcatttcttcatgtttgagccgattttttctcccgtaaatgccttgaatcagcctatttagaccgtttcttcgccattt

SEQ ID NO: 82 - DNA, 23395 bp, Escherichia coli
  source 1..23395: mol_type = genomic DNA
ggtaggccattttgtccagcacctgcgcaaattcaagggagagaaactgctggctgaccagggagagatcgagggaaaagagcgaagagagtgactggttcagatgaaaggaaaccaccgcaaaagcatccggcggcaggccgtccacttccagtgtgaaacgtaatccggttgacatagcaacctccgtgaaaatgaataataatccgcacatattgcatgtacaacatgtcgggcggatgagataagcgagtcgacatctggcgttaccggggaatatcagaaaaatgtcatggttatgtgatgatttagtctgggattttacttcagagaaacgggtgtctgtttagtcaacaaaataatcacaaacgcaacggatgggttctcgacgttattcacgacaggctcgtacattacagcgagtaataaaaaacctgatatgcaaagtcaaaccaatattcataatgtctttttattcacaacaataaataattcaataacaatcattgaaatgaatgatggtttgtataaggaatatacgctaccgccccaccctgataacatgatctgcacattgccatcttaacgtcgttaaacactagcttaatagtggatatttcaaattaggaatttattaaattcacctgatgaatataataagcaaatagcatagaaaataatgacaactcccccgaggggaccatttccaaagcactgcaccaccacctggtgccggatgatcttgcttcagtggtaagagtacctgatgcattgttcccaaaatggtgttttcccctgcccctccaataatgtgtagctctcacttgataatctattgattaggttatattaagaatcaacatttaaaatacatccattttcttgaataaatcaacatgtttattaatcaattgctgttttagctctgactcatcaagctctccatatttgtcctacagataattgcgaataaatacagagaacgccatttatccttttagcatacctgccggatatttttatttgtattaatattaattgcatctccaactccgagcatatccatcattaaaaactttttgagattatagaatacctgtgataacaagtgaaacatctgcacaatgtgaatagttagtttcttttcagaggaaatgaaatagacaagctgaatgaaggggagagtgatataaatcaaaaaacataacatgaatttaattaattacacccatcattgtggataaagttactgaataataaataacataatcttctggtatcccactcaaataatttcattcctttttaatacttcttgtaatttcggtaactgacatacagcatcagcgatcgcgctgatattctacgcattatcctgaaaccattcatgccccggcccccatgtgcgcatggtgcagagataacagtccaccagcgttagttgctcaccaaaggcataaggttcagcggtcaattgtgaattcagccagatataaagtgatttgcgatattcaattacattcttctttaactgttcaggtgcgtcagatgcccaacgctcagggtaatcggcgaaagtgaatgttggatagacattagcaaccagccagaccaatagccgttgaaactgctgacgttcggcgcgcccaaccggtggcgcaaggtccgggcgacgatcgagaaccatcaatgcaatcgccgctgtctccgtcataatctcgtcattttccagcgccagtgtcggaacctgacacaacgggttcagggttttcaataactcgcgtgaagctccctcgtggtcaaaaccactgacatcaacgaactgataaggaatatcagccagtgttagcatcagctcactgattgtagagccccatccgggtacgccatacaccttaatcatatgccctcacaatcttttaaagattaagtgtaggacagtacacaggttaaccagcaaaaagatttgtcattttttcgtcagttgtattattccccttcaggattgtaaggggatgttttgcatcgtttatcgataacgggtaggatgctgcgccgatagttttatacccataaagaataatggtgataactatcatcgccaggatgaataaacattgttcatggcaacttatatgactttttcattaaagcaatcagggagagcaatgagtaaacacgacaccgacacttcagatcaacacgccgcgaaacgccgctggcttaatgcccacgaagaggggtatcacaaagcgatgggcaatcgccaggtacagatgatcgccattggcggcgcgattggcaccggcttgtttttaggtgcaggagcccgactgcaaatggcgggtccagcattggcactggtttatttaatttgtggcttgttttcgttttttattctgcgtgcattgggtgagctggtgctacaccgcccttccagtggcagttttgtctcttatgcccgtgagtttttgggtgagaaagccgcttatgttgctggctggatgtacttcatcaactgggcgatgacggggattgttgatattaccgccgtcgctctgtatatgcattactggggtgcgtttggcggcgtgccgcagtgggtctttgcgctcgctgcacttaccatcgttggcaccatgaatatgatcggtgtgaaatggtttgcggagatggagttctggtttgcgcttattaaagtgctcgccattgtgacctttttggtcgtgggtacagtgttcctcggtagtggtcagccgctggatggcaacaccactggctttcatttaattaccgataatggcggcttcttcccccacggtttgctgcctgctctggtgttgattcagggcgtagtgtttgcttttgcctccattgaaatggtgggtacagctgccggagaatgtaaagatccgcagaccatggtgcctaaagcgattaacagcgtgatttggcgtattggcctgttttacgtcggctccgtggtgttgctggttatgctattgccgtggagcgcgtatcaggcggggcaaagtccgttcgtgacgtttttctctaaactgggtgtgccatatatcggcagcattatgaacattgtggtgctgaccgctgccctctccagcctgaactcaggtctgtactgcaccggacgtattctgcgctcaatggcgatgggcggttccgcaccgagttttatggcgaaaatgagtcgtcagcatgtgccgtatgccgggattctggcgacactagttgtgtatgtcgtcggcgtattcctcaactatctggtgccgtcgcgcgtatttgagattgtgttgaacttcgcgtcgctgggaatcatcgcttcatgggcgtttatcatcgtgtgccagatgcgcctgcgtaaagcaattaaacaaggcaaagcagcggatgtcagttttaaactgcctggcgcgcccttcacttcctggctgacattactgtttttactgagtgtcctggtgctgatggcgttcgattacccgaacgggacttatactatcgcggcgctgccgattatcggtattctgctggttataggctggtttggtgtgcgcaaacgcgttgctgaaattcacagcactgcgccagtcgtcgaggaagatgaagaaaaacaggaaattgtgtttaagcctgaaacggcgagctaattgcaaaattgcccggctacgtgccgggcaaatttagattactgacgaaggtgtgccgcatgcggcgtgataaaagtcaggcaagtctctccgttttcaccctcgccacatctattacagcgcaatacgaatcacatcgtccggctgggtagcttcctgctgtttagtggatttttgtttcacactgacatacagcgttttgccatcggcagacagcgccaggctgtttggatgagtcggcgtatcgaacgttttcaccactttatagcttttcgcgtcaatcacactgactttacctgcctgacgatgcgttacgtaggcttcattacgcgctgggttaaacagcacagccagtgattctggtgccgcaaccttcgccagaatattgccattacgggtatcgaccactaacacttctgcggctttagaatcggtgataaatgcacgctgcctggcggtatcaaggctaatgttgataaagaagtgctctttgccgtcatccagcagctttttacggctgaggattttattgtcggcggtgtcgatggtaatcaattcgccgtcagcgttagtggtgtaaagacgtttgcctttgctatccagcgccagaccggtactcattttaccggtgttctggatggcggttttcagtttgatattctcgccatcaacgacccaaatcacgctctctttaccaataccactgatgtaaacggtgttcgtggcatcatcagctaccagctcacgcggttgcagcgggcgcacctcttccgtgcgcttacgatcatccagcaccagacggcctttcacctcgcccgttttggcatctatcgccgtgaccgcgctgtttacggtgttaccaaaccacaacgtctgagtcgtgttattgatggtggcaccaaacggcttgagatcgttatggatcgcctgcgtcacttccagagtgaccggatcaagacgataaaccacgccacctttatccagtttgcggctttgcgaagtggcgagccacagtgcgttttcttgctggctataagccatttcgtatgcacctttacctaccgctttacgcagcatttcttctgcggcctgcgtactgaatgatgaagcaacaagcaatgaacctaacagtaatgaaccacgcaggcgcgatgaaaacagatgacgtaaatgcatgacgactccctttgatgaaccgatatttttgctgcttcacaatgcttcgctaagcgtaatcatcgttacgctcttgttataaatgggaatggtaatcattattttctcaaatgtggagcatttcttgccgttacgactacaattttctcaattacttaacgtatcgtgccgtttcgttttccataaatttacaatttcattaccataacggcgttttcccattcttaacctggcttttttcatgaagattttttccgtccgacagaccgttttgcccgcactgcttgtcctttcccccgttgtttttgccgctgatgaacagactatgattgtcagtgccgcaccgcaggtggtttcagaactggataccccagcagcagtaagcgtggtggatggcgaggagatgcgcctggcaacaccgcgcattaacttgtccgaatcactgaccggcgtgcctggtttgcaggtacaaaaccggcagaactatgcgcaagatttacagctgtcgattcgcggatttggctcccgctccacttacggtattcgcggtattcgcctgtatgtggacggtattcccgccaccatgcccgacgggcaagggcaaacatccaacatcgatttaagcagtgtgcaaaatgtggaagtgctgcgtggccccttctctgccctgtatggcaacgcgtctggtggggtaatgaatgtcaccacccagaccggacaacagccaccaaccattgaagccagtagttactacggcagttttggcagctggcgctatgggctgaaagcaacgggcgcaacgggagacggcacacagcctggcgatgtcgattacaccgtctcaaccacgcgttttacgacccacggctatcgtgaccatagtggcgcacagaaaaatttagctaatgccaaactgggcgtacgcattgatgaagccagcaaattaagtctgattttcaatagtgtggatatcaaagcagatgacccaggtgggctaaccaaagcagaatggaaggctaatccacaacaagcgcctcgtgcagaacagtacgacacgcgaaaaaccatcaagcaaactcaggctgggttgcgctatgagcgtagcctgagcgcgcaagatgatatgagtgtgatgatgtatgccggagagcgagaaacgacccagtaccagtcaatcccgatggccccccaacttaacccgtcacatgcgggcggcgtgattaccctgcaacgccattaccaggggatagacagccgctggacacaccgtggtgaactgggcgttccggtcacgttcactaccggcctgaactacgaaaacatgagtgaaaaccgcaagggctacaataacttccgcctgaatagcggcatgccggagtacgggcaaaaaggtgagttgcgtcgcgacgaacgcaatctgatgtggaacatcgatccctatttacagacgcagtggcagctgagcgaaaaactgtcgctggatgctggcgtgcgctacagctccgtgtggtttgattccaacgaccattacgttactccgggtaacggcgatgacagcggtgatgccagttatcataaatggctacctgccggttcgttaaaatatgcaatgaccgatgcctggaatatctatctggcagccgggcgaggttttgaaacgccgacgattaatgagctgtcttatcgtgctgatgggcaaagcggtatgaactttggtttaaaaccatccaccaacgatacaattgagatcggcagtaaaacgcgtattggtgatgggctgcttagtctcgcattgtttcagaccgacactgatgatgaaattgttgtcgatagcagtagcggtgggcgtacgacttacaaaaatgccggaaagacccgtcgtcaaggcgctgaactggcatgggatcaacgtttcgcaggagattttcgcgtaaacgcgtcctggacctggcttgatgcgacctatcgcagcaatgtttgcaatgaacaggattgtaacggtaatcggatgccagggatcgcccgtaatatgggctttgcgtcgataggttatgtaccggaagatggttggtatgcaggcacggaagcgcgttatatgggcgatattatggcagatgatgaaaatacggcaaaagcgccgtcttatactctcgtcggcttattcaccgggtataaatacaattaccacaatttaaccgtggatttatttggtcgtgtcgataatttattcgataaagaatacgttggttctgtcattgtcaatgagtcaaacgggcgatattacgaaccttcgcccggacgaaattatggtgtcggcatgaatattgcgtggagatttgagtaattaccttgatgcccggtatttgccgggcatttactttaacgattgtattgctggtataaaatagcaatattttgttgcataatttcagcaagacaatgtctgcatccctctttgtcttttgcttttaacgcagcgagtaacagatgatagttttctatatgctcccgtaattccgctggattaatcgcttcatagagataatgtaaaccaggccccatcctgacccacagttgctcaatcatctcacacaggatgggcatatttgagcgatgataaatcgctaagcgaaatagcctgtttacattaatgatttgttccatgtcgcccttttcttgcgcctgctgtaatttctcgagcaattcctggagttccgccaggtcttgcggggtgaggttttcaacagccagagcaactgccattaattccagttcgtagcggatccgattgatttcgtctaattgacgtttcctcacttccggaactgtaaatgcttgtgcaggtgcgacagaaagcgcattcaccgaaaccagacgtaataatgcttcacgcacaggtgtaatactcatacctaattgctccgccagatttttagtaatcaggcgtgcgccaggttttaatgcgccaatactaagctgatgtttcaggtcgttctcaacctgcagagtcaaactgacatgtttcatttttcccattccaggcattttaattccttcgcgtgttttctgtctaaccctgcctgcacggcagaaggagttcacctggtgtattaaagtgaataatcataaaccacccacctttgttgttattagcagcagaacaatgacgtggttagttaattaaagctgaaaataagctttttgcctggatttttatggcggcttacgccgccgttgaaactttaatcatcacccgcgacgcggatcaccactttgccgaagtttttacccttcagcaggccgataaacgtctgtggcgcattctctaaaccatcagtaatatcttcgtggtagtggattttatcctctttcacccattgccccatctccttctgaaactcatggatgcggtgaccataatcctgagcgataataaacccttgcaagcgaatacgttttttcagcaccgttgccatcaacaggggtaaacgatccggaccgggtggtagctctgtagcgttatagctgctcactaagccacaaacgggaatgcgcgcagatgtattaagtaatggtagcactgcatcaaataccttaccgcccacgttttcataatagatatcaataccttttgggcacgctttcaccagttgttcggcaaaatcattcgcgtggtgatcaagacaaacatcgaagcccagcacctcgatagcatggcggcatttttccgcgccaccggcaacccccaccaccctgcaacctttaagtttgccgatttgccccaccgttgctcccacaggacctgtcgccgcagctaccaccaacgtttcgccctctttaggctgaccgatatccagcagccccatataagcggtaaagcctggcatccccagcacacccagcgaccacgatggattttgcggatgatcgccaagtttcaccagatcatcaccactggatatgtcatagtcctgccatccactgtagcccagcacccagtcgccaggctgataatcaggatgattcgactccacaacacggctcaccgtgccgccgaccatcacgccgccaatatcaaccggcggtgaataagatggctcatcgctcatacgtccacgcatatacgggtccagggacaaataaactgtgcgcagtaacacctgtccttcacccggtgtggcgacatcatcttcttcaagacggaaattatccggaaccggtgcgccatgtggacgcgaggccagaacccaacgtcgattacgctgcttttgttgccccataatgctctcctgtgcttttggcatgaatccatcaatagtagcaggctcacgggattggttttgtttgcagccgtcacatcccctctgcaacacgcaataatttcatcgaggaatccgttgcttcgggctgttttcgatagtattgataacatcatcatcattattttatcgaggccagacatgtccatccgttttgcccgcaaagccgattgtgctgccattgcggaaatttataaccacgccgtgttgtatacggcggctatctggaatgaccaaacggttgatgcagataaccgcattgcctggtttgaagcgcggaccatagcaggttatccggtgctggtgagtgaagaagatggcgtagtgacgggatatgcctcgtttggcgactggcgtagtttcgatggttttcgccataccgtggaacattcggtttatgtccatcccgctcatcagggcaaaggtctggggcgtaaattgttaagccgattgattgatgaagcgcgggattgcgggaagcatgtcatggtcgccgggatcgaatcgcaaaatcaggcctcgctgcatctgcaccagtcgctgggatttgtcgtcaccgcacaaatgccgcaggtgggcactaaatttgggcgctggctggatctgacatttatgcagttgcaactcgacgaacgcactgaaccggacgcgattggatgaatcagtcgctcacccttgcttttttgattgccgccggaattggtctggtagtccagaacacgctgatggtgcgcatcacccagacctcctctaccattctcatcgccatgttgctgaactcactggtggggattgtgctctttgtttctattttatggtttaaacaaggcatggcggggtttggcgaactggtgtccagcgtgcgctggtggacacttatacccggcttgctgggatcgttttttgtcttcgccagtatcagcggatatcagaatgtgggagcggcgacaactattgcagtactggtcgccagccagctaattggcggtctgatgctggatatcttccgcagtcatggcgtaccactacgggcgttgttcggcccaatttgtggcgcaattttacttgtggttggcgcctggttggtagccagacgctcattttaatcagaggatggtgccgcctttggttaactgttcgtggcgcgcttccatatcttctttatgcttgcgaccgtgatgagcaatagcggtgcgcaaacgctgctgctgggtgtagcgatcttcccgacttaactccgcgtcatcgctcagggcgattaataattcgttcatatgggcaatgacgctctcttcaatcgcggcatccacgcgcgcgatgacttcatccagatgcgacatactttctccttaaccacttgtgaaatttatcgattcatccaaatgatataagtctgcgtggtgccgtcaagccagtgagtaagatttaaaacagtgaaaacaacagcgccaccgggaaactcatcggccatgttgcccccaccagaaaggcgcttaagaaacggatgcgtttcttatcgtgagaaagaaaccaggtgataagaaatgcgattgttgccataaccgcataaaaaacaagcatatgttgatagagagacatgtacgggcgtccagccagatgaataaaacgcgcgcaaatatgcgtcattttttgacgtgcatcaagttttttcaccagtttgagaaaaaatcatcaaacagcaacttgcccttatccatcttcagaatgagtattattgcggattttcttaacccgtactatacacataggggcaatgataaaaggtggcaaaaatgaatgtttccagtagaactgtagtactgataaatgtctttgctgctgttggtttgtttactcttatctctatgagatttggctggtttatttgatgtagtgattttgcacgcagcacgtactgtcagagaaatcagtgctctgacagtacgcaagatcatctcatactcttacgatctgcaatattatccttaatgtttaaccatgacgtggcggacgacggtgtaatcctccagcccataaagtgacatatccttgccgtaaccagaaagtttctgtccaccgtgcggcatttcacttaccagcatgaaatgggtattgacccaggtacaaccatattgcagccgtgcgctgacgcgatgcgccctgcccacatctttcgtccataccgaagatgcaagtccgtactggctgtcattcgcccagttcaccacctgttcttcgttgtcgaagggcgtaacactcactactggaccaaatacctctttttgcacgatggcatcgtcctgtaatgcgccagccagcagcgtcggcgcatagtaatagccattacccttgcgcttttcaccgccagtgatcactttgatgtgccctgtcgctttcgcctcttctactgccttgctgacgcgttcgagatgcgccagcgagcttaaaggtccaagctccgtagactcgtcatccggcgcaccagattttaacgttgccaccgcagcacccagtttttccaccagcgtatcgtaaatgcctttttgcgcgtagatccgacaagccgcagtacaatcctgtccagcattgtaatagccaaatgtacgtacaccttcgaccactgcttcaatatccgcatcatcaaaaacaatcactggcgctttgccaccaagttccatatgagtacgcttaatggacgacgcggtatggctgatgatgtgctcgccggtggcgatagagcccgtcagcgacaccatccgcactttgggatgaccggtcagcggatcacccaccgttttgcctctgccaaacagtacgttaatcacgcctgccgggaagatatctttcgccagctctgccaacttcaacgcggtcagcggggtaatttctgatggtttaagcactacgcagttccctgccgccagcgccggagccagtttccacgctgccatcatcagcggataattccacggtgcgatagaagccacgacccccaacggatcgcgacggatcatcgaagtatgaccttcaagatattcacctgccgccagaccattcagacagcgcgccgcacccgcgaaaaagcgaaaaacatcgacaatcgccgggatttcatcattgaacgcactatgcagcggtttgccacaattacgggactccagttcggcaaaaacctgaccattttcttcgataacatcagccagtttcagcagacattccgcacgcactttcggcgtggtttgcccccattcggcaaatgctgcatctgccgcgcgcacagcagcatcgacctgctctgcggatgcctcggcaatctccagtaaaacgtcccccgttgccggattatagacaggctgtttttccccttcgccgctaaccagttctccgttaatcagtaacttatgttgcatagcatattcctgtatcagtggttattgaccattgtcgccttcgcgggttagccaccaggcccccaggatcggcaaggttgttaccaacataaccagcagtgccaccacgttagttaccggtacatcacgcggtcgcccaagctgattgagcaaccacaacggtaacgttcgttcatgacctgccgtaaaagtcgtaacgatgatttcatcgaacgacaaggcaaacgccagcattcctcctgccagtagcgccgaactgagattcggcaacactacgtagcggaaggtttgccagccattggccccaagatccattgacgcctcaaccagactccacgaggtgcggcgaaaacgggcgatgacattgttaaacaccaccactacgcaaaaagtcgcatgaccgaccacgatggtgaaaaatcccggctccagattgatggttttaaaagcggttaatagcgccagaccagtgacaatgcccggcagcgcaatgggcagcagcagtaacagcgaaatggcgtttttgccgaaaaagtctcgtcgccacagcgcggcagctgccagcgtccctaacaccagcgcaattaatgtcgccagcgccgccactttaagtgacagtgtcacggcatcaagaatatcactacgccgtgctgccacgctaaaccagcgcagcgtcaggccctgcggtggaaaactaaacgccgcatcttcagtgttaaacgcataggcggcgattatcaggatgggaaaatgtaggaaaacaacgccgccccaggccgccagtttgaggaaaaacggtgcgcgttcagagtgcatcgaacgctcccagacgtttcacgaacgccaggtacagtgcgatgagaacaatcggcaccagggtgaatgccgccgccatcggcatattgccaatcgccccctgctgggaataaaccatattgccgataaaatatcctggaggaccaaccagctgcgggacgataaaatcgcccagtgtgagtgagaaggtaaagatagagccagcggcaatacccgggattgccagcggcagcaccacatagcgaaaggtttgtcgtggacgtgcgccgagatcagccgacgcctgcaacaatgacggcggcaaacgctcaagcgccgcctgaacgggcaggatcatgaacggcaaccagatatagagaaacaccagaaagcgccccagcccggaagttgacagcgtatttccgcccaccgcaggtaatgtaaggaacgcagtcagcagtggttccagcccaagatgttgtaaaaaccactgagccacgccatcttttgccagcaataacgtccaggcataggctttaacaatgtagctcgcccacatcggcaacattaccgcaatataaaaaaaagctttcattttcccgctggtatagcgcgccatataccacgccattggaaaagccagaatggcgctggcgatagtgactgccacagccatagtcagcgtgcggagaatgatgtcgtaattcgccggattaaacagcgcacggatattcgccagcgtcagttccggcgttaccgacatggtgaaatcgtcaaaagtataaaatccctgccataacagtgtcagcagcgagccgaaatagacaatgccaaaccacattagcgggccaagcagcagtaaaaacagccccagccccggattacgccagaagaaaccggacaccttacccagacctggacgtgaaggtgattgcaatacattcatcgccattcacctctcctcaaccagcggcaccatcacatcacgcgaccaggaaaccatcacctgttgtccgggcgtgagcgtggcaggcagttcttcgcctgtcatattggcctgactcacaagcagtttttcaccgccgttcaatttcagttcaaaacgagttgccgcgccctgatattgcaccgcctggatcgtgccattggcctgcagttcaccaggggtgttgaggcggatatgttccggtcgcagggcgaagcttcccgtcatgccacaaagtttctctgccatcagtccatcaaaaacgttggatgtcccgacgaatccggcaacaaacggcgtgcgcgggcgcatatagagatcgcgcggggaatcgacctgctcaatgcgtccattattgaaaaccgccacacgatcggacatcgataacgcttcgccctgatcgtgggtaacgaagataaaagtgataccgagagactgttgcagttttttcagttccagctgcatctgctcacgcaatttgagatccagtgcgccgagcggttcatccaacagcaatacgcgcggttcattcaccaatgctctggcgatagcaacccgctggcgctgaccaccagaaagttgtgacggtttacgttgctgtacaaaccccaacgccactttctccagcgcctcttgcgccattgcgtgccgctgctttttattcacgcctttgaccatcagcccataggcgacattgtcaagaatcgacatatgcggaaatagcgcgtagtcctgaaagacagtattcacgtcccgctcccacggtggcagattgctggcgggtttaccaaagatagagatagccccgccggaaagctgttcgaagccagcaatcaggcgcaggcaggtggttttgccggagccggacggccccagcatagagaagaactcaccatcttttatcgcaatactgacgccatctactgcgcgcacgtcaccgtacaaccgcgagacgttgtcaaactccactgcgtacgtcataaagcaccccagcgaagttagcgaccgcccataatggcaatgtaatcctgcgtccagcgactgtagggaacaaacttgcccccttctgctatagccgttttccagaaggcgattttgtcgaaatagttaaaaccgttggtttcacaacctttttcgcctaataacggactggctttacacccttccggcactaccggtaacgagccaaaccaggccgccacatcgccctgcacttttggcgttaatgaccagttcatccatttgtaggcgcaaaccggatgtttcgcttcgctatgcagcatggtggtatcagcccaaccggtaacaccctccttcgggaaaacggtagcaacaggctggccttcggctttcagggcgttggcctgatagggccaggcactggaagcaaccacaccctcgtttttgaaatcgctcatttgcacggtagtgtcatgccagtagcgatggatcaaactgtgttgagcgcgcagcactttcagcaccgcctggtactgttcttcggtgagttgatacggatcgctgatgcccaactgcggctgagtggctttaacgaacaacgcagcgtccgcaatgtagatagggccatcataagcctgaacgcggcctttattgctcttgccgtccggcagattttgctcaacaaaaaccacttgccagctatccggcggcgtcgggaaggttttagtgttgtacatcagcaggttcggcccccattggtaaggtgtgccgtaaactttgccgccaacattaaaccagtcgcctttaaccacgcgcggatcgagcgttttccagttgggaatcaaggcggtattaatcggctgcacgcgtttgcccataatcaaacgcagcgaggcatcgccggatgccgtaaccagatcgtaaccccctttggtcatcagactgaccatttcatcggaagtcgcggcggttttcacattcaccgcgcagcctgtctctttttcaaattgcgttacccagtcgtattgtttatcagtttgtccgcgttcgatgtatcccggccaggcgataatatagtcgcccttccggtttatctaaattggtaggtggttcggcggcgtgagcggtcattattgtcatggtgagcgcacacaggctgctgcgggcaaatgtcttgctcataaggtcttactcctgtcgtaattaattgttcagccgccgtgccgtaaaaatatctccttgtttaaccatagacggcggcttgcaggcacaccttcgcccctgagaaaatttaatcaggttgtgagctaccgcgcattatgccgtctgtaaggttatcttctggagtatagacaaggggttaggaaatatgactgctattcgaaattcatattacccaatctaagaggaattaaattaaacgctattacagccgttcttgaataagtttgcctaattgttttaccgcctgttcttcacgttctccccactgccacgcggtattaaaacgaaaaaaacgtgaccagttttcaccggtagaaaacattttacccggcgcaatactgatatgatgcgtcagtgccgccaggcttaattcgccggcatctaacggctcggggagctccagccagagaaaataaccgctgtcactatgatgaattttaacttccgcaggcagataacgcagcagtgcctgccaggcacgttgtttacgttccgcaagctggcgacgcaggcgacgaagatgggcgtcgtatcggcgcgtggaaaggtaatccaccagcgcaagctgcatcggtgagctggtggaaagcgtactcatcaactgcaagcgttgaattttacgtgcatgttttccggcggcgacccaaccaatacgaaaaccaggcaccagacatttcgaaaacgaagagcaatgcaaaacgccatcgtggcgatcccacgctttcgcaggcagcggtttttcccgtccaaaataaagttcgctgtaaacgtcatcttcaatcagcgttacgttgtactgattgagtaacgccaccagttgtgcttttttttgcggcgttaaggtaaatccgagtggattctggctattagtcatcagccagcacgctttcaccggatactcctgcaacgccagttccaacgcctgaagatcgatcccttctttaacatccgtcgccaccgataacgctttcagccgtagccgttccagcgcctgcaacgcgccatagaaacaaggattctctactatcacccaatcgcccggttcagttaccgcttgcaaactgaggtttaatgcctctaacgccccggcagtaatgacaatttcatcaggagaaatggtgatgccctgtaaggcatagcgacgagcaatagcctgacgcagttctgcgtttcctggcggtaagttttcaatcacgctcatcgccgtggcggttttgcttacctgcgccagcgagcggtttagttgttggagggggaaaagtcgcgggtcgggaaaggccgaggcaaacggaacgaccgacggatcgcgactggcctgcaacatatcaaaaatataagtgttgatatcgactgcttcatctcgagtgactggaatgactggcgctttcggcatttttattgcctgtggcgcaacgtaataacccgactgcggtcgtgcgataatatatccctgactttcgagcaactgataggcatggctgacagtcataaagctcatgcctgaaagcgccacctggtcacgcaacgaaggcaaacgatcgccgggttgccagatacccgacgcaatctgctcgcgtaattgttctgcaagctgctggtattttttcattatcgaatcgtaattatgtgcagatgattcggcagtctatatcagttgttaaaaatgacaacttttcgttaactgtaattaaaccatcaccagcgataactctttgccaagcgcctttgccgcaagttggacggcgtcgatttttgtcgcatggtgcaagttaaataggcgagtaatctcctgtttaggtttgccaattcgcctggctaactcttgctgagtgatttctgactgtaaaaaagcatttaacagcaatactttagaggcgacgctcaaaggtacttcaataaagtgatcatgactatttaatggcgaaggtaacgggataagctcgttatcttcaaaataaaaatcaaatgcggtcagtaaagcatcttttgccgcttccatcgcttcagcgacagtttcgccctgcgtcaacgcttcagggatatccacaaaagaaaccatataaccgccttccggcgcgggtgtaagagtgacgggataacgcataatttcgactgtccctcgcatgtcattaacctttttaattggcgattaactcaaaccgagttgtttcaggattgctttacgcaatggttctttaatctcatcgcaggggtgacgcggcatgacactgcgcctcccatgaaacctgagtttcaaatggttgctgccattcgctacatcgacgccctgagattcgagccaacgtctgaactcgctttgtttcacatcgcctccctgccgctgagtatatcaacaaagtaaacattagtgtttacctccgtgtgtaatttgctcgaaaatagcactaaatcgccgcaacggcagaatgcaatgcaaaatcaggaaggaagattccagaatttctttgcgctaatttgcaaaactgaataataacctcaagaaacgatcggcatcatagcggcaaaaggtaagaaaaaggtggcaggatgtttacgaaggcgttatcggttgtcttattaacgtgtgcgctgttctcaggacaactcatggcagggcacaaaggacatgaatttgtgtgggtaaagaatgtggatcatcagctgcgtcatgaagcggacagcgatgaattgcgtgctgtggcggaagagtcggcggaaggtttgcgcgagcatttttactggcaaaaatcgcgcaaaccagaagcgggacaacgttgagtcatttgttgccggatgcggcgtgacgccttacccggcaggcaatatcatgcagattcaatgagttgtgagtaaccagaacactggcgttttacccttttcgcttaggcaatgttttcagcagctcatccggacttacggatgccactacgcttcccggtaacggcattttcagtatgtgatttttgattttgccaatgacgtgcatctcgcatgggcggcaatcaaactttagcgttaatacttcatcgccgttaaccagttgcattggcgtcgccttccagcttttgatattgcctttcgcctgtttcgggcacagattaaaggcaaagcgcagacaatgcttggtgatcatcaccgggacttcgcccttctcttcatgtgcttcatacgccgcgtcaatcagctgcacaccatagcgatgataaaattcacgcgctttctggttgtatacgttcgcgaggaaactcagatgcgtttgcggataaaccggcgcaggatcagcaaccggtttacggctgccgcgctggtaactggcaagacgcgcagcatccagcatgtcagcagcttcacggcggaactggtttaacagactgtttggtacaaacagcgcccccggcaaattaatttgcacatcgcgggcgtaatagagggtttgccccagttttgccagaccatccttcagattgttcattgctttttcggcgttattggcttcgtcgaactgcccgtccagcgtatgcgtgatgctgacaccctcttcactggtgagggtcagaatcagttgttcctgccagccgcccagttcaatgtctaccgccacccgacgttcgctggaggtttttgtcagtgcctgctgccagttatgatcaagattacggtttagtgggtgatgtggacgaattttgtgcaaatctgctggcatttcattgggccagacgcggtactgattttctccggttttctcgaccgtattggcacgaaaaccgacgacttcacgtttaatcaacacgttcaggccatcgccatttgccagtggctcggtaacggcaacatcgagatgatctttcgccactttcaatacttcgcctaccggcaggccgataaatttcggcgaatcgaacgcgccaatatcgcctttacgggcattcacaaaataatctgtgctaccacggtggaaagtcttttccgtcgatggaacaaagaaatgttcagtacgacctgatgaagcgcgcgccagatcgccacgttcttcaataatggcatcaagcatctggcgataatgggcggtgatattcttcacgtagctcatatctttgtaacgcccttcaatcttgaaggagcgtacaccagcatcaatcagcgcgccgaggttggcagtctgatcgttatctttcatcgacagcagatgtttttcataggaaaccacccgcccctgatcgtctttcaatgtgtatggcaaacggcacgcctgcgagcaatcgccacggttggcgctacgccctgtttgcgcatgagaaatgtagcactgacccgaataggccacgcacagtgccccatgaataaagaattcaatggtcgcgtccgtagcctggtgaatcgcgcggatctgatcaagattcagctctcgcgccagcacaatctgcgtgaagccaacatcagagaggaacttcgctttttcaactgtacgaatgtcgcactgcgtactggcgtgcagttcaatcggcggaatatcaagttccagaatccccatatcctgaacaatcagcgcatcgacaccggtctggtagaggtcagtaatcagccgttgcgcgggttccagctcatcatcatgcaaaatggtgttaagcgtgacgaaaatttttgcaccataacgatgggcaaacggcaccagctcggcaatatctttcaggctattactggcattatgacgggcaccaaaaccagggccgccgatataaacagcatcggcaccgtgcaaaatagcttcgcgggcaatggcggcatcgcgtgccgggcttaacagttcaagtcgatgagaagatacggtcacattcttatccagtagctgaaaaatggcggctattttagccacaagcgcgacgttgcgaaatagttttcccgcttaactgcgcgggtaatggatgagggaatgaaaatgtacggtttgctccccaccattacgatagatatgcgtgacgtctgcagcaaatcgaacgccttccccacaattaagggtctgccattccccatcaacgcacagatcaagttgtccatcaatgacgacgacatgttcgattacccccttctcatggggcgtcgattcgcttattgcaccagatgccatctgaatcgagaagtgttcgaagcagagttgtggatcataaggaaacagcgaagtgatcaccatcgcctgctgttgtggatcataaactgaaggcgtagcggactgcggcggagaaataaatgttgaaaatggtacgttcaacccggtggcaattttccataatgtcgcgaccgtcggactggactcattacgctcaatctgccctaacattgctttagaaacgcccgtcgcttctgccagtcgcgaaagactccagccgcgctgctggcgtagttgtttaagtgtggtggataaaaagcgagcgagattttccatgcgactcctccggcaaaacggaagtttatcacttgtgcgttataacggacaaatgctacggtgcctgtacgctataacgcacgaggtgactatgcgtctgttttctattcctccacccacgctactggcggggtttctggcggtattaattggctacgccagttcagcggcaataatctggcaagcagcgattgtcgccggagccaccactgcacaaatctctggctggatgacggcgctggggctggcaatgggcgtcagtacgctgactctgacattatggtatcgcgtacctgttctcaccgcatggtcaacgcctggcgcggctttgttggtcaccggattgcagggactaacacttaacgaagccatcggcgtttttattgtcaccaacgcgttaatagtcctctgcggcataacgggactctttgctcgtctgatgcgcattattccgcactcgcttgcggcggcaatgcttgccgggattttattacgctttggtttacaggcgtttgccagtctggacggtcaatttacgttgtgtggaagtatgttgctggtatggctggcaaccaaggccgttgcgccgcgctatgcggtaattgccgcgatgattattgggatcgtgatcgttatcgcgcaaggtgacgttgtcacaactgatgttgtctttaaacccgttctccccacttatattacccctgatttttcgtttgctcacagcctgagcgttgcactccccctttttctggtgacgatggcatcgcaaaacgcaccgggtatcgcagcaatgaaagcagccgggtattcggctcctgtttcgccattaattgtatttactggattgctggcactggttttttcccctttcggcgtttattccgtcggtattgcggcaatcaccgcggctatttgccaaagcccggaagcgcatccggataaagatcaacgttggctggcagctgccgttgcaggcattttttatttgatcgcaggtctgtttggtagtgctattaccgggatgatggctgccctgcccgtaagttggatccagatgctggcaggtctggcgctgttaagtaccattagcggcagtttgtatcaggcgctgcataatgagcgtgagcgagacgcggcggtggtggcatttctggtaacggcaagtggattgacgctggtcgggattggttctgcgttctggggattaattgccggaggcgtttgttacgtggtgttgaatttaatcgctgacagaaaccgatattgacatcctccacgccctgaaggacgtggatccctgctacgttcaggctgtcgcctgaatcatttcggtgggttcctgcttcaacgggcggcctgactgcaccatctctccacaggcaagaacggcgtgccccgccgctaaaatgttacgagcg

SEQ ID NO: 83 - DNA, 22663 bp, Escherichia coli
  source 1..22663: mol_type = genomic DNA
aatatcgagttcgcacatcttgttgtctgattattgatttttcgcgaaaccatttgatcatatgacaagatgtgtatccaccttaacttaatgatttttaccaaaatcattaggggattcatcagtgtcgagtatacgttctgatgtgaaagcggatagcggcatctgtatcgctatccgccttatgaaaatcttattctcttcgcaggaggcggaatatgcccagaacgagaatagctcccaccaccgccaccaggaagctgtgcagattaaaaccactgatggagccgccaatgccaaacatggtcgccagccagccgccgaccaccgcaccgactatcccgagaatacaggtcaggaaaaatccaccaccatcacgccccggcatgattagcttggcgataatgccggctatcaggccaaaaataatccaggcaataattcccatgttcaggccctcgtttcgatgaatcggacgcaagaaatgcttacatcaacgctctaagtataggcaagggcgggatcgatgctgggcgtatgtcggctgatttaagaacagcatgtaaaaaatattcacacatttgtattaagttttgttaactgtgaccgataaaccaaagacagtttgtcagtcaggagtttttccgcgtgagtcattaccatgagcagttcctgaaacaaaatccgttagccgtcctgggcgtgttacgcgatttgcacaaagccgcaattcctttgcggctcagttggaatggcgggcagctgatcagcaaaatactggcaataaccccggataaactggtgctggatttcggcagtcaagccgaagacaacatcgccgtgctaaaggcgcagcacattaccattaccgccgaaactcagggtgcgaaagtcgagtttactgttgaacaactacagcagagtgaatacttgcagcttccggcatttattaccgtaccgcctcccaccttatggtttgtacaacgacgccgatatttccgcatctccgccccactccatccgccttatttttgccagaccaaactggcggataacagtacgttacgtttccgcctgtatgatttgtcgttaggcggcatgggcgcattactggaaacagcaaagcctgccgaattacaagaaggcatgcgcttcgctcagattgaagtcaacatggggcaatggggtgtttttcactttgacgcccagttaatctccatcagcgagcgcaaagtgattgatggcaagaatgaaaccatcaccactccccgtctgagcttccgttttcttaacgtcagcccgacggtggagcggcaattacaacggattattttctctctcgagcgggaagcccgggagaaagcggacaaagtacgcgactgatttacatcgcgtccagtgcctgctcaagtttgtagatatagcgcggagcctgcggcgcagggtgatttcgcgctacgtgttcgaggaactcgtcagcatccaaatcgttgattttgctgatcgcctttttccgatctgacgagaaagtccgtagcagcgcacctgccccgttagcgtatgacaccaccagcgcatattgcagtaccttcggatcttcaatgcctgccagcgggccggtttccagaatattcaggtaagccgcccccattgaaatattacgctctggatttttcagttcgctggtcgtcggctcaccactccagcccatacggcgataaacatcacgtccggaggttgaagcttttaactgcatcaaaccaatggcattcgatttactcaccgcgttcggattaccacccgattcgatagcgataatcgccgtgatcaattgtggatcgacgccccaggctgcaccggctttctggcttattggcatccactgcatcgcacgttgcaccggaactttcgcgttccacggcgggttcgtatagtcatgctttgatgaacaacccgctaataacacaatcaaaaaggcaaaccatctcaatttcacttcttctatccttatagcctggaatcgccgttgaggtgacaacggcacacctaagcggcatgatatacatttcgtttctgttgtcagcaaggaattgccatgtctctgtttcacttaattgccccatcgggttactgcattaaacagcacgccgcgctgcgtggtatccagcgccttaccgacgaggggcatcaggtcaataacgtcgaggttattgcccgtcgttgtgagcgttttgcgggtacggaaacggagcgtctggaagatctcaattcccttgccagactgactacccccaacaccatcgtgctggctgtacgcggcggttacggtgccagtcgtttactggcagatattgactggcaggcactggtggctcgccaacaacatgacccgttgctcatttgcgggcatagcgattttaccgccattcagtgcggtcttctggcgcaaggcaatgtcatcacctttagcggccccatgctggtagcaaactttggcgcggatgaactgaacgcctttaccgagcaccatttctggctggcgttacgcaataaaaccttcaccattgaatggcaaggggaaggcccgacatgtcagaccgaaggcacgttgtggggaggcaatcttgcgatgctgatttcactgattggtacaccgtggatgccaaaaattgagaacggtattctggtgctggaagatattaacgagcaccctttccgcgtcgaacgtatgctgttgcagctctatcatgcgggaattttgccacgtcagaaggcgattattctcggtagctttagcggcagcacgcccaatgattatgacgcaggttacaacctggagtcagtgtacgcgtttttgcgttcccgcctgtcgattccactcattaccggcctcgattttggtcatgaacaacgcacggttacgctgccgttgggcgcacatgccattctgaataacacccgggaaggcactcagttgacgattagcggtcatcctgttcttaaaatgtaaaaaaatcacgcttcagggctaagtaaaacgctgtctctgccgctaatatggtagggtttatataagagacagcgtaatcaggagtaaccgaccgttggatgccacaacaataattagccttttcatcttaggatccatccttgtcaccagcagtatattacttagttcattttcttcccgtcttggcattcctattctggttatttttctggcgatcggcatgctggcaggagtcgatggcgtcggcggtatcccgtttgataattaccccttcgcctacatggtaagtaacctggcactggcgattattttgctcgacggcgggatgcgcactcaggccagttcctttcgtgtggcgttaggaccggcactgtcgctggcgacgctgggcgtgcttatcacctctggtttaaccggcatgatggcggcgtggctgtttaatcttgatttgattgaaggcttattaatcggcgctatcgtcggctctaccgatgctgcagcggtcttttctctgctgggtggtaaggggcttaacgaacgtgttggctcgacgctggaaattgaatccggcagtaatgatccaatggcggtctttctgacgattaccctgattgcgatgatccagcaacatgaaagcagtgtcagttggatgttcgtggtcgatattctgcagcaatttggcctcgggattgtcatcggacttggcggtggttatttactgctgcaaatgattaatcgcatcgccctgcctgccggattatatccattgctggcattaagcggcggtattttaatttttgctttaaccacggcgctggaaggcagcggtattctggctgtttatctgtgcggttttctgctgggtaatcggccgattcgcaaccgctacggcatcctgcaaaatttcgacggcctcgcctggctggcgcaaatcgtcatgttcctggtgctggggctattggttaacccaagcgatctgctgcctattgccattccggcgctcattttgtcggcatggatgatattcttcgcccgtcccctttcggtatttgctggattgctccccttccgcggtttcaatctgcgtgagcgcgtgtttatcagctgggtaggattacgcggcgcggtgccaatcatcctggccgtgttcccgatgatggcggggctggagaatgcacgtctgttctttaatgtcgccttctttgtggttctggtttcactgctcttgcagggaacatcactctcgtgggcggctaaaaaagccaaagtggtggttccgccagtgggacgtccggtgtcacgcgttggcctggatattcatccggaaaatccgtgggagcagtttgtttatcaattgagtgccgataaatggtgcgtgggcgcggcactgcgcgatttgcatatgccaaaagagacgcgtattgcggcactgtttcgtgataaccagttgcttcatcctaccggcagcacccgactgcgcgaaggcgatgtgttgtgtgtaattggtcgggaacgcgatcttccggcgctcggtaaactgttcagccagtcgccgccggtcgcgctggatcaacgcttctttggtgacttcattctcgaagccagcgccaaatatgctgatgttgcgctgatatatggcctggaagacgggcgagaatatcgtgataagcagcaaacgctgggtgaaattgtccagcagttgttaggcgcggcaccggttgtcggtgaccaggtagagtttgccgggatgatctggacggtggccgagaaagaagataatgaagtgttgaagattggcgtacgggtggctgaagaggaagctgaatcttaaatttaatgaagcatctatcgccggttgcgatgctttgctgaacgcagcctgagcctgcaattgtttgtcgtccataatttaaccttcatttgatgttgaattgaacatatcaaaatcaggcaattacacaaatctatgtacaggctccatcaagggtaaagcgtgatttatctgaagtcgagttcgagtcaacaatgaagcgtaagcgttttatgtagaacgcctgtgcggtgagttcaggttccggggaaatagtgtccattcttttaatggacactatcatgggcaatggctctgtcacattaacaactacagttgctgaccagccggatggatgattttttcgcaaccagaagacgctgtctccgatccggcttacaacaagttacactgtcacaaccgggacgcgtaacgccagcgcgcacatcaactcatagcccaccgttccggcagcggcggcgacatcatcaattttgatctccttgccccacagctcaaccggcgtaccaatccccgcctgcgggcaaggcgttaaatcgaccgctagcatatccatcgagacggtccccaccgtcatggtgcgcacgccgtccactaaaacaggggtaccggtaggcgcgtggcgcggataaccgtcggcgtaccctgcggcgacaatgccgattcgctgttcatcgcgcgcagtatagcgaccgccgtagcccacacgctcacccgcttttagcgtctggacaccaataatctcactgcttagcgtcatcaccggacgtaatccggtattggcgatatcacgccactgaccggacggcgaagcgccatacaaaataatgccaggccgaacccagtcaaaatgcgcttccgggtgccacagagtcgccgccgaattggacaacgaacgccgacactccagcccttccgccgcctgctcaatacgcgccatcgcgctggaaattccatcaggatgttccgcttcggcaaaatgcgacatcagggtcatctcgccaacattcgccattgcccgcaactgctgccagacggtaagcacgcgatcgggctggaagcccaaccgattcatcccactgttcactttaagataaatatccaacggtgcttttagccgcgcattttgcagtgctttgagctgccagttgctgtgtacgcaggtggtcaggcggtgctggtcataaatctccagatcctgagcatggaaaaatccttccagcatcaggatcggccccttccagccgcgctcacgtaacgttattgcctcttccaggttaagtaatgcaaagccatcggtggccccgagcgcgctccagatacgctcaataccatgcccgtaagcgttcgcttttaccaccgaccagacgcgcgcgtgcggcgcggcctggcggacaatggacagattctgttttaatgcctgcagatcgaggctggcctgtatcggacgggtcatctcgtttccttagctgtgtgcgccatgtaaatggcccggacgtgatggcgtaaatccacggctgtagcgcgctacgcttagatcctcatatgggatcgctggcgtgcgaccagagagcagatcgcttaacaactgaccggaaccgcaagccatcgtccagccgagcgtgccgtgaccggtattcagccacagatttttaaagcgtgtacgcccgacaaccggcgtaccgtctggcgtcatcgggcgcaaacccgtccagaaagtcgcctgctcgacatgaccgccgcgtggatagagatcgcgaaccaccatttccagcgtttcacgacgcggttgcaacagctcggtgttaaaaccaacaatttccgccattccgccaacacgaatgcggttatcgaaacgggtaatggcgattttgtaggtttcatcaagaatggtggatactggcgcaccatcttcctgcgcaattggaatagtcagcgagtagcctttcagcggatacaccggaatatcaacaatgcctttgagcatcgccgtcgagtaagaaccaaacgccatcacatacgcatcggccttaatcacttcatcgccacacttcacgccgtagatttgctcgccgtcgcaaagcagttggtcaacgggcgtattaaagcggaatttaacccccgcctgctctgccatccgcgccagattctgggtaaacagctggcagtctccggtttcatcattgggcagttgcagaccacccgtcagtttgtgcgctacttctgccagcgcgggctccacttccgccaggcggctggattccagcagctgatacggtacgccggcatcttccagcacggcgatatcgcgggtcgcattttcatactgttgttcggtacggaacagttgcagcgtcccaccctgacgcccttcatactgaatattggtttcggcgcgcaatgctttcaggcaatcacggctgtattccgccagacgcaccatccgccctttgttttccatgtagtggctggtgtcgcagttacgtaacatttgccacatccatttcaactggaactgcgtaccgtcgagacgaaccgccagcggcgcatggcgctggaacatccatttaatcgcttttaaaggcacacctggtgccgcccacggtgcagcatatccgggggagatttgcccggcattcgcggcgctggtttccagggcggcccccggctcccgatcaatgacggtgacctcatgtcctgcctgatttaagtaccaggcgctggcaacgcctaccacaccacttcccagtatgacaactcgcatagccactccgataacggtagatacagtaaaagaataataatctaattacatcttgataactcagttgaaaatattattcaacatacggcttttttatggtgagctggctcacatctccctgactctgcggcaatatggcgtctttagtatctcctgctgaacgccctttttatccagcataaaattccgttcagaagcggattagtggcactctgataataagaaatcgcaaagaaaaaaattctccggcgacgcggtttttaacaggtgttctatgcttgaaatgaggtgctccacacagagagcgccgacaacaatgaggtgcgcgtatggcgacgatcgattctatgaataaggacaccacacgtttgagcgatggacccgactggacgttcgacctgctggatgtttatctggcagagatagaccgggtggcgaaactctaccggctggatacctacccgcaccagattgaagtgataacctcagaacagatgatggatgcctactccagcgtcggcatgccaattaactatccgcactggtcattcggtaaaaagtttatcgagactgaacggctgtataagcacggtcagcaaggactggcctatgaaatcgtcattaactctaacccgtgtatcgcttacctgatggaagagaacaccattaccatgcaggcgctggtgatggcacacgcctgctatgggcataactctttctttaaaaacaattacttattccgcagttggaccgacgccagttcgattgtcgattatctgatttttgcccgtaaatatattaccgagtgcgaagaacgttatggcgttgatgaagtagaacggcttctggactcgtgccacgcgctgatgaactacggcgtggaccggtacaaacgcccgcaaaaaatctcgctgcaagaagagaaagcccggcagaaaagtcgcgaagagtatctacaaagtcaggtcaatatgctctggcgtaccctgccgaagcgcgaggaagagaaaacggttgctgaagcgcgccgctatccgtccgaaccacaagaaaacctgctctattttatggagaaaaatgcgccactgctggaatcatggcagcgtgaaatcctgcgtattgtgcgtaaggtgagccagtatttttatccgcaaaaacagactcaggtgatgaacgaaggctgggcgaccttctggcactataccatccttaaccatctgtatgatgaagggaaagtaacggaacgttttatgctggagtttttgcacagccacaccaatgtggtcttccagcccccctataacagcccgtggtacagcggcatcaacccatatgccctcgggttcgccatgttccaggatattaaacggatttgtcagtcgccaacggaagaagacaaatactggttcccggatatcgccggttccgactggctggaaacgctgcatttcgcgatgcgtgatttcaaagatgagagttttatcagccagtttctgtcaccgaaagtgatgcgtgatttccgcttcttcaccgtgctggatgatgatcggcataattatctggagatttccgctattcataatgaagaaggttatcgggagatccgtaaccggttatcgtcgcaatataacttaagtaatctggagccgaatattcagatctggaacgtggatttgcgcggcgaccgttcgctgacgctgcgttacattccacataatcgcgcaccgctggatcgggggcgcaaagaagtgctgaagcatgtgcatcgcctgtggggatttgatgtgatgctcgaacagcaaaacgaagacggcagcatcgagttgctggaacgttgcccgccaagaatgggaaatctgtaaaaacaacaaaaaacccctcgtttgaggggtttgctctttaaacggaagggattatcgcccctgaatggctaaatcacccggcagatttttctgcatccggtgccaaatctcgccactctcatgcccatagcgacgcactgtttcgtacacctgatcgtgcgcgccttcactgcacaacgccgacagtttgtggtagaagcccagcgccagactgcgcgcttccggattggcgaaatagtgacgaccaatgcgcgtatacagccctttcatcccgttaaggatcagaccgtaaatcgggttgccggaagcaaacgccaggccgcggaatatgttgtaatccagctcggcaaaggcatcggcgtgatcggccacttcattagcggtagccagcacttcctgcgctttatcgggatgctgacgaaacgcggtgcgaataaaaatagtggaaatattggtacgcaccgacagcaaattatcaataagctgcggcacactttcgtgatccagtcgcgccagtgtttcaaggatatttaaaccagaggtttcccagaaattattcaccttcgtcggcttgccatgttgaatggtcaaccagccatctcgtgccagacgctgtaacacttcacgtaacgtagtacgcgttacgccaattaattctgaaagttcacgttctgcgggcaaaatagtcccgggagggaagcggttattccagatactttcaataatgtactcttccgcgaaacccgccgggctttgcgccttaatgaccatagtgagatttccataacacagcaaaacaaagttggactcatcataccagagggctaactacgctgatagcagacaaaaagaagaaaaaagggatcaaggcttcattttccgcatctctttccccttgactatcaagacttgcctcactcctgcctgaccgttaagctttgcgtttaaacataaaaacatcattgattatttgtaaggtaagggaaaccatcatggagatctcctggggccgcgcgctatggcgcaattttttgggccagtcccccgactggtacaaactcgccctcatcattttcttaatcgtaaacccgttaattttcctcatcagccctttcgtcgcgggctggttgctggtagcggaatttattttcactctggcgatggccctgaaatgctacccgctgctccccggtggtctgttggctatcgaagcggtattcatcggcatgaccagcgcggaacacgtccgtgaagaggtggcggcaaatcttgaagtcttgctgttattgatgtttatggtggcgggtatctattttatgaaacagctgttgctgttcatatttacccgtttgctgttaagcattcgctccaaaatgctgctgtcgctctctttttgcgtggcggcagcgttcctctccgcgttcctcgatgccttaaccgtcgtggcggtggtgatcagcgttgctgtcggtttttatggtatttatcaccgcgtagcctcttcccgtaccgaagataccgacctgcaagacgatagtcatatcgacaagcattacaaagtggttctggaacagttccgtggctttctgcgtagcctgatgatgcatgccggtgtcggcactgcattaggcggcgtgatgaccatggtgggcgaaccacagaacctgatcatcgctaaagcggctggctggcattttggcgatttcttcctgcgcatgtcgccggtgaccgttccggttctgatttgtggcctgttaacctgcctgctggtagagaagctgcgttggtttggctacggtgaaacgctgccggagaaagtccgcgaagtgttgcaacagtttgacgatcaaagccgccaccagcgtacccgtcaggataaaatccgtctgattgtccaggcgattattggcgtctggctggtgactgcgctggcgttgcatctggcggaagttggcttgattggtttgtcagtcattattctggcgacatcattgaccggtgtcaccgatgaacatgctatcggtaaagccttcaccgaatctctgccattcaccgcactgttgacggtgtttttctcggtagtcgcggtgattatcgaccaacaactgttttcgccaattattcagtttgtgttgcaggcatcggaacatgctcagctgtcgctgttctatattttcaacggtctgctgtcatccatttcggataacgtcttcgtggggacgatttatatcaacgaagcgaaagcggcaatggaaagtggcgctatcacgttgaagcaatacgagctgctggcggtcgccattaataccggtaccaatctgccctccgtcgctacgccgaacggtcaggctgcgttcctgttcctgctgacctctgcactcgcgccattgattcgcctctcttatggccgcatggtgtggatggccctgccttacaccctcgtactgacactcgtcggcttgctctgcgtcgagtttacgcttgcccctgtaaccgaatggtttatgcaaatgggctggatagcaacgctttgataacaacttaccgggcatataaatgcccggtttgccttttcgcccgataattgtccaattgcttcctatttttgctgcctcctggtggcgcagcgaatgaattggtttaaactgcgcactctatgcatattgcagggaaatgattatgttgcgatttttgaaccaatgttcacaaggccggggcgcgtggctgttgatggcgtttactgctctggcactggaactgacggcgctgtggttccagcatgtgatgttactgaaaccttgcgtgctctgtatttatgaacgttgtgcgttattcggcgttctgggtgctgcgctgattggcgcgatcgccccgaaaactccgctgcgttatgtagcgatggttatctggttgtatagtgcgttccgcggtgtgcagttaacttacgagcacaccatgcttcagctctatccttcgccgtttgccacctgtgattttatggttcgtttcccggaatggctgccgctggataaatgggtgccgcaagtgtttgtcgcctctggcgattgcgccgagcgtcagtgggattttttaggtctggaaatgccgcagtggctgctcggtatttttatcgcttacctgattgtcgcagtgctggtggtgatttcccagccgtttaaagcgaaaaaacgtgatctgttcggtcgctaatccattcggcgctcctgcgggagcgcttttttcctgccgctatatttatttgacccgcagtaaatcagaacttcgcgttgtataacgtggtgaaagcatggctcgcttcatctgccattgttgctggctcccctgcccggcaaaatagagtgttcctctgccctctttagcattcagtgtatccattaccgtcatcaattgctcactcccggggcgcggtgcgttgtcatcgaataaattgagctgcgcgactccctgactgaagaaatcccccagcatcacgcccgctttttggtagcgatggcccgcttgccagatggcatccagagatcgcgtagcagcgttaatgatatccctgctgtcctgagtgggcgtcagcagttttaccgacgcgctattgccgtaataaggttcattgagcgcaaatggtgacgtcttaataaatgtggagataaaccgacaatattgatgctcgctgcgaagtttttccgccgcccgggcagcgtaactacaaatggcctgccgcatcgatggataatccgtgatgcgttcaccaaacgagcgggaacagataatttcctgcttcgtcggtgcaaactcttccagttgcaaacagggttcgccgcgcagttcacgcaccgttctttcgagcacgacattaaaatgtttacggataaaccggatatctgtatccgccaaatcgagaacggttttgatccccatcgcgtccagttttttgctgatccgccgtccaatcccccagacttcatccacggggagagcagacattaatttacgctggcgttccagatttgataaatccaccaccccacccgtctgccgctgccatttttttgccgcatgattggcaagcttagccaacgttttggtctgggcgatccccacaccaacagtaagatgggtacgttgtagcaccgttgcgcgaatttctctgccaaaatcagtcagatcgcgacaattacgcacacctgtcagatcgcagaatgcctcatcaatactgtaaatctcgacgcggggcgatagttcttccagcgtcgacatcacccgattgctcatgtctgcgtaaagctcataattgctgctaaagcaaaccacgccacagcgacgaaacagatctttttgtttgaaccagggatcgcccattttaacacccagcgcctttgcctctgcgtttcgggcgataacgcaaccgtcattattcgatagcacaaccaccggtttaccccataaatcagggcgaaacaccgtctcacagctggcataaaacgcgtttacatcacagagagcaaacatcagcgcatcgccttaacgacgtggatcaccacaccaaagacatccagcgtatcttcgctactgatggtaatgggcgagtacgcactgttcatgggaataagctgtaccgtcgggcgtagttgcaattttttcaccgtaaactcgccgtcaacagcagcgatgacaatatcaccatggctggcggtaatagcgctatcgacaatcagtaaatcaccgtcactaattccaccatcaatcatagaatcaccacttgctttgacgaagtaagtcgcgctgggatgctggatcaacagttgattcagatcgatgcgctgttcaacgtaatctgctgccggtgaaggaaagccacactgaacaagatcgctaaatagcggaaaagtcacaatttcgcggagatccgcaggcttgataaacaacataataatctgcctgaagttatactgtttttatatacagtagtctgttcttgccagcagatcaatactgattcaggctatcaatatttgtcgctgcatagactgctgatttttcgttctcttatcctgtgctcacgtggccttctggcgacgacgctcatccagcagaaatgaaaaatatcacccggcaaaaaaatagaatagaagcattcgccataatgacattaaacattgtttgatatttatcatattaatagaaataaagacattgacgcatcccgcccggctaactatgaattagatgaagtaaaatttattaatagttgtaaaacaggagtttcattacaatttatatatttaaagaggcgaatgattatgactgaaatcgttgcagataaaacggtagaagtagttaaaaacgcaatcgaaactgcagatggagcattagatctttataataaatatctcgatcaggtcatcccctggcagacctttgatgaaaccataaaagagttaagtcgctttaaacaggagtattcacaggcagcctccgttttagtcggcgatattaaaaccttacttatggatagccaggataagtattttgaagcaacccaaacagtgtatgaatggtgtggtgttgcgacgcaattgctcgcagcgtatatttttctatttgatgagtacaatgagaagaaagcatccgcccagaaagacattctcattaaggtactggatgacggcatcacgaagctgaatgaagcgcaaaaatccctgctggtaagctcacaaagtttcaacaacgcttccgggaaactgctggcgttagatagccagttaaccaatgatttttcagaaaaaagcagctatttccagtcacaggtagataaaatcaggaaggaagcgtatgccggtgccgcagccggtgtcgtcgccggtccatttggattaatcatttcctattctattgctgcgggcgtagttgaagggaaactgattccagaattgaagaacaagttaaaatctgtgcagagtttctttaccaccctgtctaacacggttaaacaagcgaataaagatatcgatgccgccaaattgaaattaaccaccgaaatagccgccatcggggagataaaaacggaaactgaaacaaccagattctatgttgattatgatgatttaatgctttctttgctaaaagaagcggcaaaaaaaatgattaacacctgtaatgagtatcagaaaagacacggtaaaaagacactctttgaggtacctgaagtctgataagcgattattctctccatgtactcaaggtataaggtttatcacatttaaaaacacagacgttttttaaagattgagagttacctgttgataataaggtatcgggtaactctcattatgacagagcgctttcaaaaacagggctacgaaatggcgagcatccagacgtatattaagaaagcccccatcaacatctattaaatttatcactgcgcccagtcaggtttatttaagatatgatcctgccagtcaatcacttctgattctttcactgcgatatgacgcacagagatacgttcaccatgcattgccgctttcgaacccgtaagtagcggatgccacgcaggtaaatctttaccttccgccagcaaccgataagcgcaggtcattggcagccattcgaatgttggcagattttcacgggttaatttaatgcagtcgggttcaaactcgaaacgacgttcgtagttccgacattgacaggttttaatattgagctggcgacaggcgacgttagtgaagtagatttcgtcggtgtcttcatccatcagtttatgcaggcaacactgaccgcaaccatcacacaacgactcccattccgcatcgctcatttcgtccagggttttactttgccagaaaggtacatcgctcatcaggtgttccgccattacgttaaaacgcaccttataaccagtctggcacagcgatgcaagttttgccgccgctttcaggcggcaaaaagtattacaaaacgcgagttgccaaagaatgcccatcgaaagtgactgtcagctcatcaccgcttttcaacgggccgacgccatcaggcgtgcctgtcagcacaacgtcaccggccttgagggtaaaaaacttgctcatataagcgatcagcggaacaattttatggatcatgtccgcagtcgtaccttgctgacgttgctcgccgtttacgctcagacccagcgttgtattttgcgggtcgccggtaaattccgccgcgggaataaacccggaaagcggacaagagttatcaaacgctttagccttttcccacggctgcccggctttcttcatttttccctgaacatcacgcaatgtcagatcgagcgccacgccataaccggcaatggctttgcggacatgctcttccgtagcctgacgcagcgtcgcgccaatcaacaccgccagttcgacttcatgatgaactgaaccgaaatcggatgggatcgccaatggctgccgcagatcgcacagtgccgtttctggtttaataaacagcactggctcttcgggcactgcgctgcccatctctttaatatgtttggcatagttactgccaacacagactactttactcaccggataatccagcagcgcaccttgccagttgtgatgttgatacataacgttcccctcaccttatcgtggatatgaaaacccgcgccgacaaagataatgccaccgccggatatcggttatttgttagtgtcgtctgttttctgccccatgacggaaagatgttgcttcagcaaatcttcgggtggtggcggtaactgcaaatagtaaccttgctcggttaatgccagtttaaccttttcaatatcagcattgaccagtttcttccgcccatccaacggcagaatcatcgctaactgaggctgaccaaaacctttcatcagttcctcaggaacacgcgaaaaatcgtcttttttttcgacatataaataggtctggtcacgcttgctgcttcgataaatcacacaaaacatacttttactctttaagatgccaggttttggcataagctaacatcaatgaaacccgcgccacaagccagccagctgtagatttctgcggtttgttgagtccatgcccctttataagtaatccccccggcaaaaaatgccgcgccgggattttaccgaacgcagaaaagccactggaattctcccgtaagggattgttatattataacagttcatcgtactcattctgaacaggagactaccaatgaaaatcaagagcatcagtaaggctgtattgctgcttgcactgctaacctccacgagctttgctgcgggtaagaatgtcaatgttgagttcagcaaaggccatagcagcgctcagtactccggcgaaataaagggatacgattacgatacatataccttctatgccaaaaaaggtcagaaagtgcatgtgagtatctctaatgaaggcgctgatacttacctcttcgggccaggaatcgatgattcagttgatttatccagatattcaccagaactcgatagtcacggacaatactcactccctgcttctggcaaatatgagctgcgagtgctgcaaacccgaaacgacgcccgtaaaaacaaaactaaaaaatataacgtcgatattcaaattaagtaaatgtcaaccgacggggactctccccgtcataaacgttaacgccccactcctctctgtcgctcaagaggttaatgacgaatagcagacaatgccgaatagaacataatgtaaacaaggcatcactcacgacacataaataacatctttgtggtgatttgattgatttttccactccgcttaccatccacaccaaaataacgatcatcacgacataatttttctttaacatcgcaaaatacaccgttagcgaatgtaaattcgctgggatcgtagccttgtaatgattgtaagttttcagcggctttttcgccgagatatttccttgttaactctggggaaatgccatctgagttcacacaaatatacgggtcgcaaacaacgccgcacgccggagattgaagtccgccagcatcatgtccagacgccattgatgagaacatcatccccacacctgacaatccgatataaaaaatacgcatcatattcatagcacatcctgataatccaaccgtacaacacttatgctcatttcatcatcaatccgtaatcaaaaccgctgacctggacgagttacgatgacctgacagaagtatcagacgtcttctgcggtttctatgatagagcaattctgtggcggatattaagataacgggtatctgttctttaatgatgctgcaaaaaatggaaagttaagaaagcctggcgtggtgaaaaaatacacttgcctcaatactggatatttaaacaggtctggagatgctgtcacgattaggatgcggaaaaaggaagcgtaaataagaagaatcaaaagtacggcggcaatgggttgattgacaagggtattttttaagctatgaatcagcgccatttatcacagaatagacttttactctgaataaatgggagggtgacttgcctcaatataatccagactataacatgccttatagtcttcggaacatcatcgcgcgctggcgatgattaatagctaattgagtaaggccaggatgtcaaacacgccaatcgagcttaaaggcagtagcttcactttatctgtggttcatctgcatgaggcagaacctaaggttatccatcaggcgctggaagacaaaatcgctcaggcccccgcatttttaaaacatgcccccgttgtactcaacgtcagtgcactggaagacccggtaaactggtcagcgatgcataaggcggtttcggcaaccggtttgcgggttattggcgtaagtggctgcaaagatgcgcaacttaaagccgaaattgaaaagatggggctgcctatcctgacggaaggaaaggaaaaagcgccgcgtccagctcccgcaccacaggctccagcgcataatacaacgccggtcacaaaaacgcgtttaatagataccccggtgcgttccggtcagcgtatttatgctccacaatgtgatctgattgttacaagccacgttagcgctggggccgaattgattgccgatgggaacattcatgtctatggcatgatgcgcggtcgtgcgcttgcaggggcaagtggtgaccgggaaacgcaaatattttgtacgaacctgatggcggaactggtgtccatcgcaggtgaatactggctgagtgatcaaatcccagcagaattttatggcaaagcggcgcgactgcagttagtcgaaaacgctttgaccgttcaaccgttaaattgatccctttttaacaaggaatttctatggcacgcattattgttgttacttcgggcaaagggggtgttggtaagacaacctccagcgcggccatcgccactggtttggcccagaagggaaagaaaactgtcgtgatagattttgatatcggcctgcgtaatctcgacctgattatgggttgcgaacgccgggtcgtttacgatttcgtcaacgtcattcagggcgatgcaacgctaaatcaggcgttaattaaagataagcgtactgaaaatctctatattcttccggcatcgcaaacacgcgataaagatgccctcacccgtgaaggggtcgccaaagttcttgatgatctgaaagcgatggattttgaatttatcgtttgtgactccccggcagggattgaaaccggtgcgttaatggcactctattttgcagacgaagccattattaccaccaacccggaagtctcctcagtacgcgactctgaccgtattttaggcattctggcgtcgaaatcacgccgcgcagaaaatggcgaagagcctattaaagagcacctgctgttaacgcgctataacccaggccgcgtaagcagaggtgacatgctgagcatggaagatgtgctggagatcctgcgcatcaaactcgtcggcgtgatcccagaggatcaatcagtattgcgcgcctctaaccagggtgaaccggtcattctcgacattaacgccgatgcgggtaaagcctacgcagataccgtagaacgtctgttgggagaagaacgtcctttccgcttcattgaagaagagaagaaaggcttcctcaaacgcttgttcggaggataagttatggcattactcgatttctttctctcgcggaagaaaaacacagccaacattgcaaaagaacggctgcagattattgttgctgaacgccgtcgcagcgatgcagaaccgcattatctgccgcagttgcgtaaagatattcttgaggtcatttgtaaatacgtacaaattgatcctgagatggtaaccgtacagcttgagcaaaaagatggcgatatttctattcttgagctgaacgtgaccttaccggaagcagaagagctgaaataagcccgctgtaaaaacgcatttatcttcaaggcagagtcatttctgccttgagtttttcatccctctcatccacgttgtggtaaagcggcgagtattcttgctgatactcctcattgctatttccacctccccctttacaccttaaggctgttcccacgcacagaacaaaatgtttatgcctggttgagtaaataaccctgttgttagtatggatatactgggagatgataaccccgcaatttcattattcattgttcccccataggatgaggtttcccgccgtaactggcgggctttttttgccccagaattttctctttcaacatcctgtaaacgaaaactgcgccgaagcgcagtttaatcgttgatggtcagaacgaccagttcacaccagccaccgcgttccacggggactccacaccggcaccatggctataccccaccccgaaatgcccgcttaacgtactgctgaatgaggctttaatacctgcctggtatattccacgtctgcccgacaaatcattgacaaaattaccgtcactattcactttcacccgattatcatcgacaaattctttgcgcacagccgccttcaggcagggttcaatttccataccgttccccagacgcatgttgtaactcagcgttgcacccagttcacgatatatactgcgggtatcgactgatttcgattccatgccattggataaatgatagtagcgtctaagtgacctaagctctgctgcaacatcagcccgcaggcaccagaccaggggattcatcctgaagagacagcgcaggtgtattgtgttcaccgctcaccaaagacatcatgatgaaatgatgatatcccgcataagaaagaggcattttttacacgcagtgcgctgaagtgtagttggataaaaaatcactcttttcagataatactgtcgtacgcttatctttcgacaatgaggccgtcggcaaaataaaatgactaatgtaatcgttgctgatgaatatcttctgctcacataaaaatcacacaataatattgataaatcagattatcttacctttacaacattgcgttaacagtcaatgacacttcttgaataaaaatattgtcaatcaatgagttattcctcatttaagattattctcattcacgtaaaaaacataattcctatcatcacagccacgctcattttgaattatctgaataatagcgagcgttctttagttaagcagatcttaattgaagacgaaattattgtgtgtgcaacttacttaataccggacatctaagttgaagaaaaaaatacttgccttcgggcttatctcagcattgttctgctccacgccagcgatggcggatatgaaccgcaccacgaaaggtgcattgctaggcgcaggcgttggtttacttactggcaatggtgttaatggcgtactgaaaggtgcagctgttggcgctggtgttggtgcagtaacagaaaaaggccgcgacggtaaaaatgcgcgtaaaggtgcaaaagtgggtgccgccgttggtgctgtcactggcgttctgaccggcaatggcctcgaaggggcgattaaaggtgccgtgattggcggtacgggtggtgcaattctgggtgatgctgccaacttactgatttagtgtatgatggtgtttttgaggtgctccagtggcttctgtttctatcagctgtccctcctgttcagctactgacggggtggtgcgtaacggcaaaagcacc

SEQ ID NO: 84 - DNA, 21468 bp, Escherichia coli
  source 1..21468: mol_type = genomic DNA
tttacgcacctcttttcctaacaaaacgccagccatctcaaaattagaactagtgttagacatatatccaagcctatctcttattttaagatacatctactgtctggtatttcagggggccagctcactgtgacagctggcagccttcgtttaacttcacttaatctggctcttgggggcttaccgaacagatgacgtacatacgcccgttcaattttccatcacttattgtaatgaacacctataaccattttgtgcggcatgttaatccattaaaatttcttactgattggcaaatcatcttcaatgacagctcattatagttttatatactatcccttacccttaaaacttgtttttttactagtccatcacacagcgcattaagactattcctaacacttcagggcaaagttcctgaccaatataaaatgcaagtaagaattgaacgttatattgccaataaccttatgaaaccaaatgtctttttcttcttatcaaaaaagcaatattttcagtttttctaaatattgacttaaccattgaattccttttccgttcacatattgacactcatcgggaaaaaaacataaatttaagcccaatcgaaaataattaaacttaatcttgtttaacctttattgatatgtgctacgtatcttatttacttccggtttactaaggaaactgaatgcacctgtaaaaattataggtttggaaagtagtgacatggcaaagtgattacagcagggactatgaggttaaaaaccatatggaatgtcaaaaccgttctgataaatacatctggtctccccatgacgcctacttctataaaggactatctgaactgattgtggatatcgacagattaatttatctatcgttggagaaaattagaaaagatttcgtgtttatcaatctcaatacggattctttatctgaattataaaccgtgataatgaatggttatccgcggtaaaggggaaacaggtcgtattgattgcggccagaaagtcagaagccttagcaaattattggtattacaatagcaatattaggggcgtggtatacgctggactgagtcgtgatattagaaaagaactggcctatgtgattaatggcaggttcctgagaaaagatattaagaaagataaaatcacggaccgggaaatggaaattatccgcatgacggcccagggaatgcaacctaaatcgattgccagaattgaaaattgtagtgtgaagacagtgtatacccatcggcgtaatgctgaggccaagctgtactcaaaaatatataagttggttcagtaaactccaggcaagttagttttaaaaaatgactcactgggacatcacgtcctcaattcaactcgggaagaaatgcaatgaaaaaaaaggttctggcaatagctctggtaacggtgtttaccggcatgggtgtggcgcaggctgctgacgtaacagctcaggctgtagcgacctggtcggcaacagccaaaaaagacaccaccagtaagctggttgtgacgccactcggtagcctggcgttccagtatgccgaaggcattaaaggttttaactcacagaaaggtctatttgacgtggctatcgagggtgactcaacggctaccgcctttaaactgacctcacgtcttatcaccaacacattaacccagttggatacctcaggttccacactgaatgtgggcgtggattataacggcgcggcagtcgaaaaaactggcgataccgtgatgatcgataccgccaacggcgtactgggcggcaaccttagcccgctggctaacggttacaatgccagcaatcgtaccaccgcacaggatggtttcaccttcaccatcatcagcggcaccaccaatggtaccaccgcagtaaccgattacagcactctaccggaaggcatctggagcggcgacgttagcgtacagttcgacgcgacctggaccagttaatctctctgatgtaccagcaggggtagcccccctgctttattcctggacggaattgttatgaaaaagcaccttctgcctctcgctctgctgttttccggaatatctccggcccaggcgctggatgtcggcgatatatcatcgtttatgaacagtgacagcagcacgctgagcaaaacgatcaaaaacagtaccgacagtggtcgccttatcaatatccgtctcgaacggctctcttcaccgcttgacgacgggcaggttatctcaatggacaagccggatgagttgctactcactcccgccagcttgctgctacccgcccaagccagcgaagtgatccgcttcttctataagggacccgcagatgaaaaagagcgctactaccgcattgtctggtttgatcaggccctcagtgatgcgcagcgcgataatgccaaccgcagcgctgtggccactgcttccgcccgcatcggcaccattctggtcgtcgcccctcgtcaggcgaactaccactttcagtacgccaacggctccctgacaaatacaggaaatgcgacgctgcggatcctcgcctacggaccttgcctgaaagccgccaacggtaaggagtgtaaagagaattactacctgatgccgggcaagtcgcgtcgttttacccgcgtggacactgcggataacaaaggacgggttgcactttggcagggtgataagttcattcccgtgaaatagatagctgtgcagatggataacgacaatgcctttacgacggttctccccaggactgaaagcccagtttgccttcggcatggtctttttgttcgttcagcccgatgccagcgctgctgacataagtgcgcagcaaataggtggggtgattattccgcaggccttcagtcaggcgcttcaggacggcatgagcgtcccgctctatattcatctcgccggtagccagggtcgccaggacgatcagcgaatcggcagcgcttttatctggctggacgatggacagctacgcatccggaaaatacagctggaagagagtgaagataacgccagtgtcagcgaacaaactcgacagcagctgatggctctggcgaacgccccgttcaatgaggcccttaccatccccctgactgacaacgcgcagctggatctcagcttgcgccaactgctgctgcagctagtggtcaagcgcgaagcgctgggcaccgtactacgctcacgtagcgaagacatcgggcagtccagtgttaacaccctcagcagtaatctgagctataacttgggcgtctataacaaccagttgcgtaacggcgggagcaacacatccagctatctgtcgctgaataacgttactgcgctgcgcgaacatcatgtggtgctcgacggctcgctgtacgggatcggtagcggtcaacaggacagtgaattatataaagcgatgtatgaacgcgattttgccggtcaccgatttgccggtggaatgctcgacacctggaacttgcagtccttagggccgatgaccgccatttcagcagggaagatttacggcctttcctggggaaaccaggccagctccaccatcttcgacagcagccagtcagccacgccagtgatcgcctttttaccggcggcgggcgaagtacatctcacccgtgatgggcggctactaagcgttcagaacttcactatgggcaatcatgaagtggatacccggggtctaccgtacgggatttacgatgtggaagttgaggtgatcgttaacggtcgcgtgatcagcaaacgcccccagcgggtcaataagctgtttagccgggggcgcggcgtcggtgcaccactggcgtggcaggtatggggcggtagctttcatatggatcgctggtcggaaaacgggaaaaagacgcgaccagctaaagagagttggctagcaggtgcctcgacctccggctcattgagtacgcttagctgggcggcaacgggatatggatacgataatcaggcggtgggtgaaacccgtctgacgctgccgcttgggggggcgatcaacgttaacctgcaaaatatgctggccagtgacagctcatggagcagcatcggcagcatcagcgccactctaccgggaggctttagttcgctgtgggttaaccaggaaaaaacccgcattggcaatcaattgcgacgtagcgatgccgacaaccgtgcaatcggcggcacactcaacctgaactcactgtggtcgaagctgggcacattcagcatcagctacaatgatgaccgccgttacaacagccattattacacggcagattactatcaaaatgtctacagcggtacctttggttcgcttggcctgcgggccggtattcagcgctataacaacggcgacagcaacgccaatacagggaaatatatcgctctcgatctctcgctaccactgggcaactggtttagcgcagggatgactcatcaaaacggctacaccatggcaaacctgtcagcacgcaaacagtttgatgaaggaaccattcgcactgttggtgccaatctgtcacgtgccatctccggcgataccggtgatgacaaaaccctcagcggtggggcgtatgcacaattcgacgctcgttacgccagcggaacgctgaacgtcaatagcgcggcggacggctacgtcaataccaacttgaccgccaatggcagcgtcggctggcagggtaaaaacattgctgccagcgggcggactgatggcaacgctggggtgatattcaacaccgggctggaggacgacggtcagatcagcgccaaaatcaacgggcggattttcccgcttaacggcaagcgtaactatctcccgctctctccctatggaagatatgaggtggagttacagaacagcaaaaactcactcgacagctacgatatcgtcagcggccgcaaaagccatctgactctctatccaggcaatgtcgctgtcattgagccagaggtgaagcagatggttaccgtctccggtcgtatccgtgcggaagacggcacactgctggcaaacgcacggattaacaaccatatcggccgaacccgaaccgatgaaaacggcgagtttgtcatggatgtggacaagaaatatcccactatcgattttcgctacagtggcaataaaacctgcgaagtggcactggaactcaaccaggcgcgcggtgccgtctgggtcggtgatgtggtctgcagcggcctctcatcgtgggcggcggtgacgcagacaggagaagagaatgagagttaacctactgatagcgatgataatatttgcgctaatctggcctgcaaccgcgctcagagctgcagtgagcaaaacaacctgggcggatgcaccggcacgcgagtttgtgtttgtcgaaaacaactcagacgacaactttttcgtcacgcctggcggggcgctggatccgcgcctgaccggtgccaaccgctggaccggtttaaaatacaatggttcaggaaccatctatcagcaaagcctcggctacattgataacggttacaacaccggcctctataccaactggaagtttgatatgtggctggaaaattcgccggtttcatctcctttaactggcttacgctgcatcaactggtacgcagggtgtaatatgaccaccagtcttatcctgccgcaaaccaccgacgccagtggattttatggcgcgacggtgaccagcggcggcgcgaagtggatgcacggcatgttgtcagacgcgttttaccagtatatgcaacaaatgcccgtcggcagcagctttacaatgaccatcaatgcctgccagacctctgtgaactatgacgccagcagcggcgcacgctgtaaggatcaggcctccggcaactggtatgttcgcaacgtcacccatacgaaagcagcaaatctgcggttaataaatacccactctctggcggaggtatttatcaacagcgacggagtaccgactctgggcgaagggaacgccgactgccggacacagaccatcggcagcctttcaggattaagttgtaagatggtcaactataccctgcaaacaaacggactcagcaacacctcaatccatatattcccggcgatcgccaactcgtcgttagcctcggccgtcggggcgtacgatatgcagttcagtctgaatggcagttcatggaaaccggtgagcaataccgcctattactacaccttcaacgagatgaagagcgcagactcgatctatgttttcttctcgagcaacttctttaagcagatggtgaacctggggatcagcgacatcaacaccaaggatctgttcaactttcgctttcagaacacgacatcaccggagtctggctggtatgaattttctacctccaacacgctgcttatcaaaccccgtgatttcagcatcagtattatctccgatgaatatactcagacaccgtcgcgggagggatatgtcggcagcggcgagccggcactcgatttcggctatatcgtaaccaccagcggtaaaacagctgccgacgaagtgctgatcaaggtgaccggacccgcgcaggtgattggcgggcgctcctattgtgtcttcagctccgatgacggtaaggcgaaagtaccgttcccggcgacgctttcctttattacccgcaacggagctacaaaaacctacgatgccgggtgcgatgatagctggcgggatatgaccgatgcgctgtggctaaccacaccgtggactgatatctctggcgaagtggggcagatggataagaccacagtcaaattttcgattccaatggataacgccatttcgctgcgtacggtagatgataacggctggtttggcgaagtcagcgcttcaggagaaattcatgttcaggcgacgtggcgtaacattaactaaggccctgctgacagcggtctgtatgctggcggcacctttgacacaggcgatttcggtcggcaatctgacattttcgctgccgtccgagactgactttgtcagcaaacgtgtagtgaataacaacaaaagcgcacggatataccgtattgccatcagtgctattgatagcccgggcagcagtgaattgcgcacccgaccggtggatggtgaactgcttttcgccccccgccagctggcgttgcaggctggtgagagcgagtattttaaattttactatcatgggccacgggataaccgcgagcgctactaccgggtctcatttcgcgaggtccccactcgtaaccagacaagacgcagcccaaccggcggcgaggtcagcacggagccggtggtggtgatggataccattctggtagtacgaccacgtcaggttcagtttaaatggtccttcgacaaggtgacaggaacagtaagtaacactggcaacacatggtttaagctactgattaagccaggatgtgattcgaccgaagaggaaggcgatgcctggtatctacgtccgggagacgtggttcgtcagcctgagttacgtcagccggggaatcattatctggtctataacgacaaattcattaagattagcgattcctgtccggctaagcccccttcggcggactaagacttatccatcggtcgagggaagaattccacctcagagccccaaaaatcgtttaaatgatgtggaagcgatcgtcaatatcacctgtaacgatgggctttctcatatgcacaccatagtgttcaggagacacggaaaggtatcaggcagcctgctaacgagtggtttaatcacgaattagtacgtaaaatcggtaacggctggaaatcattcaatactcacactatcgaaagttccccagccaaccgcggtacgttcttacatacgatgtaccgctgttctctttacgatttttagctgtactggtgaattatgagcaatctgaatccatgcatgacgtgtggtgcctgttgtgcatttttccgcgtctctttttactgggccgaagccgacgatgctggcggtactattcccgccaggctcactgaacaaatatccccttttcaccgatgcatgagcggtaccaatcagaaaaacccccgatgtattgcccttgcaggaaccccgggcaaaaatgcctgctgcacgatatataaaaatcgatcgtccacatgcagagaatttgccatgtctggtgagaacggagtcgtcaatgaggcttgcaatcgtgcaagggctaaatacgggctgacaccgttataaacatacaataattaattgcactgccccgccagcgataatagcggggcttcgtttttcaggggtaacaaaacccgatacttcttctatttgccagcaacaatgcctctcttctgtagcgttcttcggatctacatcatcctgaagtagcgcgatatactcactgactatctgaatcagaatataaaaagcaatgtttttaacctataaaaatggcgctgtatttgcgccatttttatcattcaatgcattatctgtttgagcctaaagggatctcagggtctggctcatgagtaattctgtttcgtaaatctctgcgaataatttcaatagaccagaaccagactaaatgtccaaaaatttcagaaacattctcataccacgggagatcaaacagaggtggcgtcagtcccatgagagggaatgaaatcatatgaacaaaaagttgggctaaagcacctgccagtaagccctgccagagtttaatttttggaaatacttcagcgaccacacaataaccgacagcaaacactatcgaaaagataatgtgcgtaacaccaacccagttaaagacatgcccggcaaaggtataaacagccgcattgggatctgtcagccccaaccagtctcgaagaaaaatatacggtggattgagaaaattacgcgagcaatcaatttggcctgcagccctgattaatgattccgggccacacgctgcattaaacatatccaccgggctacgtggcggcaatggaacttcagccccccacttcacgaatgcggaaacaacgccagcaatcagcccaatgaatgcagcaagaccataacgtctgcggttcggtggagtttgttcaaatatattcatatctaccctgcttgtaccattatgttatacacctcttcaggagtattcataaaacaaggcaaatgtaaagaactgtattgttttgtataacaagatggtttcctaatcgccaatgaatataagctccatcatttctccctatttttatattagaagtgacagagatttgcagggtgatgcagagctgaaaatcacaggtttccttattggtttttgcatcgtacaactaaagcaataaaccagctcccatcatcatcaacatcccggcgaacatgaatttattagccgggctcatagctgcattcgcgttttaagaataatcctcctgctgtcgccgactatgcttaacgtttaaaaaagcatcagcactctcgcaacgcactcttattttcccctttagaataccggaggcctggtatgagcaaccaaggcgaataccccgaagataatcgggttgggaagcacgagccgcacgatttaagtttgacccgtcgcgatctgattaaagtgagcgccgcaacagcggcgaccgccgtggtttatcctcattctacgctggcggcaagcgttccggcagctacacccgcgccagagataatgcccctgacactgaaggtgaacggcaaaaccgagcagcttgaggtggatacccgaaccacgctactggacgctttgcgtgaaaatctgcatttgatcggtaccaagaaaggttgcgatcacggacagtgcggagcctgtaccgtgctggtcaatggtcgcaggcttaatgcctgcctgacgcttgcagtcatgcatcagggggccgagatcaccaccattgaaggcctgggttcgccagataatcttcaccccatgcaggcggcctttatcaagcatgatggcttccagtgcggctactgcacctccgggcaaatttgctcatcagtagcggtgctaaaagagattcaggacggcattcccagtcacgtcacggtcgatttggtttccgctccagaaacaactgccgatgagatccgtgaacgtatgagcggcaacatctgtcgctgtggtgcatacgctaacatccttgccgccattgaagatgctgcgggggagataaaatcatgaaggcgtttacctatgaacgagtgaacaccccagccgaggcggcacttagcgctcagcgcgtacccggcgcaaaatttatcgcgggcgggaccaatctgctggacctgatgaagctggaaattgaaacgcccacccaccttatcgatgtgaacggcctcgggctcgataagattgaagtgaccgacgcgggtgggctgcgcatcggcgcactggtacggaacaccgacctggcggctcacgagcgcgtgcgtcgtgattacgcggtactctcccgcgccctgctcgctggcgcatctggtcagttacgtaatcaggcaaccaccgcaggtaatctgctccagcgcacgcgctgcccctatttttacgacaccaatcagccctgcaataagcgcctgcccgggagcggctgcgcggcgcttgaaggctttagccgtcagcacgcggtggtaggcgtaagtgaagcctgcatagccacccatccgagcgatatggcggtcgcaatgcggttgctggatgcggtggtggaaaccatcacgccggagggaaagactcgcagtatcacactggctgatttttatcacccaccggggaaaacgccgcacattgaaaccgccctgcttcccggtgagcttatcgttgcggtgacgttacctccaccgctcggcggaaaacatatctaccgtaaggtgcgcgatcgcgcctcctacgcctttgccctggtatcggtcgcggcgattattcagcctgacggcagcgggcgcgtcgcgctgggcggagtagcacataagccctggcgcattgaggctgcggatgctcagctatcccagggggcgcaggccgtatatgacacgctgttcgccagcgcccatcccaccgctgaaaacacctttaaactcctgttggcgaagcgaacgcttgcctccgtactggctgaagcgagggcacaggcatgaaatttgataaacccgcaggggaaaacccgatcgatcagctgaaggttgtcggtcgtccccatgaccgcatcgacggaccgctgaaaactaccggcacggcacgctacgcctacgaatggcatgaagaggcccccaacgccgcctatggctatatcgtcggttccgccattgccaaaggacgcctcaccgcccttgatacggacgccgcgcaaaaagcgccgggcgtactggctgtcattaccgccagtaacgccggggcactcggcaaaggcgacaaaaacaccgccaggctgttaggcggccccactattgagcactatcatcaggccattgcgctggtagtggccgagaccttcgaacaggcgcgagcggcggcctcgctggtgcaggcacactatcgccgtaataaaggagcttactccctggcggacgaaaaacaggccgtcaatcagccgccggaagacacgcccgacaaaaacgtcggtgactttgacggggctttcacctccgctgcggtgaagattgatgctacctacacgaccccggaccagagccatatggcgatggagccgcatgcctcgatggccgtctgggatggaaataagcttaccctctggacctcaaatcagatgattgactggtgccgcaccgatctggcaaaaacgctgaaagttcccgtggagaatgtgcgtattatctccccgtatatcggcggagggtttggcggcaagctgttcctgagaagcgatgcgctgctggcggccctcgccgcccgagcggtgaaacgtccggttaaagtgatgctcccccgcccctctattcccaataacaccacgcaccgccccgccacccttcagcacttgcgtatcggtgccgaccagagcgggaaaatcaccgctatctcacatgaaagctggtctggaaacctgcccggcggcacgccggaaacggcggtacagcaaagcgaattactctacgccggggcgaatcgtcataccggcctgcggctcgccacgcttgatttgccggaagggaacgccatgcgtgcgcccggcgaagcccccggtctgatggcgctcgaaatcgcgatcgacgaactggcggaaaaagcgggcatcgatcccgtcgagtttcgcatcctgaatgacactcaggttgaccccgccgacccgacgcgctgcttctctcgccgtcagcttatcgagtgcttgcgcaccggagcggataaatttggctggaagcagcgcaacgccacacccggacaggtgcgcgacggggagtggctagtcggccacggtgttgcggcgggctttcgcaataatctgctggaaaaatcgggtgctcgggttcacctcgaacaaaacggcaccgttaccgtagaaacggacatgaccgacattggcaccggcagctacaccattctggcccagacggcagcggaaatgcttggcgtaccgctggagcaggttgcggttcacctcggcgattccagtttcccggtttctgcgggttctggtggacaatggggcgcgaatacctccacctccggcgtttacgccgcctgtatgaagcttcgcgaaatgattgcctcggcagtcgggtttgatcctgagcagtcgcagtttgccgacggcaagattaccaacggtacccgaagcgccacgctacatgaagccaccgcaggcggcagactgacagcggaagagagcattgaattcggaacactgagcaaagagtaccagcagtcgacctttgccgggcattttgtggaggtcggcgtgcatagcgcgacgggagaagttcgggtccggcgtatgctcgctgtgtgtgctgcaggacgcatcctgaatccgaaaactgcgcgcagccaggtcattggcgcaatgactatgggcatgggcgcggcactgatggaggagctggcggtggatgaccgtttgggctacttcgttaatcacgatatggcggggtatgaggtgccggtccatgcggatatcccaaaacaggaggtgattttcctggatgataccgaccccatatcctccccgatgaaggccaaaggtgtcggtgagctgggcctgtgcggcgtgagcgcggctatcgccaacgcggtgtataacgccaccggtattcgggtacgggattatcccatcactctggataagctgctcgataagctgccggatgtggtttaaggagaaacaatgtcatacccgctttttgataaagacgaacactggcataagccagagcaggcgtttctcaccgatgaccaccggaccattctgcgcttcgccgtagaggcgctaatgtccggtaaaggagcggtgctggtgacgctggtggagatacacggcggcgcggcgcgcccgctcggggcgcagatggtggttcgcgaagatggtcgttactgcggttttgtctctggcggctgcgtggaggccgctgccgcttttgaagcgctggagatgatgggctcaggccgcgatcgcgaaattcgctatggcgaaggttcgccgtggtttgacatcgttctgccctgcggcggtgggatcacgctgacgctccataaactacgctcggcacagcctctgctcgccgtgctgaaccgtctggaacagagaaaaccggcggggctgcgctacgatccgcaagcacaatcgctggtgtgcctgcccacgcaaacccggacgggctggaatctcaatggctttgaggtggggttcaggccatgcgtcaggctgatgatttacggacgttctcttgaggcgcaggcaactgcgagtcttgcagcagccacaggctatgacagccatatcttcgatctttttccggcctcagccagcgctcagatcgataccgatacggcggtcattttgctgtgccatgatctcaaccgggagctgccagtgttgcaggccgcgcgagaagcaaaacccttttatctcggcgcattgggcagctatcgaactcacacgttacgtctgcaaaagctccacgagctgggatggtccagggaggaaacaacgcaaatccgggcacccgtcgggatattccccaaagcccgggatgcgcatactctggcactctccgtgctggcagaagtcgcctctgtacgtctccatcaggaggaggattcatgcctgcccccgtcgtcctgatccttgcggccgggcgtggagagcgctttctcgcctccgggggaaatacccataagtgtatcggctggcgtcagtccccggaggttgcgccttatcgctggccatttgaagaaaacgggagaactttcgaccttgcgattgaaccgcagattacgactaatgatctgcgtctgatgttgaggctggctcttgccggcggaggaataacaattgccactcaggaaactttcaggccatatattgaaagcggtaagcttgtatcgctgcttgatgactttcttccacaatttccgggcttctatctgtatttcccacagcgtcgcaatattgcaccaaagctccgcgccctgattgactacgtcaaagaatggcggcagcaattggtttaaatagctgcacctgcactgcctgatgtcagaacagtattttgatgaattgccaaggttacaatggcacaaatgcggcacaggaggaaacgtggtgtatttaaatatggggtaactctttgattttaatggtgccgataataggagtcgaacctacgaccttcgcattacgaattataagaatccgcttctaattcaaagcattaccccatcaacactgcgctcacacgtcccaccacatcaaaacatgtaaagccttgcaagtcattgcgaggccttatgtgtctcagttttgtcccaccttgtattacgacttgcatagccaatgaagataaatgtgacgacaaacggcgcagcagtcttcttttccttcatactttccccacccagcatgcataccttctaccataactgtagtgaatgtctgttatgagcgaggagcggaccttgttatgctcacggccagaaagcgctatgtaagtttggggtgagtttagttatgctgtattcctgccatagtcgttactccagttaacagtgtggtcagatgccctatagtatcacgagcactatagggcgttgtcttatgatccaactgcatgatgagcttaggctattggattaaagaactagttagaactgaattaaagacaaagggaatcactcctaaaggccaattattcattgaaaaggaattggtatgaacgcaggattacacttcagtgagatcagcaaagaacaatttgatatttatttttacggtcgctcaccttaccttaagacattctctgaggagatacgctggtttaaatatgaggggaatgggataacattgttatccacaataattatatgtaatattgataaagattttaacgcaatagtattgggtcgggatttagataaaaaattcagagcaataaacgtcttggcttcatttgactcaatggatgtcttgcttaataatttaaacgatgacataccaaagatgctggcgcagcaccaaaacggcacattcatgcaaggcgatgaatcaaccaaacctttttcattattcttgagtaaagtcccagagaaaaaaaggaatatttatataaaaatgctcatcgaagaccctcttcatttccctgcatatattgttcttgaggaacttgcatactggttcaaagatcctgatggaatatttataagagattttcaaagtgatgcatttaattcaaggttatttgaattatatttgaacgctgtattttatgaactcgactttgaaatgaatagagaatacaatcaaccagattttctgctatctaaatttggagtggaaattgctgtagaggctgtaagcattgctgaagcagaagcccctcttgaaagaaaagtcattaacgatgagcagatggatgaattaagaagacatgttctaaatgtcatgccttttaagtttgcaagaagtttattaaaaaaagtccggcattgccctgagccagagaaagttcattactgggaactcaaccatacaaagaacaaaccatttgtcatagcaatgcaggattattcaaaaagaatgtccatggccttctcaagcgaagccttgcatagctatttgtacgggattgatattgagtcaggcatttctattgaaagacatacagatgaaaatagaagtatcaagtcgaacttttttggctcagaacaaaataattatgtttctgccgttttactcactactcaagcaaccatacctaagtttaaccggatgggaattcttgcaggtgtagaggcgagtggattcaaagtgtacgtcagtggtgttaaaactgatcaggatgcagacccacatctattttcagccgatgtaagtgaccctaactatcaagaaccatggtgtacagccatatacatgtaccataatccaaacgctatacaccctgttgactatcaattattcccaaatgtagttcatgtatttaaaaaggacgaacactttgaagagtacattcccagaaactatattctccaatcgactactatgatatgtaaaacggaataaattgtggtttactaaaagctaataaatgattaatgcgtttttccgtattaatcgtttattatcaaagcaattcaccacgaatccacacctgtacttccgatagccgataagctaccgctgaagatccaattttgatgcgctattttttcggggggattactctggttcttcatcgaagagcggggtaccggagttacttatcgtcagagtgctacgatttcgctgaatacagaacttcaacttgataagtgcagtttctttaagcccccctgcaaaccaaccatcaacttttggagggctcttgcataccaacgtccgctcttggcacatagcagccctagagacagtggcgtaaagtcatggagaatcggtgggaggatattcagtttcattcatgccgaaatacggtaaaatctataacagatagaaatcattcaatattcgcactatcagaagctggccagccagccgcagcacgttcttacatacgacgtgtctgcggtttcaactccgccagcccaccaatcatgattggacagttctaggacagtactaacaaaaacaggaaattagcagtctcagcaggacaccgaccagacggtgaggagacaaaaaagatacgcaaaggagccgcggctctcgagtgacacaaaagcccgcttatgtgggctttttgtttttcccttaagttcctagccgcttatctataactatggaaaaatgttaaccctgactgtatgttaacaaagggatgtatatgtcggtttttcataactggctgcttgatatcgcaagcgggaattactttatctacatcaaacgcctttctgcaaacgacacaggcgcaacaggtggccatcaggtcggactttatatcccctcaaatatcgttgaaaagctttttccttctatcaatcatactcgcgaactgaacccttcagtcttccttactgcgcatgtatcatcccatgattgccctgatacccaagcacgcgcaatttattacaacaaccgttattttggtaagacccgaaacgaaaaaagaattacgcgctgggggagaggaagtccattacagaactctgaaaatacaggagccctcacaattcttgctttcaggttaaacgaacagaacactgactgttccgaggtagatatatgggtctgcgtcaatcccgatgaagaggatatcatcgagtctgctattggcgaaatcatacctggaaccctaatttccggccctgccggacaaattttgggcggattgcctcttcagcaaactccagtaaatcataaatatgttattcctgaagactggaagaagcgttttccttctggaaacgaaattattcaatatgctgctggccattatgctaaaaactccaaggatccagatgagcaactgattgaccgtcggcgtgtcgagtatgatatttttctactcgtcgaggaattacatgttcttgatattattaagaaaggattcaattctgtagatgagtttattgcattagccaactctgtcagtaatcgacgtaaatcaagggcaggtaaatcacttgaacttcacctagagaagctttttatcgagcacggactacgacatttctccactcaggcagttactgaaggtaataaaaaaccagatttcctgtttccttcagcagaggcatatcatgacgttgaatttcctgtagaaaacttacgtatgctggcagtaaagaccacctgcaaagatcgctggcgtcagatactgaatgaagcagataaaatccatcaggtacatttatttacgctgcaagaaggtgtttcttcagcacaataccgagaaatgaaagatgcgggtgtcagactcgttgtaccatcaactttacataaaaaatacccagaagcagttagagaagaattaataacgctcggagcattcattactgagctgatagaactttacgctgaactatcataggctgactcccggcttaaaaggccgggaggtgttctcaaggctgcccagtcttaccagcatcagcagaaacagctttgaggatatagggttccagaagtctggcaacggcttcaaatactggcaccacaacggagttaccgaactgccgatatgactgagtatctgaaaccggaatacggaatggtttccctccaggtttttcaaaccccataaggcgtgcgcactctcggggagtcagcctgcgtggtcgacgagcctggttactctcattcataaagtcagcctctcccgttgccatatcccaaccacgatcaataagaatttctgatccgtctttgtgatatctggcagaaagtgtgcgtgcaatgctttccttattctcaggattgaccaacccaaagccaaaaccattccccttggctgcatgctttttggcgtagttataaaggtactcccatagttttggcgtaagtatatatttactgtcgactacaggctccagcaattcaccaaatgatgggcggtgttccggataaaaacgactgatatcacgcaaggtaaaccccttgtgaatattcagatctcgtctaaatccgaccagaacaatgcgttcacgatgctgaggcaaaaaatgcttcccatcgataatctttggatcgttttttcccatttctgcagcatcggcaacttcgtagcccagctcgtcaagggtctccataatgactttgaaagttttacccttatcatggctcttcagatttttgacattttccagcacaaaaattgccggtttttttgctcgtataatacgtgccacgtcaaaaaaaagtgttccttgtgcttcacattcaaaaccatgcgcacgaccaagtgagtttttcttactaacaccagcaaggctaaatggctggcacgggaaccccgcaagaagcacatcatgatccggcacatgctcatcaatatatgcataagcatccgtttccaatacatcggttttatcactcagcgtgacttcccgaatatcgagattgaatttatgcacctgttcatcgttaaaccagttggccttgtatgtacgcacagcatctttattccattcactggtaaaaacacactggcctccaatggcctcaaaacctttccgtatccctccaattccagcaaataagtcaatgaagcggaaagcatattccggatggtttgcaggtggttctggtagcatcttacgcagaagagactcttctactgaagtcaacgattttggtaaacacttgccattaatccagcggttaatggtttcacggctccactcattttttccgacttttctcagtaattcagctacatacttctgatcatagatttccagcactttctcgataagctttttatcattttcctgtcgcagcttttcttccgcctcggcttccttcagcagatgctgtgccaacacttcaaattcagacataattcctccaacgggtctaatgggtgaaactctatcactcattcaacccagaaggaaatattttatctggatatttaaacagtgactacaacgtaatctagcactggtgatgctttgttaggcatagagaatcattctatatacgactaatgacagaaaaacagcagacaagtagtttgttcataaattaacgcatactacgtgcctacggttttcgagaccgatgatacagagtcgaaaaatcaaagagttaaaaatttttcttggaataaatgtcttaaaatcgcacactaaaaatcaatgaattacataacattaaagaagaatattccaagccttattgagtccaccacctgttttcaggtgtcattcagacgtgatttgccccagattgggaaagcacgcttttttctcagcttattccgttttgcctgtgtgttgaataattccactgcagttatataaaatcggtaacggctggaaatcattcaatactcgcactatcgaaagttcaccagccaaccgcagcacgtcctgcatacgtcgtgtctgcggtttttcttttttacttacattgtgtctggttcttccggccacacaatatccggtgctactgatgtatcaacacggttcagcaacacccgatacttcttccaggcttccagcaacgaggtttcttcctccgttgcaagctccagttccacagcatcctgaagcggcgcaatatgctcactggctgcctgcatcaggctgttttttgtttcctccgcctcccgtctccggaacagtttttctgcttccgtatccttcacccaggatgtgccgtcccacttctgatagtccccatccggtgacttccaggtgacattttccggtaacggaccgggttcagaaataaataacgccttccctgaagtcacgtcatagacggttttaccccggtggtcttccacaagagaccacgattcattttctttgttgaaaacagccacgaagcctgccggaatatccggtggggcgatatctgttgcatgagctggcaggcctgtgtgtgccggtatatatgcatctccttcgccaataaattcatgggttccggccagcagattataaatttttatggtccgtgattcttcgctcattctgaatgccattatgcaagcctcactataaaattaaacgcaatgtttcttaccgtattctctgtattccctgtggcactcacactgatgacatgctcatgcccgtcaaccgtgaacatatggctgtgcggtccgataaccacatcatgtatatgtggccccagtt

SEQ ID NO: 85 - DNA, 21365 bp, Escherichia coli
  source 1..21365: mol_type = genomic DNA
aagaacggcattgcataaccttgcagtggcgatcgagcattacaatgaaaaccatccgcatagtgcgttgggttatcgctctccgcgagaatatcgacgtcagcgggtaatgttaacttaagatacaacccctgtctggaaataagggggcaagaacagttgcagctgcatccttcgctgatggtaatcgctgataaagccgctgccgcagaattagcgctcggttaagctgaagaaataaggccggatgtatgaattacgctccggcctgttctcattatttaaataactacgaaaaatcaccccacagtctcagcttgccgcagtggagacagcggaagagataaccctgacaatcaccacccttttgcaggcatttagctagatcagaatttctaataccgaaattctcacaatcttcttcaaggttggcaaattcatcgaggcgatcttttatatcattccagcccacatagccgataaaagcacagaaatcgccacaatgcgcaagccagaattcctgttgccatccatgataacctggcgtgcgttcaaccaactctttcagcatttcatcaggatatgtgttcttaataccggcaaattcgtcctcttcatcatactcaaattcaacaccttctatgctggcatcatcctgaaaactacctgcaaacttttcagcagcagaaccgtccgcaatacaccacggacagagatgttcaacttcatcaacgcaataaaagggacccgagtaataaactgacgtctgttgttcacagcaatcgcactctatggttttatcctgttcaaatgcgcctgtttccagtggcttgggatgatatttgaattggggtaacggcctgatattttgagtcatagtaacatcctgtctgcttttgagtagcccaaagataaagtatcccgcttaacttaaagagtctgtttcaggacatgaaatatccaatccgggcagacgggtaatgattctgctcatcaccacacctgccagcaatgcaggaatgatgcggacaacgagactgtcaccagaaagaatgttttcaaacaactccgaggaagccatgcccttaatatgtacaataactgcacaatagatctcggtgataacgacgccacctatgccaccagccagacaacgataatttttctgtgacccgatcttttccggcagacaggcgaccatcacgccggttaacaatgcaggaatagctcccgtagtaatcgacaataagagaaacaatggaagtacctgtattattaccaaaagaaccagcggttcttttgcgaagaatatgtagaggacaagaaacagaacaccaattaacggtcctaaaaccgcaaaataaagtccgtgatgtattacccgacgtgaaacagacatatcaaacaccctttacttacctttgagcgccaatttaagcggggtaagtgaagggagtgtgaagaactatgccgtaatatcccaaccacgcgctttccacagttccggtaactgcgaaagatgggtaaaggtggtgactttcgggtgaacgatcggcttattgtgcgggtcggcgcagaagtagaacacttccatacctgcgtcgataccagattgcgcaccggcaactgagtcatcaaccagaatgcagttttctacatttacattcatcgcttttgccgcatggaacattaacgccgggtctggcttccagcgctgaatatcgtagccgctgaacagtttatccgggaagtagtgcaacatattcagcttgcccatagaatgctgcattttgttatttgggccgttagataccacacacattggcgcagtgatcgctgacaggagcgctccagccccttcgatggcttccagttctgaatcgaacagccgagcgacttctgcacggtaaacgtgttcagcttctgttttcgctaacgtaacaccatgttcaagggaaacaatatcgataatttcgtacagttttacacctttgaaacgtttgaatacctcttcaggatcgagcgtaataccaaattcctgaaacatcgttacatatgcgcgggagcaaatgacttcactgtcgaccagcgtaccgtcgcagtcgaaaaataccgcttctatctgggacatgtctttcctttatcgttagtttaacgttttcgtcatgccaattcgcatgacgcaatcgttgccgtataagcaaatacaatgaaaaaaagttatcttcagccgtccatattgtctcattttggtatacgatagcgacggattttccctccttgttcggaaatagataatgagtcaacaacacacaacccaggcttctggccaggggatgctggaacgcgtgtttaaactgcgcgaacatggcacgacggcacggaccgaagtgatcgccggttttaccaccttcctgacgatggtttacatcgtttttgttaacccgcaaattcttggcgttgctggcatggataccagcgccgtcttcgttactacctgtctgattgctgcattcggcagtattatgatgggactgtttgctaacctgccagttgcactggcacccgctatgggcctgaatgcattcttcgcttttgtcgttgtacaggctatgggcttgccgtggcaagtcgggatgggcgcaatcttctggggcgcgattggtctgctgttactgacgattttccgcgttcgttactggatgattgctaacattccggtaagtctgcgtgtgggcatcaccagcggtatcggtctgttcattggtatgatgggactgaagaatgcaggtgtgattgtcgctaacccggaaacgctggtcagcatcggtaacctgacttctcacagcgtgctgctggggatcctcggcttcttcatcatcgctattctggcctcgcgcaacattcacgcggcggtgctggtttccatcgtggtgacaacgctgctgggctggatgctgggtgatgtccactacaatggcatcgtttctgcgccgccgagcgtaatgactgtcgtgggccatgtagatttagccgggtcgtttaacctcgggctggcaggggtgattttctctttcatgctggtcaacctgtttgactcctccggtacgctgattggcgtgaccgataaagcaggcctggcggatgagaagggtaaattcccgcgcatgaagcaggcgctgtatgtcgacagtatctcttccgtgaccggttcgtttatcggtacttcttccgttacggcttatattgagtcctcttccggcgtttccgttggcggtcgtaccggtctgacggcagtggttgttggtctgctgttcctgctggttatctttctgtcgccgctggcggggatggtgccaggctacgctgcagctggtgcgctgatttacgttggcgtactgatgacttccagcctggcacgcgtgaactggcaggatcttactgaatctgttccggcgtttattaccgccgtgatgatgccgttcagcttttcgattaccgaaggtattgcgctgggctttatctcctactgcgtgatgaaaatcggtaccggacgtctgcgtgaccttagcccgtgcgtaatcatcgttgcgctgctgtttatcctgaagattgtctttatcgacgctcactaaaatcgatagcgcgttaaaaacccgccatgcatgattgctggcgggttttttatttagatcttaactcgctgaataaactcaccaaatgcggtcaattgcccggtcaggtggtccagcgtaccctgatcaatcacttctccggtttgcggatcaactttgttctgaatcacgccgcccataaattccggcttgttcatcaccattgcatcgaggaaaaccagaatctggcgcaggtgatactgacagcgcgcgccgccaatcacgcccattgagctggtctgaatcaacaccggtttaccggccagcggttgatccggcaggcgggaaagccagtcgatggcatttttcagcccacccggtaccgagtagttatattccggcgtgacgatcaccacaccgtcagcctgacggatctgttccgccagagcttcaaccgttgctggaaaaccttcttcctgctgtacgtcagcgtcatacaagggaatgtcggcaatggaaggtaacgcattgacttccatgctcgccggagcaattttcggcagggtacgtgcaaccatgccattaaatgagcctttgcgcaggctccccagtaacgtaaccacctgcaatttttcagacatgatgactcctgtggttgtctatcaatttggcgaaaaagccttcacggtagagagctgggcaaaacgcatcatccggctggtaggattgttggcgcggctgtgaatatccggcaggcttttccagccgtgtttgccatcgaactcccagacactgagcttttcaatcgtgggcgtgaccgccacggaccacaccagcacgtcctccgcgtcgcataacgcttctacatgatttacatgagcacatttcaggcgtccggcaatgggcagcagctgcagatcgcgcggatcgtcattcaaaacatcaccggttagttttagcacgcttcggcgcagcgtgatgagctgcgcccgcgcttcgttaggatcgttttgtttactgatccatagcgattcattgctggaaaaggtgtggttatcgggcgcgtgtgggctatgaaacccgcgcgtcgcacgctgtagttccatatcgaggccacattcaccttcggttgttaacgccacgccaaccatattcccggcataggaaatagaaaacgaaggcaaatttttatcactgaaaaccggtttacctttcggcagggtgacgatttccggcaattcgccaatgccatacagcatgaacatcagttctgcgagtaaacctctggacgccagaaaacggctttgacgatgagggggaatgtttcgggcttcttgatgacactgggaggggagacgaacagaaatcagatgtccttccgttaaaatccctcgggcaaagtgagtcgccatttttcgctccatgattaatggtccattatgaatataagagtaatcatttactggaatgatggacagactaaagcggctaaaagttcgattcagacaagcttattacaacttttttacattttattgtgaaattgggtcgcgtttcatacgattcggttatgccatcgacgcgtaaaggtttttaatggtttcccgtaaccagacgatcttcggattatggctgttccgtttatgccacagcagggtaaaaggaacttccagctttttttgctggctttcgtcaaacgggagaagaagagcaaccaacggcagttgatggagttgattgtagtactgacagtagcgcggcgcggtcgccagtagcagattgtcgggttgcgctgccataaacagtgactgctcaaattccggcaggctcatagcaatcgtgcgttcgcgccccagctcctgtaacacattgtccagcgcccaggtgtcgctctgttcccagcaaatgctgatatgcggataacgtaaaaaggtgtccagattccacgtttcatgcagtgccggatgatctttgcgtaaccagacgcagggtacatcactaaacagcacttcataatcaatggctaacggtagcgagcttaacagctcccgcgagcgaggatggctttcgcgaccggaaaaaccaatatccacttcaccacgagtaatggcatctaaggaatcgtaatcccagttacgtagtttgatggtcgcctgcgggtaacgttggtagatccgtttcgacagcgcattaagcatgatcatcatcagcggcgattccgccgccaactcaaacttcaggccgcgcggtgtctggtggtgcggtttatccagcagcagattgctcatttgcatccattccgccagattttgctccatgctgaccattagcggtgtgggcgacaggcccagcggtgagttcacaaagagcgggtcgtcaaaccacgctcttaactttgccagcgacttactcaccgctgaaggggtcacgttcatccgcttcgccgctttggtcacgctgcgctcctgcatcagcagttgcagacagagcagcagattgagatcaagcgtggtgatggatttcttcatgagcggcaacggggcgtccaggcgcgacgaacataatcagcaacaggctcactatgctacaggcaatcagaatcccgatcagcatattccatgcgccgataccaaccaccgctgccagccaaatccacagtgacgaaccgcaaacctgcgcaatacctaaggtcgagctggctacgcccgcgcgtaatgaaaatggtcctaacgcctgactcatcgctacgccaaaacctaccgagaaaccggcgcaaatcagcgtgataccaaacagagaaaccgcatgggaaggtgaaacggcaagggtgatccccgccgcaaggaataacacctgcgaggtgatcatcaacgtacgtggcttaaaaattcccagcgcaaatggcgtggagaatgaaacggtcatgctgacgccagcggtcaacgccataatggtggcgtattctccgcgctcaaaacccatgatttccatcagcaataccggcgatgtattgacgaaagtgaggatcaccgaaacgctgagggtggtgataacaacacggctgaggaaaaaccgattaagcagcgactcgctattttctcgtggtttgtccgaagcagcgggggacgctgggcgcgtttcttttaaaataaacaaagataacatcagtaccgcgatgcccatcattgccatcgtccagaacagactctgccaagggaatttaagcataatcaggtgtccgagcaccggcgctaacaccggaatgatgcaggtaataccgttgagtaacgacagcactttagcccgacgtcgatcatccagcgtgtcgcgcaaaatggcgaacgccaccacgtaacaacagcctgcgcccaacccctgtagaaagcgccctgcaagaaataacgtgctggtttcagccagtgaacagaacaccgaagcgataataaatagcgccgcgccggggatggcgacaggctttctccctgaacgatcggccactttaccggcaaataacatcgcagctgccatgcccgccagataaacggagaacgcaatatgcaactgcgcttcgctggcattgagatcggcggcgatgcgcggtaaaccaacgaggtacatatcaatcccggcgggataaagtaaaaccagggcaaaactacaaattaaaaagcgggacatgggctaaagcgtcctgatagtaaggtgacgcaaagcatacgtggtgaaggagaatcaggcgagttgccatttggacataagtgatttcctgagaggcaagaagccagcgaatggctggcttcttgaaggatttagccaaatttaggtaacacgttaaagacgttgccgaaccagcacaaaatcacggttataccaaagagaatgacaatcgccggaataagattgccgccccagaccgtgaacatctgattgggaaacttcttgcgagctttgattgcaagcactgcgggaataatgaccgcccagatggtggcgcacagcccggcaccgccgatcccgtaaataaagccgttcgggaagatcagatacaacaacgcaggtggcaggaaggttaacagcacggttttgaaacgcccgccgtgggagttatcaatcttaaacaggtccgccagataatcgaacaaccccagcgtgacaccaaagaacgaactggcaacagctaagttagagaacaccagcaggcaaaactcgataatgccgtgctgtttggtgccgaggaacgatttcaccagcgaatcaacgttgccgcctgaggagattatcgccttaaagctttcgcgcggaatattccccatcgtgcaatagagccagaagagataaatcaccagcgccagcagcgaaccaaataccacgcttttgattaacttatctttgcgttttccatagcaaataatcaggctgggaatattgccgtggaaaccaaatgacgccagacacaccggcaaagccataaagatatacgggaagtaagacgttcccgcagtggtgctggtggcatcgcgcaggatggagtaatcgacctggaagaagaaagaaccaaacacgatcacaaaggagataatcttcagcccgaggaacaatgaggtaatgcgactggcggctaacgaacttatccacaatacgctggcaacgaaaatggctgtgcagatcccgacaatacgtggattagcgtgatagcccaaattcattgatatcgtttcactaatgatcgcaccattagcagagatataggcataagtgaggatatagagaacgaaggcaacggtaataccgctgataatgttccaggtgttaccgattaaatctttggtgatggtgttaaaactggagccgacaggataatttaaatttgcttctaataacaataacccggaatgaagcattgaaaaccaggcaatgataaggataaaggcaccccagaaaaaccaggcaccggcaagatcaacaggtaaagcaaacatacctccaccaattactgtacctgctataaccataacaccccaaaatgcagagtgctttttttcagcttgatcagtcatgatgccacctttagaggaaggctatttttgttattgaggatgtagggtaagagagtggctaacatccttatagccactctgtagtattaattaaacttctttcagttttgcggtgaagtgacgcaatacttttggttcgtaggtaaaggttaatcctttaatattcgccgcgttctctttcacatgtttaaaggcttcaataatgaagtccatatgtgtttgagtatatgttgcgcgcggaatggttaaacgcagcagttcagccgggcatggcagttgtttaccggttttcggatcgcggcctaacaggaaagagccaatttctaccgcacggataccggcgactttatacagctcgcacgccagcgcctgtgccgggaactggtctgccgggatatgcggcagcagtttaccggcatcaacgaatgccgcgtgaccgcccgcctgctggcagacaacgccaatctcttccagaccatcgaccagatactgtacctgcgcgatacgataagccagccagtcgagattcatgccgtcatacagacctaccgccagacgctccatcgcgccgccttccaggccgccatatgtcgggaagccttcctgcaccacgcaaagggttctgcactcggtgtacacatcaaagaagctgtcgtctttcatgcacagcaagccgcccatcggcaccatcgcatctttcttggcggacatcgccagcatatcggcatatttgtaggtttcgcgggtgatctgctcgatggtccagtctttgtattctgcttcacgctgcttgatgaaataggcgttttcagcaaagcgtgcggagtccattaccaccggaatatcgtatttcttcgcgatgctgtacatcgcttttaagtttgccagtgaaaccggctgaccacctgcagagttactggtgatggttgcaacgatatacggcacgttattcgggccaacttcttcaataccgcgttctaatccttcgaggtcaaagttgcctttaaagtcgtaacgcacgcccgtatcgaaggcttctttgatatagacgttacgcacggtacagccgttaatctggctatggccctgcgtggtatcaaagaaatagttagagaatgccaccattttgctgcgatccaggcctttttcctgctcgcgttttttaatcagtaccggaatatagatttgctctgcgccacggccctggtgagtcggaatagtatattgataaccaaagatatttttcactgactcggctaacgcatagtagctgcggctgccgctgtaggcttcgtcgccgcgcatcatcgctgcctgcatactttgggttactgccccggtgccgctgtcggtcagtaaatcgataaacacatcttcgctatccagcaggaacgggttcataccggatttaataattgcttcttcacgataagcgcgagtagtacgttttactggctcaataacacgaatgcggaacggttcagggagatgtttaaagttttccattacataatccttcatttattttaattacagtgatccctgtgaatattacatctgcaatatccattaattcgccatgtatatatacaagcaccatcatttactaaaataagtaaataaacgagagatggcctttgcaaaaggcaaaattaagatatagcaaactaatcgttcacattgaatctaatcggtttggctctggtgatggctacagaagggtaaattaagggcggtgatcgacaatcttattgtcgatattgaaccattttgaggtcacacatatatgtaagatattcataatgcacttatcctcgaaagacacgaggctacagtataatactcaagaattttgtctattctaaaattgtttaaatgtgaatcgaatcacaatcgttcggggagcaatattaaatgcttttttttaagattataaattacgtaagaattttaatgtttaaaaaaagggttgaggaataacaggagtgctaacaatgaagcgaagccgcatctgacagtcagaatacggcttcgtaagcgcggttacttaccaatacagaagctggagaaaatccgccccagcaggtcgtctgaagtaaattccccggtgatttcgcttaagttctgctgtgccaggcgcaactcttccgccagcagttcacccgcccaggcacctaacagttgcgctttaccttgctgcaaatgctccgctgcctgttccagcgcctgtaggtggcgacgacgcgccaggaagccgccttccatgttggtgtcaaagcccatgctctgtttgagatggttacgcagcacctccacgccttcacctgtccttgccgagagacgaattaacgcgtgaccgttcacttcactcattcccagcgtttcgccggtgatatcggctttattgcgcaccacggtgatcggcagtttcgctggcagacgggcgataaattccggccagatctctgccggatccacggcgtctgttgtggtgccatcgaccataaacagcacgcggtcggcctgttcaatttcctgccacgcgcgctcgataccaatacgttccacttcgtcactggcttcacgtagcccagcggtatcgatgatatgcagcggcattccgtcaatgtggatatgctcacgcagcacgtcacgtgtggttccggcgatatcagttacgattgctgcttcacggcccgccagcgcgtttaacaggctcgatttaccggcgttaggacgtccggcaatcaccaccttcatcccttcgcgcaacaaactaccctgacgtgcttcagcacgcactgcatcaagatcggcaataacgtcattgagctgggcttcaattttgccgtcggagaggaaatcgatctcttcatcagggaaatcaattgccgcttcgacgtaaatgcgcaagtgggtgagggcttctaccagatgattaacccgtgcggagaatgcgccttgcagcgagttaagtgccgaacgggccgcctgttccgagctggcgtcgataagatcggcaatcgcctcagcctgggctaagtcgagtttatcgtaaagaaacgcgcgttcggaaaactcaccagggcgagcaatccgcaggccgggaatggtcagaatgcgttttaacagcaggtcgaggatcactggaccgccatgaccctgcagttccagcacatcttcgccggtgaacgagttcgggccagggaaccatagcgcaatcccctgatcgagcacgctgccgtcggcgtctttaaacggaagataatcggcgtagcgcggcttaggcagtttacccagcacggtttcggcaacttcacgggctttgaagccggagatgcgcaggatgccaacgccgccacgtcccggaggcgtggcctgggctacgatagtgtcattatcgctcatgatgttcctgttgctttgtgtggcggatgcgcggtgcttatccgccctacgaaaagaaaaaaggcggtcaactgaccgcccttattttagcgaaaactcaccgaatcaggattttttcttctcgcggctatgcaggccacgtttttccagaccacggtaaatcagctgctgctgaataatggttaccaggttgctgacgatatagtacagcaccagacctgacgggaaccacaggaagaacacggtgaagatgaccggcataaaggtcatgatcttctgctgcatcgggtcggtcacggtggtcggcgacatcttctgaatgaagaacatcgttacgcccatcaggatcggcaggatgtagtacgggtcctgtgccgacaggtcgtggatccacagtgcaaacggtgcctgacgcagttcaacggaacccatcagcatgtagtacaacgccaggaagattggcatctggatcagcagcgggaagcagccgcccagcgggttaaccttctcagctttgtacagcgccatcatttcctggctgatacgctgtttgtcatcacccagacgctcacgcattgcctgaatcttcggctgcagcatacgcatcttcgccatggaggtgtactgcgctttggtcagcgggtacatgatgccacgaacgataaaggtgatgatgataatggagaagccccagttacccacaaagctatggatccatttcagcagtttgaacagcggctgagagatgaaccacaaccaaccgtaatcaacggtcagatccaggtgcggagcaacagctgccattttgtcctggatttccgggccaacccacagggtgctgttcatcgcgccagtctgaccaggctgaaccagtaccggctgagatttatagccgatagcggcgatgccgttacccagattagcggtatagaagttgttggtaccgtcgttatgcgggatccacgccgtcgcgaaatactgttgcagcattgccacccaaccacctttcgaagagatgttcaggttttcgttatcggcaatggtatcgaacttgtatttctcgtacttctcgtcaggcgtggagtacgccgcgccgcggaaggtgtgcagtgcgaagttgctgcttccggtatcgagatgcggtggcagagtgatggattgcttcaactgaccaaaggtggagatttccagcggtttctcgccagcgttctgcacgttgtagttgacgttgacagcgtaatcaccacgtttcaggacaaacgttttggtaaacgtgttgcctgccgcgtcggtatacgtcatcggcacctgcagttcgttttgaccttcagccagcacataagcgtctttttcaacgttatacagcggacgcgggccgttagccgggttatccgggccatcacgaccggtcagaccgctctgtgcctgataaataaactgcggtgaagtttccagcagctggaacggctgggtagagttcagctctttcgggtaagcaggcagcagagcttgctcaacatcaccaccacgggtgttgatggtcagatcaagcacgtcggtcttaaccgagatcagtttcccctggccactggccggtacgccctggtcggcggcgctacccgctgcggtggtcgttgtctgcgtggtctgttgggcctgaggttgcgggtttttatcctgctcccaggcttgccagatcatgaaagacacgaacagcaaagcgatgactaaaagattgcgttgcgaatccatcgttagtgttctctggtatcaaatggtccgggcgggacgggatcgtcaccaccagggtgtaaagggtggcattttaatacgcgtttcaccgtcaaccaactgccttttatcactccaaacctgcgcaatgcctcaattccgtagcttgaacaggttggagtgaaacgacaatgcggcccgagtagcggactaatcaggcgttgatagacccgaatgagggctatcaggacccgcgagccaggcgacagtggcggcgccataatttttccaacgcttccgagagagcacggttatcgaggtcggcaaccccttttttcgccaccaccacgaaatccatagccgggagttcatgttggcgcagacggaagctttcacgcgtcagacgtttaatccgattgcgttcatgggcgcgtcgaacgtttttcttggcgactgtaagaccgatacggggatgccccagcgaattcaggcggccgagaatggtaatttgcggcgtgccagcccgttgtggctgctggaagacgaatgtgaattgactgggagttaacaagcgtaactccctgggaaatgcgagcttaaccactcaggggttagctttattacttagaaacggtcagacgagcgcggcctttagcacgacgacgtgccagaacctgacgaccatttttagtagccatacgagcacggaagccgtgagaacggttgcgcttcagtacagacggttgaaaagtgcgtttcatggcgatttctacctaaacttgaataaattcaatggctttattggatatccgccgaaaaatgaaacgatggacaccgaagccatgggtgattaaagaggccggattgtaataattgtacactccggagtcaattctctttccttatttaccgcgcttttccgcaccttttcgcagggaaaatgtacgacctcacaccagtgaaaaccagcatggcgcgccgggtggaggattatacgggctgatgggtaaagcgcaaggatcgtcctggatctttattagatcgattaagccaatttttgtctatggtcattaaattttccaatatgcggcgtaaatcgtgcccgcctcgcggcaggatcgtttacacttagcgagttctggaaagtcctgtggataaatcgggaaaatctgtgagaaacagaagatctcttgcgcagtttaggctatgatccgcggtcccgatcgttttgcaggatcttgatcgggcatataaccgcagacagcggttcgtgcgtcaccctcaagcagggtcttttcgacgtacgtcaacaatcatgaatgtttcagccttagtcattatcgacttttgttcgagtggagtccgccgtgtcactttcgctttggcagcagtgtcttgcccgattgcaggatgagttaccagccacagaattcagtatgtggatacgcccattgcaggcggaactgagcgataacacgctggccctgtacgcgccaaaccgttttgtcctcgattgggtacgggacaagtaccttaataatatcaatggactgctaaccagtttctgcggagcggatgccccacagctgcgttttgaagtcggcaccaaaccggtgacgcaaacgccacaagcggcagtgacgagcaacgtcgcggcccctgcacaggtggcgcaaacgcagccgcaacgtgctgcgccttctacgcgctcaggttgggataacgtcccggccccggcagaaccgacctatcgttctaacgtaaacgtcaaacacacgtttgataacttcgttgaaggtaaatctaaccaactggcgcgcgcggcggctcgccaggtggcggataaccctggcggtgcctataacccgttgttcctttatggcggcacgggtctgggtaaaactcacctgctgcatgcggtgggtaacggcattatggcgcgcaagccgaatgccaaagtggtttatatgcactccgagcgctttgttcaggacatggttaaagccctgcaaaacaacgcgatcgaagagtttaaacgctactaccgttccgtagatgcactgctgatcgacgatattcagttttttgctaataaagaacgatctcaggaagagtttttccacaccttcaacgccctgctggaaggtaatcaacagatcattctcacctcggatcgctatccgaaagagatcaacggcgttgaggatcgtttgaaatcccgcttcggttggggactgactgtggcgatcgaaccgccagagctggaaacccgtgtggcgatcctgatgaaaaaggccgacgaaaacgacattcgtttgccgggtgaagtggcgttctttatcgccaagcgtctacgatctaacgtacgtgagctggaaggggcgctgaaccgcgtcattgccaacgccaactttaccggaagggcgatcaccatcgacttcgtgcgtgaggcgctgcgcgacttgctggcattgcaggaaaaactggtcaccatcgacaatattcagaagacggtggcggagtactacaagatcaaagttgcggatctcctttccaagcgtcgatcccgctcggtggcgcgtccgcgccagatggcgatggcgctggcgaaagagctgactaaccacagtctgccggagattggcgatgcgtttggtggtcgtgaccacacgacggtgcttcatgcctgccgtaagatcgagcagttgcgtgaagagagccacgatatcaaagaagatttttcaaatttaatcagaacattgtcatcgtaaacctatgaaatttaccgtagaacgtgagcatttattaaaaccgctacaacaggtgagcggtccgttaggtggtcgtcctacgctaccgattctcggtaatctgctgttacaggttgctgacggtacgttgtcgctgaccggtactgatctcgagatggaaatggtggcacgcgttgcgctggttcagccacacgagccaggagcgacgaccgttccggcgcgcaaattctttgatatctgccgtggtctgcctgaaggcgcggaaattgccgtgcagctggaaggtgagcggatgctggtgcgctccgggcgtagccgtttttcgctgtctaccctgccagcggcggatttcccgaacctcgatgactggcagagtgaagtcgaatttaccctgccgcaggcaacgatgaagcgtctgattgaagcgacccagttttcgatggcgcatcaggacgttcgctattacttaaatggtatgctgtttgaaaccgaaggtgaagaactgcgcaccgtggcaaccgacggccaccgtctggcggtctgttcaatgccaattggtcaatctttgccaagccattcggtgatcgtgccgcgtaaaggcgtgattgaactgatgcgtatgctcgacggcggcgacaatccgctgcgcgtacagattggcagcaacaacattcgcgcccacgttggcgactttatcttcacctccaaactggtggatggtcgcttcccggattaccgtcgcgttctgccgaagaacccggacaaacatctggaagctggctgcgatctcctcaagcaggcgtttgctcgcgcggcaattctctctaacgagaaattccgcggcgtgcgcctgtatgtcagcgaaaaccagctgaaaatcaccgccaacaacccggaacaggaagaagcggaagagatcctcgacgttacctatagcggtgcggagatggaaatcggcttcaacgtcagctatgtgctggatgtcctgaacgcgctgaaatgtgaaaacgtccgcatgatgctgaccgattcggtttccagcgtgcagattgaagatgccgcatcacagtcggctgcctatgttgtcatgccaatgagactgtaatgtccctcacccgcttgttgatccgcgatttccgcaacattgaaaccgcggatctcgctttatctcccggctttaactttctggtaggtgccaacggcagtggcaaaaccagcgtgctggaagccatctatacgctcggccatggtcgggcgtttcgcagtttgcagattggtcgcgtcattcgccatgagcaggaggcgtttgttctccatgggcgattacagggcgaagagcgcgagacggcgattggcttaaccaaagacaaacagggcgacagcaaagtccgtattgacggtactgacgggcataaggttgcggagttggcgcacctgatgccgatgcagctgataacgcctgaagggtttactttactcaacggcggccccaaatacagaagagcattcctcgactggggatgctttcacaacgaacccggatttttcaccgcctggagcaatctcaagcgattgctcaagcagcgcaatgcggcgctgcgccaggtgacacgttacgaacagctacgcccgtgggataaagaactgatcccgctggcggagcaaatcagcacctggcgcgcggagtatagcgccggtatcgcggccgatatggctgatacctgtaagcaatttctccctgagttttctctgactttctctttccagcgcggctgggagaaagagacagaatatgctgaggtgctggaacgtaattttgaacgcgatcgccagctaacctacaccgcgcatggcccgcataaagcggacttacgcattcgcgccgacggtgcgccggtggaagataccttatcgcgtgggcagcttaagctgttgatgtgcgccttacgtctggcgcaaggagagttcctcacccgtgaaagcgggcggcggtgtctctacctgatagatgattttgcctctgagcttgatgatgagcgtcgcgggctgcttgccagccgcttaaaagcgacgcaatcacaggtctttgtcagcgcgatcagtgctgaacacgttatagacatgtcggacgaaaattcgaagatgtttaccgtggaaaagggtaaaataacggattaacccaagtataaatgagcgagaaacgttgatgtcgaattcttatgactcctccagtatcaaagtcctgaaagggctggatgcggtgcgtaagcgcccgggtatgtatatcggcgacacggatgacggcaccggtctgcaccacatggtattcgaggtggtagataacgctatcgacgaagcgctcgcgggtcactgtaaagaaattatcgtcaccattcacgccgataactctgtctccgtacaggatgatgggcgcggcattccgaccggtattcacccggaagagggcgtatcggcggcggaagtgatcatgaccgttctgcacgcaggcggtaaatttgacgataactcctataaagtgtccggcggtctgcacggcgttggtgtttcggttgtaaacgccctgtcgcaaaaactggagctggttatccagcgcgagggtaaaattcaccgtcagatctacgaacacggtgtaccgcaggctccgctggcggttaccggcgagactgaaaaaaccggcaccatggtgcgtttctggcccagcctcgaaaccttcaccaatgtgaccgagttcgaatatgaaattctggcgaaacgtctgcgtgagttgtcgttcctcaactccggcgtttccattcgtctgcgcgacaagcgtgacggcaaagaagaccacttccactatgaaggcggcatcaaggcgttcgttgaatatctgaacaagaacaaaacgccgatccacccgaatatcttctacttctccaccgaaaaagacggtattggcgtcgaagtggcgttgcagtggaacgatggcttccaggaaaacatctactgctttaccaacaacattccgcagcgtgacggcggtactcacctggcaggcttccgtgcggcgatgacccgtaccctgaacgcctacatggacaaagaaggctacagcaaaaaagccaaagttagcgccaccggtgacgatgcgcgtgaaggcctgattgcggtcgtttccgtgaaagtgccggacccgaaattctcctcccagaccaaagacaaactggtttcttctgaggtgaaatcagcggttgaacagcagatgaacgaactgctggcagaatacctgctggaaaacccaaccgacgcgaaaatcgtggttggcaaaattatcgatgctgcccgtgcccgtgaagcggcgcgtcgcgcgcgtgaaatgacccgccgtaaaggtgcgctcgacttagcgggcctgccgggcaaactggcagactgccaggaacgcgatccggcgctttccgaactgtacctggtggaaggggactccgcgggcggctctgcgaagcaggggcgtaaccgcaagaaccaggcgattctgccgctgaagggtaaaatcctcaacgtcgagaaagcgcgcttcgataagatgctctcttctcaggaagtggcgacgcttatcaccgcgcttggctgtggtatcggtcgtgacgagtacaacccggacaaactgcgttatcacagcatcatcatcatgaccgatgcggacgtcgacggctcgcacattcgtacgctgctgttgaccttcttctatcgtcagatgccggaaatcgttgaacgcggtcacgtctacatcgctcagccgccgctgtacaaagtgaagaaaggcaagcaggaacagtacattaaagacgacgaagcgatggatcagtaccagatctctatcgcgctggatggcgcaacgctgcacaccaacgccagcgcaccggcattggctggcgaagcgttagagaaattggtgtctgagtacaacgcgacgcagaaaatgatcaaccgcatggagcgtcgttatccgaaagcaatgctgaaagagcttatctatcagccgacgctgacggaagccgacctctctgatgagcagaccgttacccgctgggtgaacgcgctggtcagcgaactgaacgacaaagaacagcacggcagccagtggaagtttgatgtccacaccaatgccgaacaaaacctgttcgagccgattgttcgcgtgcgtacccacggtgtggatactgactatccgctggatcacgagtttatcaccggtggcgaatatcgtcgtatctgcacgctgggtgagaaactgcgtggcttgctggaagaagatgcgtttatcgaacgtggcgagcgtcgtcagccggtagccagcttcgagcaggcgctggactggctggtgaaagagtcccgtcgcggcctctccatccagcgttataaaggtctgggcgagatgaacccggaacagctgtgggaaaccaccatggacccggaaagccgtcgtatgctgcgcgttaccgttaaggatgcgattgccgctgaccagttgttcaccacgctgatgggcgacgccgttgaaccgcgccgtgcgtttattgaagagaacgccctgaaagcggcgaatatcgatatttaatggcgctaaccatgcgagcgtgcctgatgcgctacgcttatcaggccttgtattatccctccagtgcagagaaaatcggccagttttctctgcctgcagtccgcatgccgtatcgggccttgggttctaacctgttgcgtagatttatgcagcggactgcctt

SEQ ID NO: 86 - DNA, 21047 bp, Escherichia coli
  source 1..21047: mol_type = genomic DNA
tctgaggcagcacctggcacggctgggacggaagtcgctgtcgttctcaaaatcggtggagctgcatgacaaagtcatcgggcattatctgaacataaaacactatcaataagttggagtcattaccgtgcgcaattagctaataacacgaatcgtgaatgtatataatgcgcttgttccttcgatggtgtattcgaataacggattactgaatacagctatcccattaagggaacaccgccatctgctcatcgggaagagccgaccatcatttaagtggtagttcgatacctcggtggcggttctgtgccgacttagctcagtaggtagagcaactgacttgtaatcagtaggtcaccagttcgattccggtagtcggcaccatatgcgggtatcgtataatggttattacctcagccttccaagctgatgatgcgggttcgattcccgctacccgctccagcatttgaaataagccttattgtattgcagcactggcgtatttttattacgtgggagcaggttgtttcgaaaaagtattctgttctctggctatgatttgaggccaggtgtagcctcagtgctgatttttttacggcagcagaatggtgcattatcggtggagattttgtatttcctggcagggccggtgatgtgccatcccgatgttgtaaacatcgctaaaaatgacattgagattaatcatatactaagcaaaacctggaaatacatcctttaccgcctccaccgggcggttttttttattctgaaccctaaaaaaagaaacacggacactgataatgcccgtgtggcaatgccatgtaagttagcgatgaatatggcgcaaaaaaaagcgcggccgtcggattaacgccgcgggacaaagtccatgaagactcataagtattggcccccttctggggacatgttcatactactaagcttcagaagtggtttaaatcatcaaattaaccttaattttcgataagtcttatttcatttctttgcgccacatctggcgcgcatcaaataacgccacgcaaagggcatctgcggatgccggtgcttttgacggggtgttttttacgggccgctggtggccattttttgtttccattacacagcgcccgcatctgcgaggtgggggttatgaaatccatggataagttaacaacgggtgtcgcctatggcacctccgcaggcagtgctggctactggtttttacagttgctcgatagagtaactccgtcacagtgggctgcaatcggtgtgctgggtagtctggtttttggcctgctgacgtacctgacaaacctttatttcaagattaaagaagataagcgcaaggctgcgagaggtgaataatgcctccatcattacgaaaagccgttgctgctgctattggtggcggagcaattgctatagcatcggtgttaatcactggcccaagtggtaacgatggtctggaaggtgtcagctacataccatacaaagatattgttggtgtatggactgtatgtcacgggcatacaggaaaagacatcatgctcggtaaaacgtataccaaagcagaatgcaaagcactcttgaataaagaccttgccactgtcgccagacaaattaacccgtacatcaaagtcgatataccggaaacaatgcgcggcgctctttactcattcgtttacaacgtgggtgctggcaatttcagaacatcgacgcttcttcgcaaaataaaccagggcgatatcaaaggcgcatgtgatcagctacgtcgctggacatatgctggcggtaagcaatggaaaggtctcatgactcgtcgtgagattgagcgtgaaatctgtttgtggggtcagcaatgaacagagtaaccgcgattatctccgctctggttatctgcatcatcgtctgcctgtcatgggctgttaatcattaccgtgataacgccattacctacaaagcccagcgcgacaaaaatgccagagaactgaagctggcgaacgcggcaattactgacatgcagatgcgtcagcgtgatgttgctgcgctcgatgcaaaatacacgaaggagttagctgatgcgaaagctgaaaatgatgctctgcgtgatgatgttgccgctggtcgtcgtcggttgcacatcaaagcagtctgtcagtcagtgcgtgaagccaccaccgcctccggcgtggataatgcagcctccccccgactggcagacaccgctgaacgggattatttcaccctccgggaacgactggtaataatgcaggcccaacttgaaggtgctcagcaatacataaccgagcagtgtttaaagtaaaatcttaactacaatatgattcattttgatgattgtttcataaggaacagtgaagtaagatctaagaggagttaaattttatacagtataatcataatattgcagcaaggtggttataattgaaagaatatttagatatgaatacatctcatgtaagagttgttactcatatgtgtgggttcttggtttggctttatagtctttcaatgttgccaccaatggttgtagcattgttttataaagaaaaaagcctgttcgttttctttataactttcgttatatttttttgcattggtggcggagcgtggtatacaactaagaaatctggcattcaattacgtacccgtgatgggtttattataattgtaatgttttggattttgttttctgttattagtgcattccctttatggattgactcagaacttaatttaacgttcattgatgctctgtttgaaggggtttctggaataacaacaacaggagcaactgtaattgatgatgttagttcattacctcgggcatatttgtactatcggtcacagttaaattttataggtggtttaggagttattgttctggcggttgcagtattgccattattgggtattggtggtgcaaagctttatcagtcagaaatgccggggccatttaaggatgacaaactcactccccgcctggccgatacgtcacggacactgtggataacttattctttattaggtattgcttgtattgtctgttatagacttgcaggaatgcctttgtttgatgctatttgtcacgggatttccacagtttcgcttggtggtttctcaactcatagcgagagtatcggatattttaataactatttggttgagctggtggctggttctttttccctgctatcggctttcaacttcactctttggtatattgttattagcagaaaaacgataaaacctttaatcagagatattgaacttcgtttctttctgttaatagccttaggggtgatcattgttacctctttccaggtctggcatataggtatgtatgacttgcatggaagttttattcattcgttttttcttgccagctccatgctcactgataatggtttagctacgcaggattatgcaaactggcccacgcacacgatagtgtttttgctgttgtcaagtttctttgggggatgtataggttcaacctgtggtggaattaagtcacttcgatttcttatacttttcaaacaaagcaaacacgagataaatcagctttctcatcccagagcgttgttgagtgtaaatgtaggagggaagatagttacagatcgtgtaatgaggtctgtatggagtttcttttttctttatactctcttcacggtgttttttatactggtgttaaatggtatgggatatgattttcttacatcatttgcaacagtggctgcatgtattaataatatgggattaggttttggggctactgcatcgtcattcggagtgcttaatgacattgcaaagtatttaatgtgcatagctatgattcttggtcgccttgaaatttatcctgttattatattgttttcaggttttttttggcgctcctaatatatggctgatttataattgtgagtttaatattatgttgactcactcattgatccaatacctaactttaccagcaacacctccgcccccagtagcactggctgctggggtgcgttttattcataaagcaaggctgtatgagcgagaaattaaagatagtctatcgcccattacaagaattgtcaccgtatgcgcacaacgccaggacgcacagccctgagcaggtggcacaactggtagaaagtattaagcaattcggctggactaatccggtgctgattgacgaaaagggcgaaattattgcgggtcacggtcgtgttatggcggctgaaatgctcaaaatggattctgttccggtcattgttctgtctggcctgacggatgagcagaaaaaggcgtaccgcctggcagataatcgcctgccgatgaatgctggctgggatgaagatctgttgcggatggagctgtcggacctaatcaatgctgattttgatgtctccctgacaggcttcatcccgacagaaattgatgaactgttgacggatgttttgcccggtacaggaaatgaggaggagccgtatacgacgaaaattgatacgcctgtttatgagccgtcgggcggtaaaccggatatcagtgaactgtacgacgatacgaaaactcaggagctgatcagccggatacgttcggcgtcccttgagcctgatattgagaaattcctcctgtgtgcggcagaacgtcacacggtgtttaatttcagcagaattgcggactattacgctcacgcccccgctgaaattcagtgttttttcgaggagtcggcgctggtgatcattgattatcagcaggctattgaaaatggatttgtccggatgacgcagcgcatggtggagatcatgcatggtggtgaggaggaggaatatgcgtgatgatttttgcgcctttattctgactcacgggcgaccagacaaagttctgacttaccggacgttgcgtcgtgctggctataccgggaaaatttttatcgttgttgatgatgaagataagacacggcatcagtacatggctgaatttggtgaacaggtgctggtgttttccaaagccgatatcgccagtcgttttgacgaagccgataatttctgtgaccgccgctcaattttttacgcccgtaatgcctgttttgacctggcaaaactggtcgggtgtaaatacttcattcagctcgatgatgattatcacgagttccagtttcgggtggatcgcaactatgaccaggcctattttccgataaggaaactggatgcgatcctttctgaaatgctggcgtactacgaatcaatacctgctctttccatcgctatgtcgcagggcggggattttcttggtgacaatggcggccatgcttcgtgggtgaaacgcaaggcaatgaacagctttatctgttcggttgatcgaccgttctcattcatggggcgcattaacgaggatgtgaatacgtacacgaatctcggtcgctgtggtgaattgtttatgacgatcggtgctgtccagttagggcagaaacagacgcagaaaaacagcggcggaatgaccgagctgtatctggattccggaacctacgttaaaagtttttactccgtcatgtatgcgccgtcgtgcgtaaaaatttcactgatgggtgccagccataaacgcattcaccatcaggtcacctggaacaacgctgcagtaaaaatccttcacgaaaaatacaggaagaagacaccctgcatatcaatgggggtgacaaatgattccgtattcgaaagtcgagtctctggcagcgtgccggatgactgcacaacaaatcgctgacgttctggatgttgatctgaaccgactgaaagaaaatcgggaagcaatgacagatttttatgcggccatccgtaagggcagagcgaaaggtgaagccgagttacgagcggcattgtttaagcttgccagaaaaggggatgcttttgctctgcgcgaactactcagggtggataaaaatcaggactaactgatgagcagaccggactggggggcgttgcagcaggagtatattgctgaatacacccgctccggtatatctccggtggcatggtgtgaagcaaggggactgaattacgcaacagcccgtcgttacatcaaaaaaactccgaaaaatgcgcagacagaaatgcgcaaaactgcgcaaaaaagtgcgcagaaaaaatctgcgcagactgcacaaaagcggaacgaaaaatctcaggaaaaaaagccagtattcgatgcgggcctgaatgagggcgacgcggaggaattttcgttctgtcccgatgaattcggcatttctgaccagcaggctaagtttgcgatgcttgttgctcagggtaaaaagccgacagaggcgtaccgactagccggttatgaggggcaaggtgcgacagctaacagcaacgccagtcgtatgcttagaaatgccagggtttttcgcgctatcagctacttccgcaatcagtaccagaaacgctataccgcagacctggatttactagtgagtcagttgatggccattgtcctggccgaccccaatcagcttgcacaatttcgccgtgttaactgccgttattgctggggcgagaatcatctctaccagtggcgcgatatagcagaattcgacaaggcagcggcgcaggcttccagagatggcaaacccgaaccggaatatggaggcctcggctttgttgataacgccatacccaatccggactgcccgaagtgctgcggtgagggaacgggacagctttatatggctgataccactctgcttgatggggatgcgcggcaattatatgcaggggcaaaattcggaaaattcggcgttgagatcctgctggaggataaggctgccgcccggcgtgaattgttgcgtttgctttctgctggcggggctttatgtgcagataagcggctacaggaactggaaattgaacggcgcagaatggaaaaccagaagctgcgcaaagagatcgaaacggtggaagataatgaacatccccagcctgtggcgatcaaaattaatgtggttgatgccagagtaaggagtgatgaagatgatctctccgacgcttaatgtgcctcaggcgcgatttctttcaatgccccataaatttaaagcctatattgctggttttggctcgggcaaaacatgggttgggtgtggcggcatatgcaaggagatttgggagcatccaggtataaatcagggatattttgcgccaacgtatccccaaattcgcgatattttttaccctacagtggaagaagttgctgctgactggggattgaacgtaaaaattaatgagggaaataaagaggttcacttttattacggacgccagtatcggggaaccactatctgcagatcgatggagaagccacaaacgatcgtcggtttcaaaattggtaatgcgttggtggatgaactggacattttgccgaaggaaaaagccagaacggcgtggcgcaagataattgcacgtatgcgttataagattgatggacttcgcaacggtattgacgttacaaccacgccggaaggattcaaatttgtctacgagcagtttgttaaagccgtgcgtgaaaaaacagagctggcctcactgtatggtctggtgcaggcatctactttcgataatgaaaagaacctgccagcagattacattccttcgcttcttgaatcataccctccagagctgattaaagcctatcttcgaggacagtttactaacctgacaagtggtactgtttaccatcagtttgaccggaaactgaataattgcgaagaagtggagcagccaggggagccgatttatattgggatggattttaacgttggaaagatggcgggaatcgtccatgtgctgcgtttggggcttccatgtgcggtaactgaaatcatcaatgcctacgatacgccggatatgatccgcatcattaaagaacgcttctggctgtatgatgggaatgattaccggaaagtgagggaaatttatatttatccagatgcttccggggattccagaaaatcaagtaacgcaagtacgacggatatagcccagcttaagcaggctggttttaacgttgtggtgaacagctcgaacccgccagtaaaagatcgcgttaactcaatgaatgcaatgttctgcaatgccaatggtgagcgtcgctataaagttaatgtgaagcgttgcccgttatatgccgaatctctggagcaacaggtctgggatgagaagggggagcctgataaaaaatctggcaatgatcacccgaatgatgccggaggttatttcatcgttaagcaattccctattgtcaaaccgaccggaagagtcacatcacttcggatttaattatggctgatatatcaacacccaacctcgactataacgatatgctggaggcgtgggatattaacgacgcactgatgggcggtacgcttgaaatgcgcaggcagggggaaaattatctcccaaaatggcctaacgaagatgaagacgcttataaaaaacgcctgtctgtggctacgctacttcctgtgtatgaagaaagcatcaagcaaaatattgggcgcatatttgcagagccgacagtattgagtgaggaaacgccggcaaaaatcagggaatatgcagaaaatatcgacatggaggggagccgactggatgtgtgggcgcagcaatttttcagcctcgcatttcagtatggtgtggcacatgcgctggtggactatccacgaacggatatgaaagagattcggacaaaagccgatgaaaacgcgaccggtggtcgtccgtacgttacgatgctgaatccacgccaggttattggatggaaatcgaaagttgaaaaagggaaagttgttctcactgatttgcgtataaaagaggtcatcattattgatggtgatgatttcgggcagaagaaggtggagcagatccgccatattatgccccgtcgagttgaaatttatcgacgtagcgaaggcactaatggcgaatctgtctggacgcttcatgagtcatggaataccagccgtgatgatattcctctggtaacactgtacacgaagaaaacaggatttatgcgtggtacaccgccattgcttaatcttggcttgctgaatatcaagcactggcaaagccagagcgagcaggacaatattcttcatgttgcccgcgttccattactggtggcctacgggctggacaggaatgaagaactgacggttggtgcatccaccgctacgatttttgaggacagaacaaaaaatggcctcgaatatgttgaacatagtggcgcagcgatagaatctggcgaaacatcacttgagaagctggaaaatcagatgcgtcatgccggcgctaaacttctgcgtgctgaaaatacatccaccaaatctgttgatcagactaatgaagagcgaatgcaggaaaactcgccgctttatacaatggcgaactccctcgaagatgccctcgataatattctccagataatggcggaatggatcggagagagttgcggtggcaatgtggatgtgcgcactgaactggatgtatctgcccaggtgtttgactcatcctccgcgctggctgttcagtcattgcgtcagggcggtgatatacgtcagattgatgcggttcgggtgttgcaggcgttgaaatttatcgatcaggattcccgtccagaggaagtgatcgatgaattaaaaaatcagagtgtaatgctgatggaaatcaatgatgcaaaccgtgaatgaacggctgcgtgatgaatcaattgctcatgcagtctggatatcccgctatagcactggcgtggctgccagaatggtgaaaatactgaatgacagcgatgcggaacttactgctcgcctgctgatagcactggacagcctcgatccaggtagttttaccgttaagcgcctggagtcacttctggcgagcgtcagagaggttaaccgcactgctattaacagcatgtttaccagtctctccggagagctgaacgagctggcaatttatgaggctggttatcagttaagtctgtttgattctatgctacctgattttgttgctgatgttcaccctctggttggtatctctcctgatgcactttatgccgctgcaatggcgcgaccattccagggacgactgctcagtgagtgggcctcagatcttgaagcggatcggctcagacgcataacaaatacagtgcgtcagggttttttgctgggggataccaatgagcagatcgcaagaaaaattcggggacatgtcagtaagggatttcaggatggcgcattgcagatgagccgggctaatgcggccagcattgcaaaaacagcggttggacatcttgctgctactgcccgtgagagttttgccagcgcgaataatgatttgattaagggtaagcaatggttatcaacgcttgataatcgtactacgccacaatgtcgaatcagggatcgcctcaaatatacgctgaataataaacctgtaggtcacagcgtgccttatttgcaggggccgggaaaaattcatttctgctgccgctcaacggaaacgttcattctgaaatcagcgaaggaactgggtattgatgttcgcgatatttccccggctgagcgggccagcatggatggcgtggtggccggagatacaacctacagggaatggtttttgcgtcagccttacaccagacaaaaacagattgtgggggaaacccgagcaaagctgattcgggatggtggtatgtcgccagatgaattttacaccgataaaggcgaatggctgacgctgaagcagctccgtgagcgtgatgcacaggtattcagaaaagcagggatttaaataaatcatttattacaacaggctaccttcgggtggccttttttattgctgcgatccggatggtgagcagcgtaactgtcggaagacttaaaccaggtactaatatgaaactgaaaacggtcgagattaacggaaaacaatacgcagaaattgatactgctggcctgccagtttatgtgcacgacgatggtaaagaaattggcttcgatgcaccgctggcgacaaaaaaaattacagagcttaatggcgaggcaaaaaatcatcgcctggctaaagaagctgcagaggaaaaactggctaagtttgccgctatcgaagacccgaagaaggcgatcgaggcactggaaatgctgtcaaaaatcgaccagaaaaagctgatcgatgcgggacaggttgaccaggttaaggcagaaattacgaaaaattttcagcagcaattagatgaagaaaagcaacgctctcagatgctggagaagcagctttacgattctatgattggcggtagttttgcgggttcaaaatatattgccgataaaattgcgatcccggcagatttattacaagcccgcttcgggcaggcattcaaagtggaagaagggaggatcgttgcttatgacgcttccggcaacaaaatttattcccgcgcgaagcctggcgaactggcgcagtttgatgaggcgctggagttccttgtcgaaaattaccctcagaaagactacatcctgaaagccagtggcaacaatggcggcggctcccgtccgacacagcatgatattggtcagaaaacgatgaaacgctctgcttttgatgcactggatgttgcaggtaagcaaaacgcattgaaagacggtatcacaatcgttgattaacacatttgtcagcttccggatgggagctggtgtcagggctggatagctcattactccatctattcacaattacgcaaatttttaaggaatatttaattatggctggaaataccctgaccgggttgatcccgactatttataccgccctggatgttgtatcccgtgagcaggtaggttttatccctgcggtagcaaaaaacgcaaaagctgacgccgcagcaaaagatcagacggtaaccgcgccagttgcgcctgaggcgaaaaccgaagatatcgtaccggggccgtcagctccgaataccggtgatcaaaatattggcactgttgatgtaaaaattactaaatccaaaatggcaccggttaaatggaatggtgaagaacaactggctcttggcccttcagggacttacaacaccattctggctgatcagttcaagcaggcttttcgcgcccttgcaaacgaggttgaggctgatcttggtgcgttgtatttcggtgcttcccgcgccgtgggaaccgcagggacaacgccgtttggtgttaaagatgatctttctgatgctgctctggctcgtcaggttctggaggataacggcgcaccgacaaccgatctgcagatggtgcttggctccactgccattgctaatttgcgcggaaaacagtctgtattgtttaaagtgaatgaatccggcactgaacagctactgcgtgagggcgtgttggggcgtctggagggattcaatattcacagttcggcaggtgtgaaacgagcgccaaaggttgctgcaactggttatctcgtgaatggagagaaaaaagaaggcgatgttcttatttccattgatactggttcggggagtatttctgcaggtcagattgttacgttcgctggtgatccgaatcagtatgttgtggcagcagcgaccagcaatctgattactcttgcagcgcccggactgcgtcaggatctggccgatgatactgccatcacagttgttggggcctttactgcaaatatggcgtttgatcgcaacgcgtttctgctggcatcccgtactccggcaatgccggaaggtggcgataatgctgatgatgtaatgaatgttacggacccgatttcagggattacgttccagattgcactgtatcgtcagtatcgccaggtgcgctatgaagttggactggcatggggtgtttcatcagtgaagccggcacatggttgtctgattcttggttaaacattcaaacggggcttcggccccatttttaatggggggcatatggccggattaactaaagagcaaagagcacagcgtgaagccgcacaaaaaacgcaaattgagttagtggttatggtgaccgattatcagatgtttcccggcgcaccaactatcgctaatgttcatcctgatgaagttgacaactggaaggctatgggctggaaaactcaggagtaacacatgatcacttacgtgacctgtgatgacgttgataatgcgtttgggaacgcctggacgagtgagaacgctaaaaataaagctgttttaatggctaatgcctggcttaatggcttcaacctgaaaattaacccatcccgtattccggaagaggtaaaacttgcgggagcatatgcagccagaattgcctcattcggtaagttgtttcagcagaaaaatgattctggcgttgttatcagtaaagccgtgtcggctgacggggtcagtgtatcgaaatcattttctgagttgccagcaaacagcactgcattgcttgaacccgatttacagcttgcgatagcactgctgaaaccgtacggacttagtcgctcacaagtcagggttgtgagggggggataatggggcttcgtgaagagattcagtcagaggttgccgctgcttttgatgaggatttagcggacgccgtgagtgatttttctggttcttacgttacgcaccggcactgggatcctgtgacggaaactggcggcgaatccaccgcaatctataccgggcgaggcgtgttgacacgttataagctgggcagaattgatgggattaatattttgcatggtgaccttaaattaaccgctctggtatgcgaggttacggataaaccagctgtcgaccatattattgagatttatgatcctgtatcaaggcagttacaacgatacgaggtaattacagcaagtgtagatccttccgcatcagtttactctatccagttaaggagagcgtaaatggcaaaggcatgggatatagaaccgtcaatatttgccgggatgattgaggaagatgtagggctgaagattcgctacatcgctattcagattcttactgctattgatattgctgctccggttgataccggacgtttcagaaataacaacctggtgtcgttacagcatcccgattttggtatatctgataacgtggatccgaacggtacgattgctgttcagcgtgggatcggggttatttcgaaagctgcaaattacggggttatttatatccagaataaccttccttatgcagaggctcttgaaaacggtcattcacaacaagcgccaactggcgtgtatgccaacgcttttcatggtgttttacaggcttacaaatgacgtttactgaaatcagaaatacggttatttccagaatgacggcacagacgattattgatggaaaagacgtattgtatccgaacgggccaacgttcgatccttccggtaagttaatctgggcgcggttaagtaatattcccgggcaggctggagttaatgaaattggcgcggggccggttgtttatcgcacggggataatcattattcagttatttgtccccgcaggttctggttcaaaactcattactgagacagccgataaattgcgggaactgtttgagtttcaggatgacgatcgtctcagttaccaggctgtttcctcaatagccgttggcgaaaagaatggctggttccagcttaatcttcaaattccatatcgcgcgctctagcgcaattaatgacataggaggctcctgtgagttcaggtgcaaaggttatctcggcatttatccgggagacagttgcaggcaccacgccagcaagtggtgactggagtttattaaaacgcacaagctggggagtaaaacccacccagaataaaggcgaaaataatgagatcggcggctcccggatggctcagggggcgacgtctggcactgtggatgtcggcggtgatgtcggtaccaaatttcgctggggtcaacatgatgattttcttgcatcctgtttcggcgcggaatggtcaggcgattctctgacaatggggaatgagcgaataacattttctctggcgacctatgcgtccgatgtcggaattgcctctgtcgtcagaggagcgcaggttggctcatggaaaatgcagatccctaacgacggcgatattacagcgaccgtaacctttgccgggctggactgggaatcaaaggccgatgatacgaattttatcaaaggcgaacctgtggatagtgcaggaaagctacgctattcgtttaaggaggtttcagcggtaagcctgaatggtgttgccggaggtaacggtttttgtatcgacagttttgatattcagttcgataacaaactccagacacagcgttgtatcgggactggctcgccttatgcaggagcaaatattccgactacttttacaccgtccggtacggtgacgctttcgtggtctaaatccgcgtgggaaatctggagtaaaacactgactggagaaacagttccgttcagcttcacgctttcgaatggagagggggcatacactttcagtttcccgaaggttcaggtgtcaggtgaatggcctgatggggggaataccgacattatccaggttcaattgagcattaccgcagcagatgaagcacctacgataaccagaaaaaaaaactccccggctgccgtgatcgcaaaagccagtgctgaggcgattagttgattttccgttattccccctgtggtactgaactacagggggacgcattgaatgaggttatggatgtttattcttaatcagaaaattatcatcagtggagaacgctggtttacgccaatgaaggacttaaaacctgtagacgggttaaaactgttggtggcaagcagcgataacgatcagtatcgctcccgtaatgcattaatccgtcgccacattgagaaaatggatgccagtttgcacgtcggaacgaaggagtttgatatttcaaaggtttccgaggtggattctgttgatgatttactcattgataatgcggctcgttatctgctgaaagactggaaaggggttggtgaactggttgatggtgttgaggttgtactggaatatacgccagaacgagggatcgcgctgcttaagcagaatccagagttgtactggcagctccttgcagaagcagctagcatcgcccagggaaaagagcagcagaagcaggatacgataaaaaagccatagctgcccagcggtggttatctgagttcgggggagaaaagggtgaaaaggcaagatggaagcgagaaaaactcaggttgccgccgctcctggagccagaaatagaccccgttgtccgtgagttattgtatgcgtattcagtaatgtctcgttctaggcgttatgcaggcatgtccggggttccgctgcctttgtcaatatctgacatacacgactatttaaaagcacacccaatattgatagatagtgatgaatttgaagcagtgatctttgcgctggatgaccagtatgtttctcaatccaaaacttttgatgggatattgattaattaattttatgctttggcaattaattgtatgtacatagttttatgtgaaattgatagttgactataaaatgtggtcgatattttaatgctgccagccagattaattctggctgttataacaatgatttgtgaaatagcggtgattttatgaaaaaagcagtgttgactaccattatcgcttcagccttgtttgcaactggcattgcaaatgctgaattgatgcagaatactatttctctaggttatgcacaaagtcatgttaaagtcgctggagaaagccttgatgagaatccttccggggtaaatattaagtatcgatatgagctggatgataaatggggcgttgcatcttcatttacgtacacacatcaagaatacgattatcattttgcaggctctaaaattggaaatgaaaaactggattactattcactagctgccggtccagcctatcgtttcaatgattacttcagtgcatatggcttaataggtttagcgcatggacgtgctgaagcgacgattttgggatactctgactctttaagcaagacttcggttgtatatggtgttggtattcagtttaatcctgtaccaaattgggtagttgacgcatcctatgagtacaccaaattgggcgatgtgaaagttggtacctggatgaccggtattggttatcgtttctgataattcctttcttctgttgtctggccccgctttctaagcggggctttttttgtccggagcaactaaatgacagagcaaacttcacgtcttgcaataattattgatagcactggagcgaaaaataatgctgataatttgacctcctccctggtcaaaatgacgcaggctggggcaactgctgcaaatagcgcagggaaagtgactagggcaacagaagatgagaagaacgcgctcgcaaaattaaaagcagctattgatcctgttggtgccgcaattgatactgtcggtcggcgctattctgaattaaagaaatacttcgacaaagggcttattcataaagaagaatatgaatttctttcccgtaaacttaatgaaactacagcggaattgagcggggttgcgcaagcgcagagagaagccgagaaggccggaaaacttgctgccgcccagcaggaagcgcaggctcaggcctttcaaagaatgctggacaagatcgaccctctggctgcggcgctaagacatcttgaacaacagcaggatgaacttaatgctgcgtttgcatccgggaaaataaatggttctcagtttgagaattatagccgaaaaatacaggaaacacggcgagagcttaccggagaggctcaggcagagcgagaagcagcaaaagcgcatgatgaacaggttgctgctttgcaacgtctgattgctcaacttgatcctgtcggaactgcttttaatcgtctggtagaacaacagaaacagctcaatgaagcaaaagctaaggggatgctttctcctgaaatgtatgaggagctttctggaaaacttcgtgctatgcggagtgagcttgaggttactcaatcgcaattaagcaaaaccggaatgtcggcaaaacaaacggcttttgctatgcgcatgttgcctgcacaaatgacggatattgttgttgggttgtccactggtcagtcgccatttatggtgttaatgcagcagggcggccagctaaaagatatgttcggtgggattggcccggcgatcaaaggtgtaggttcttatgtgctgggattaattaatccttttaccctggccgcagcagccgttggcgtcttagggctggcttactataaaggctctcaggagcaggacgaatttaataaatctcttattcttaccggaaatcagttggggacaaccagcgggcaattggccgatatagctcaacgtgccgggaatgcggctgattcgacaactggcgctgcggcggtagtattaaaacagcttgtgcgttcgggaaaggtagcgagcagttcgctggagcaagtgacgacagcgatagtaaaaacgagcgaagtaacaggaatatcaaccgaacaactggttaatgacttcaatgaaattgcaaaggatcctgtcagtgctatatcaaaacttaatgatcagtaccattttctgacacttgcgacttataaccagattaaggcgctacaggatgaagggaaccagcaggaggctgctcgtattgcgacggaagcatattcatcctcaatgattcaacgttccagccagattaaagaaaatcttggttatcttgagactgcatggaaagctgtcgcagactccgcaaaatgggcatgggattccatgctggatattggccgtgaggcctcccttgatcaaaaaatctcagatgttctccgtcaaattgatgaaatagaaaaaaatacccgacccggagttttcgggttaggtggcgttggagatggcggagctcaaaataaaaagctggcacgattaaagcagcaattgggcgtacttcaagcagaaaaaattgctcaggacgtactaaattcatcaataaacgattacaacaagcgacaacaggaaggaattgaactcagacagagagcagatgctttttcaaaacaatatcaaacccgggagcagcagagagctagtgaacttgcaaaactggaaaagctaaagaatcagtattcaaaggaagaatataataatcttatcgctcaaataaatgagcgttataaagaaccaaagcaaccaaaggcgaaaggttattcggatgatgctgcccaacgaatgattgatcatctgaatcaacagaatgcgttactaagttcacaagctgaattgaccgttaaattaagttcctctgaacaggaactggttaagtggcgtcagcagattgccgacctggagtcacgaccgtcatcgaaattaacccaggatcagaaatcgcttctcttacaccgggaagaaataactgcgttgatggagaaaaatgttgcgattgaaaaaaataacaggctaatcaatgaatccgccgaaatagctgcatggcgtgattcattgcaggcttcgattgataatcgtcaacaggggtatgacattcagattgctggttatgggtttggcgataaaaatcagcaacgccagcaggaattactgcggattgaacgtgaatataacaatcagcgtctgcaacttgaacgtgactatgcagataaatcccgtggaatgtcaaatcatgtttttcaggagaaaatgcaggctctgaatgatgctctggaacgagaaaaagaaattgtcagccagaaaaacgagcagctcgatattcaggcaggagactggattagtggtgcctcccagggattcaataactggctggatgacactaaggatatcggtgcgcagataaaatcaaccacgactcagatgtttgatgggatgaccgatgcgctaggtgattttgtcacgacaggcaaggcaaattttcgttctttcgctacttccgtgatttcggatcttagtcgaattgcattaaaggcttcaattactgggattttcgacagcattgataacagttcttctggtgggattttaggaactatcgggagtgctattagtaaatttattccgaatgcaaagggcggtgtgtatgagtctccgtcattgagtacatattcgaacggtatttatgactccccacaattttttgcttttgcaaaaggagctggtgtttttggcgaggctggaccggaagctattatgccattaacgcgaacttccgatggttctcttggtgtcagagctattaatagtaaaagtggtaatggaggcagagatattacctatgcacctgtataccaaatcactattcaaaatgacggccagaatggagagattggtcctcaggcaataaaagcacttatggggatggttgatcagcgggtgcagggcactctgttaaatatgcgccgtgatggaggaatgttaagtggctaatacggaagaattttactggttaccagaggatggaatgaaaacagaaaataagccatcgataaaaactgtaagatttggcgatggttatgaacaacgaagcccaaacggacttaatcatgctctgcgtgtttttacctgtgatttcagggttgaggcgaatgaacgtaattcatttgaactgtttctagttcggcatggaggctataaatcttttttttggcgcccgccgggtattaacagaaaaatcagagtggtgtgtcgaacgtggtcagcgacagaacatatcacctataccgatttttcgtgtcagtttgacgaagtggtgatttgatgcaggatattccacaggaaacacatcatgagacgacacgcctcactcagtcagcccaggtggtgctctgggaaatcgatctgacagaggtcggtggtgaacgttattttttctgtaatgagcagaacgaaaaaggtgagccggttacctggcaggggcggcagtatcaggcctatcccattcagg

SEQ ID NO: 87 - DNA, 19630 bp, Escherichia coli
  source 1..19630: mol_type = genomic DNA
tgggacaacttgtgaaattaccgacaagaagggaaagggccttcccgagagtggtaaaggagaggccctggaaataccccacagccccgaaaaagagccagtcagttgcttaactgactggcattacaccggtcggcagcccttttttatctatgatagtgattactcaaccgtaaccgattttgccaggttacgcggctggtcaacgtcggtgcctttgatcagcgcgacatggtaagccagcagctgcagcggaacggtgtagaagatcggtgcaatcacctcttccacatgcggcatctcgatgatgtgcatgttatcgctacttacaaaacccgcatcctgatcggcgaagacatacaactgaccgccacgcgcgcgaacttcttcaatgttggatttcagtttttccaacagttcgttgttcggtgcaacgacgataaccggcatatccgcgtcaatcagcgccagcgggccgtgtttcagctcgcctgcagcgtaggcttcagcgtgaatgtaagagatctctttcagcttcaatgcgccttccagcgcgattgggtactgatcgccacggcccaggaacagcgcgtgatgtttgtcagagaaatcttctgccagagcttcaatgcgtttgtcctgagacagcatctgctcaatacggctcggcagcgcctgcagaccatgcacaatgtcatgttcaatggaggcatccagacctttcaggcgagacagcttcgccaccagcatcaacagcacagttaactgagtggtgaatgctttagtggatgccacgccgatttccgtacccgcgttggtcatcagcgccagatcggattcgcgcaccagagaagaacccggaacgttacagattgccagcgaaccaaggtaacccagctctttcgacagacgcaggcccgccagggtatccgcggtttcgccagactgtgacaaggtgatcatcaggctgttacgacgcacggcagatttgcgatagcggaattcagaggcgatttcgacgtcgcacggaatacctgccagcgattcaaaccagtaacgggaaaccataccggagttataagaagtaccacaggcgaggatctgaatatgctcaaccttcgacagcagttcgtcggcgttcggtcccagctcgcttaaatcaacctgaccgtggctgatgcgcccggtaagggtgtttttgatcgcgttcggctgttcgtagatctctttctgcatgtagtgacggtaaatacctttatcgcccgcgtcatattgcagattggattcgatatcctgacgttttacttccgcgccagttttatcgaagatgtttaccgaacggcgagtaatttccgcaatatcgccctcttcaaggaagataaagcgacgggtcaccggcaacagcgccagctggtcagaagcgataaagttttcgcccatacccagaccaatcaccagcggactaccagaacgtgccgccagcagggtatccgggtgacgggagtccatgatcactgtaccgtacgcaccacgcagttgcgggatagcacgcagaacagcctcacgcagagtaccgccctgtttcagctcccagttcaccagatgggcaattacttcggtgtctgtttcagaaacgaaggtatagccacgcgcttttaactcttcgcgcagcggttcatggttttcgatgatgccgttatgcaccaccacaatgtgttcagaaacatgcggatgcgcattcacttctgaaggttcaccgtgggtcgcccagcgagtatgagcaatacccgtaccgccatgcagaggatgttcttccgctgcctgagccagcatctggactttaccgaggcgacgcaggcgggtcatatgaccttccgcatcaacaacggccagaccggcagagtcatatccgcggtattccagacgacgtaaaccttcaagaaggatttctgctacatcacgttgcgcgatcgcgccaacaattccacacatagtttttgattccgatttatatcgttgtcggtcaacctgtatgcccgttttttcgggcgccccgagccttgtagagagtggggttatttttatagttactgcttgtgggagggagattatgttatctcctcatcccatgtgaccggattacccggccagaattactttttctttaccggacgacgccagccttctttctgagtctgcggcacacggctgatagctaatgcattttcgccgacattacgcgtcacagttgtacccgcagcaatggtcgcgcctttgcctactgttaccggggccaccagctgagtgtcggaaccgacaaacacatcgtcgccgataatggtcttaaatttattcgcaccatcgtagttgcaggtaatggttcccgcgccgatgttaacgttatcgccaatttccgcatcgcccaggtaagtcagatgaccagctttcgagcctttacccagacgcgcttttttcatctcaacaaagttaccgacgtgtgcaccttccagcaactcagcaccaggacgcagacgggcaaacgggccaatagtacaggccgctgccagattcgcgtcttccacaacggtatacggactgatttcgcaatcatcgccaatcacgctgtttttaatcacgcaaccggtgccgattttcacgcgatgaccgagagtcacgttgccctcgatgataacgttagtatcaatttcaacatcgcgcccgtgagtaagcgtaccgcgcagatcaaaacgcgccggatcgcgcagcataacgcctgctaacagcagtttttcagcctgttcggactggtaaacgcgctccagacgggagagttgcaggcggttattcacaccttctacttcgcttaaacgttgcggatgaacggcgacgatttcacgcccttcctgatacgccagcgcaataatgtcggtgatgtagtattcgccctgagcattattgttggtcagcttcgccagccagcgtttcatatctgcgccgttagcgatcagaatgccggtgttgatctcctgaatctgacgctgctcgtcggtggcatctttgtgctcaacaatgccggtaactttgccattttcacgggtgatacgtccataaccggtcggatcatccagtttcaccgtcagcagaccaatgccaccctgcggtttagcatcacgcaggcgctggagtgtttcgacagagatcagcggcacgtcgccgtagagcattaaaatgtcttcatcatcggcaaagaaaggtgcggcctgctgcattgcatgacccgtacccagctgctctgcctgaagcacccagttaaggttgtcgtctttcagcgcctgtttaagcagatcgccgccgtgaccgtacaccaggtgaacgtgcgctgcgcctaattcattcgcagcatcaatgacatgctgaaccatcgctttcccggcaagggtatgcagcactttcggaagatcggaatacatgcgcgtgcctttgcctgcggcaaggatcactacgctcatagcattattcaacatacgcgtcctgactgtaatttgagaacgaatttaaaccgcttcaccttgaaaaaactacatttttttcatcgtgaaatggacagaggataaattgttcaataacggattatccccgctgacgaaagtgccattttcgaccatcgtcacgccttttgtctgcagaaaattaaggcagtaccttcatttaagcgtcaggtggatgtttttgctcttatttcgatcaatgaataaacgggaaaacaggggtgttttatatcagcaggatctatgtgaacgctcttcaggacggatcacgcgtaaaaaaaagccagcctgtttccagactggcttttgtgcttttcaagccggtgttacatcgcttttttggtcaactcgataacgcgcagctgcgcgatcgctttggccagttccgcagacgcctgagcgtaatctacgtcgccgtgagagctgctaatgtgctcttcagccttacgtttcgcttccatggctcgcgcttcgtcgagatcctggccgcgaattgcggtgtcggccagaacggtcacgttgccaggctgcacttcaagaatgccgccagacagatagataaactcttcgtgaccgtgctgtttcacgatgcgaatcataccaggcttaatggcggtgagcagcggtgcgtggccagggtagatccccagttcaccttcgctacccgttacctggattttctcgaccagaccagagaacatttgttgctctgcgctgacgacgtccaggtggtaagtcattgccatatcaccctccgattaaggcgttaaagttttttggctttttccacagcttcttcgatggaaccgaccatgtagaacgcctgctccggcaggtgatcgtattcgccttccatgatgcctttaaagccacggatggtgtctttcagggagacgtatttacccggagaaccggtgaatacttctgccacgaagaacggctgggacaggaagcgctggatcttacgagcacgcgctaccaccagtttgtcttcttcagacagttcatccatacccaggatggcgatgatgtctttcagttcctgataacgttgcaggatggactgaacgccacgcgcggtgtcgtagtgttcctgaccaaccaccagcgggtccagctgacggctggtggagtccagcgggtcaacggccgggtagatacccagagacgcgatctgacggctcagtaccacagttgcgtcaaggtgcgcaaaggtggttgccggagacgggtcagtcaagtcatccgcaggtacgtataccgcctgtacggaggtgatagaaccagttttggtggaggtgatacgttcctgcagaacgcccatctcttccgccagggtcggctgataacctaccgctgaaggcatacggcccagcagtgcggatacttccgtaccggccagggtgtaacgatagatgttgtcaacgaacagcagaacgtcacgaccttcgtcacggaatttctcagccatggtcagaccggtcagagcaacgcgcagacggtttcccggcggctcgttcatctggccatacaccagggatactttgtcgataacgttggagtcggtcatttcgtggtagaagtcgttaccctcacgagtacgttcacctacgcccgcaaacacagagtaaccggagtgctcgatcgcgatgttacgaatgagctccatcatgtttacggttttacctacacccgcaccaccgaacagaccaactttaccgcccttagcgaacggacacatcaggtcgataactttgataccggtttccagcagttcctgagagtttgacagctcttcgtaggaaggtgctgcgcggtgaatcgcccaacgctcttcttcaccgatctcgcctttcatgtcgaccggttcacccagtacgttcatgatacggcccagagtcgctttacctaccgggacttcgatcgggtgttcgaggtcttttacatccagaccgcgacgcagaccgtcggaggaacccattgcgatggtacgcacgataccgccgccgagctgctgctgaacttccagcaccagacgctcattaccattttgcacctcaagagcatcgtacacgcgcggtacggcatcctgagggaattcgacgtcaactacggcgccgattacctggacaatctttccagtagccatcttaaatcctctacgaaataacctgtttaaaccgcggcggcccccgagacgatctcggtgagttcctgagtaatgctggcctgacgagctttgttgtataccaactgcagctctttaatcaggctgccgccattgtcggtcgcggctttcatcgccaccatacgggcggcctgctcgctggccaggttttcaaccacgccctgataaacctgagattcgacataacgacgcagcagggtatccagcaacgccttcggatcgggttcgtacaggtaatcccaggatttatgtttcagatcatcatcatctgatgccggtaacggcagcagctggctgatggtcggaacctgagacatggtgttaataaatttgttgctgacaatgtaaagcttgtccagacggccttcgtcgtaggcctgcaacatcacttttaccggaccgatcagttcggacagggaagggttatcccccatgccggtgacctgggcaacaacattgccgcccacggagttgaagaacgacacgcctttcgagccgatcattgcgaggtcgcattgaacgcctttgtcggtccaggtcttcatttccgccagcagttttttgaacaggttaatgttcaaaccaccgcacaaaccacggtcggtcgacaccaccaggtagcccacgcgtttaacgtcgcgttcttccaggtatgggtgcttatattccagattaccgtgtgcaaggtgaccaatcactttgcgcatggtttctgcataaggacggctggccgccatgcgatcctgcgatttacgcattttggaagcggcgaccatctccatcgctttagtgatcttttgcgtgttctggacgcttgcgatcttactacgtatctcttttgcgccggccatgagcttctcctcaatgccttgcggcctgccctaaggcaagccgccagacgttaccaggattgggttgctttgaaggaatcgaggatgcctttcagcttgccttcgatttcgtcgttgtagccaccggtctggttgatctcttgcatcaacggagcgtgatcacggtcgacgtaagccagcagagcggcttcgaagctgccaattttcgacagttcaacatccgccaggtaaccacgttctgctgcgaacagaaccagagactgctgcgcaacggacatcggcgcatactgtttctgtttcagcagttcggtcactttctgaccgtggtcaagctgcttacgtgttgcatcgtcaaggtcggatgcaaactgagagaacgctgccagttcacgatactgtgccagagcggtacggataccaccggacagttttttcatgatcttggtctgtgctgcaccaccaacacgggatacggaaatacccgggttaaccgcaggacgaataccggcgttgaacaggttggtttccaggaagatctgaccatcggtaatggagattacgttggtcggaacgaacgcagaaacgtcacccgcctgagtttcgataatcggcagtgcggtcagagaaccggttttccctttcacttcacctttggtgaaggcttcaacgtattcggcgttaacacgtgcagcacgctccagcagacgagagtggaggtagaaaacgtcgcccgggaatgcttcacgtcctggcggacgacggagcagcagggagatctgacggtaagcaacagcctgtttagacaggtcatcgtaaatgatcagcgcatcttcaccgcggtcacggaagtattcgcccattgcgcaaccggcatacggtgccaggtattgcagtgcagcggattcagacgcggttgctaccacaacgatggtgttagccagtgcgccgtgctcttccagtttacgtaccacgttagaaatggtggacgctttctggccgatagcgacatagatacatttgataccggaatcgcgctggttgatgatggcatcgatagccagtgcggttttacctgtctgacggtcaccgatgatcaattcacgctgaccacgaccgattgggatcatggagtcaacggctttataaccggtctgtaccggctgatctacggactgacgttcgataacgcccggagcgattgcttctacagcagagaagccgtcgtgatccagcggacctttaccgtcgattggtgcacccagagtgttaaccacacggcccagcaggccacggccaaccggaacttccaggatacggccagtacacttaactttcatgccttcggcaaggtcagcgtacggacccataacaaccgcacctacagagtcgcgctcgaggttcagtgcgatagcgtaacggttacccggcagggagatcatttcaccctgcatacaatcggccaggccgtgaatgcggataacaccgtcacttacagaaacaatagtaccttcgttgtgagcttcactcacaacattgaactgagcaatgcgctgcttgatcagttcgctgatttcggtggaattcagttgcatgctccagtccccttaagactgcaagacgtctgcaaggcgctcaagacgaccgcgtacgctgccatcaatgaccatatcacccgctcggatgataacgcctgccattacagacttatcgattttgcaattcagcttaactttgcgtgacagacgtttttccatcgcagcagaaattttcgcgagctgttgttcactcagtgcggcagcggaaatgacgtctacctcagcggtagcctcactcacggcacgaaggtgaataaactgctccagaacatccgggagcgcgttaagacgaccattttcagccattacccgaatcaggttctgaccgttttcgtccagttgctcaccacaaactgcgataaacgactcggcgagcgtttctggcgcaagcgcgccagagagaagctctgccatttgttcgtttttggttacctcggcggcaaacgccagcatgtcctgccagcgttctacactttggtgttcgacggcaaagtcaaaagctgctttggcgtaggggcgagctaccgtaataaattcagacatcagcccctccctccttacagttcagcgacaagtttatccacgatgtcgctgttagcagcttcatccacggaacgttcgatgatcttctcggcgccagcaacagccaggatagcaacttgcttacgcagctcttcacgggcacgtttacgctcggcttcaatttctgcctgcgcctgggccacgattttagtacgttcctgttctgcctcagctttcgcttcgtccagaatctgcgagcggcgtttgttcgcctgctcgatgattacctgggcttccgctttcgcttttttcagctggtcggtcgcgctggcctttgcaaggtcaaggtccttatgtgctcgttctgcggaagcaaggccgtcagcaatttctttttgacgtttttcgatggctgccattaatggcggccatacgtacttcatgcagaacagaacgaacaggacaaacgcgatggcctggccgaggattgttgcgttaagattcacagcacaatgcctctatttagttaacgttctgatattgctctttaaataaaagcaacgcttactacgcgacagcgaacatcacgtacagacccagacctacagcgatcatcgggatagcatccaccagacccataacgataaagaactgagtacgcagcagaggaatcagatcaggttgacgcgctgcgccttccaggaatttacccccgaggatgccgataccgatcgcagcaccgattgccgccagacccatcatcacagcggcagccatgtacagcagatccatattcaggttttccatgacagtctccagtttgtttcagttaaaacgtagtagtgttggtaaattaatgttcttcagacgccatcgacagatagacgatcgtcagaaccatgaagatgaaggcttgcagcgtaatgatcaggatgtggaaaatggcccacggcacattcaggatccactgtgaccaccacggcaacagaccagcaatcagaatgaaaatcagctcaccggcatacatgttaccgaacagtcgcaaaccaagtgaaactggtttggacagcaggcttaccccttcaaggattaagttgacaggaatgaacgcccagtgattgaacggctgcagcgtcaactctttcgtgaagccgccgatgcctttcattttgatgctgtagaacagaatcaggataaatacgcccaatgccatagacagcgttacgttcacgtccgcagacggaaccacacgcagtgcaggcagacccagtacatgttcagcaatgtacggcagcaggtcgataggcagtaaatccatcaggttcatcaggaatacccagacgaagatcgtcagggccagcggagcaatcagcttgcttttgccatggtacatgtctttcacgctaccattaacaaagccgatcaccagctcaatcgcggtctgaaacttacctggcacaccgctggtcgcctttttggctacgctacggaataaaaccaggaacaacagacccagcaccaccgagaagaacatggagtcaatattgattgtccagaaggtggctggggggttttgtggatccaccagcgagaatgtacgcaggtccagctgaaggttattcaggtggtgtcctatgtaatcctgcggcgtcatattttctgaagccatgatgccttttaccctttgttgttaattacagccggtgccagtatctgaaccaccagcaccaaaacccacgtaacgatcagcggcaagaataccgcctttaaaaccgccaacgccaccaccagtaacaccaacatcgccagaactttgaaagcttcgccaaatgcgaatgtccaggccactcggcctttcgctggtgtatgcgcctggtgacgccaggcaaatatcataaacaaaacgttaggcagaaagactgccaggcccccgcttattgcagagacgccccagaaggggtctttgaggctgaacagcaatccacttgctatcaccaccagtaactgaacgagcagaagcttccgagcaacgtttcgactcacgagcgacacagacatcacgtttttcactcctgctcccttcgaggtatgccgcgtgtcgtataaaactttctttaaggcttagagtcaagcatcaaaaagcggtcaaattatacggtgcgcccccgtgatttcaaacaataagtagccaaaaggtgaataaatgtttaaatatttttccagtgcatacaattgcgacttttctgctaaccctgttcgatcatgaaaaactgtaaataacgcgtaaacactggtgataaagcgtgcttcagatcacatattgcgcatgttcgcgcacagcatatttatttacttggcaaatgatgcctttgcaagtttatgatatttcagtcaaaaaacagatactgttttaataaatgacatttacacaacaaaaaccacccattgacatttttaataatgttttaacagccaatgatggttcttagcgccgatttttagcagactgatattttcactaatgacttattttctgcttaccaaaaaaagccacgttatcttgttgatgcaaaagagtgaacgtggcgttaaatgtaaccagttatatcagtagaaaacctggttgttgttaacagtctaaccggtcaattttttatgatttttttgataaaaattaaattttatttgctttaatcaccaccagatgacgttcgccatccagggctggaacctgaagtttaaccactgattcgacctgatattcttcgggcaacaaagcgatttcatcttccggcatttgccctttcagcgcgtagaaacggccttgctcaccaggaagatggtggcaccagctcaccatatcgttcagagaggcaaaagcgcggctaattacgccatcaaatggcggctctgaaggaaactcttctaccctgctctgtactggctcaatattctccagtttaagctcatgttgcacctgacgaaggaaacgcacgcgtttaccaaggctatccaacagagtgaaatgggcttcaggacgcacgatagagagtggaatgccaggcagtccaggaccggtgccgacatcgataaaccgttcaccttgcagatacggtgccaccacaatgctatcgagaatatggcgtaccagcatctcattaggatcgcggaccgaagtcaggttgtacgctttgttccatttatgcagcatattcacgtaggcaataagctggtttttctggtgatcggtaagcgaaatacctgcgtctttcagcagtaaggagagtttgttgagcacggtgattacctgttcttgatgcattgcccggtaagcgggtgcttaccaggcatttttaatgcgttatgcgctacgacgcagcataccctgttttttcagccacaccagcagaatggagatggccgcaggcgtgacgccagaaatacgcgaagcctggccgatagaggctggtttgtgatcgttaagtttggcgatcacttcgttagaaagaccggatacctggcggtaatccagtgtcgcgggtagcagggtgttctcgttacgcagctgcttttcgatctcatcttgctggcgcgcgatataaccttcgtatttaacctgaatctcaacctgttccgccgcctgttcgtctgtcaacgcaggggcaaacggcgtcagcgtggttaatttttcataagtcatttccggacgacgcagcagatcttcaccactggcttcacgggaaagcggcgcagtcaggtgagcattcacttcggctgcagcttccgccgacggggttacccaggtcgatttcagacgctgacgctcacgctcgatattctcaagtttctcgttaaagcgcgcccaacgttcgtcatccaccaggcccagttcacgaccgatttcagtcaaacgcagatccgcattatcttcgcgtagcatcagacgatattctgcgcgcgaagtaaacatacgatacggttctttggttcctaaagtgcacaggtcatcaaccagtacgccgagatacgcctgagaacgcgccggagcccaaccttctttgtcagcagacagacgggcagcgttaagaccggccagcaaaccttgcgcagcggcttcttcgtaaccggtagtgccgttaatctgaccagcaaagaacagcccctggataaacttgctctccagcgtcggtttcaggtcgcgtggatcgaagaagtcatactcaatggcataacccggacgcacgatcttcgcgttttccatcccctgcatggagcggacgatttgcatctgcacatcgaacggcaggctggtggagataccgttcggataaatttcgttagaagtcagcccttccggttcaaggaagatctgatgctgatttctgtcggcgaagcgcatgactttgtcttcgatcgacgggcagtagcgtgggccgacaccttcgatcacccctgcgtacattgggctacgatcgaggttactgcggatcacatcatgggttttctcattggtatgagtgatataacacggcacctgctggggatgctgggacgcattgcccataaacgagaataccggcattgggttatcgccatgctgttgcgccagtacgctaaagtcgatggttcgagcatcaatacgcggtggtgtcccggttttcagacgaccaacgcgcagcggcagttcacgcaaacggcgagaaagcggaatggacggcggatcaccagcacggccaccgctgtaattatccagaccgatatgaattttaccgtcgaggaacgtcccaacggtgagcacgacggctttggcacggaacttcagccccatttgggtaacagcaccgaccacgcgatcgttttcgacaataagatcttcaaccgcctgctggaagatcatcaggttcggttggttctccagcgccgtacgtaccgcctgacggtagagcacacgatccgcctgagctcgggtagcgcgaactgccggtcccttgcttgcgtttagtatcctaaactggatacccgcctgatcgatcgctttcgccatcagaccgccgagtgcatccacttcttttaccagatgtcccttcccaataccgccgatcgccgggttgcagctcatctgccccagagtgtcgatattgtgtgtcaaaagcagagtctgttgacccatacgcgccgcggccatcgcggcctcggtgcctgcatgacccccgccaatgatgatgacgtcaaaaggatccggataaaacatggtgattgcctcgcataacgcggtatgaaaatggattgaagcccgggccgtggattctactcaactttgtcggcttgagaaagacctaggatcctgggtattaaaaagaagatctatttatttagagatctgttctattgtgatctcttattaggatcgcactgccctgtggataacaaggatccggcttttaagatcaacaacctggaaaggatcattaactgtgaatgatcggtgatcctggaccgtataagctgggatcagaatgaggggttatacacaactcaaaaactgaacaaccgttgttctttggataactaccggttgatccaagcttcctgacagagttatccacagtagatcgcacgatctgtatacttatttgagtaaattaatccacgatcccagccattcttctgccggatcttccggaatgtcgtgatcaagaatgttgatcttcagtgtttcgcccgtctgttttgcaccggaatttttgagttcagcctcgagtttatcaatagccccacaaaaggtgtcatattcacgactaccaataccgattgcgccaaagcggaccgcagaaagatcgggcttctgttcctgcaatgcttcatagaaaggagaaaggttgtccggaatatctccggcaccgtgggtggagctgataatcagccagatccccgaggcagataaatcttccaacagcggaccgtgcagcgtttcggtggtaaaacccgcctcttccagcttttcagccaggtgttctgctacatattcggcaccgccgagggtgctgccgctgataagagtgatatctgccataaaccgccacctttattaagagtggcgtattgtacgctgtgaacgcgttgggatctacctgtggaaaagtatgggattaaaaaagccgatcagggcttgatggtacgcatgatcgggttttgcaggacgatcaatgtctcggtggactgaatttcatcaattgtttggatcttgttgataagtacatgctggagagcgtcgatcgaacggcacatcacttttataaagatgctgtagtggccggttgtgtaataggcttcagtgacttcatcaaggctttccagctttgccagcgcggaagggtagtctttggcgctctttaatataatgccgataaagcagcctacgtcataaccgagctgcttcgggctgacatcaatacgcgccccggtaatgatccccgcctgcttcattttctctactcgaacgtgaatcgtccccggactgacgccaaattgtttcgccagttcggcgtaagcggtgcgcgcattgcccattaatgcttccaggatgccacggtccagattgtcgatcagataattttccataggattttcttatgcagattgatgattcattctattttagccttcttttttaatgaatcaaaagtgtgttaggctttttattgaatgattattgcatgtgtgtcggtttttgttgcttaatcataagcaacaggacgcaggagtataaaaaatgaaaaccgcttacattgccaaacaacgccaaattagcttcgtgaaatctcacttttctcgccaactggaagaacgtctggggctgatcgaagtccaggcgccgattcttagccgtgtgggggatggcacgcaggataacttgtcgggctgtgaaaaagcggtgcaggtaaaagtgaaagctctgcctgatgcccagttcgaagtggttcattcactggcgaagtggaaacgtcagaccttagggcaacacgacttcagcgcgggcgaagggctgtacacgcacatgaaagcccttcgccccgatgaagagcgtctttctccgttgcactcggtctatgttgaccagtgggactgggaacgcgtaatgggcgacggtgagcgtcaattctcgactctgaaaagcacggtagaggcgatctgggcgggaattaaagcaaccgaagctgcagttagcgaagagtttggtttggcaccgttcctgccggatcagatccacttcgtacacagccaggagttactgtctcgttatccggatctcgatgccaaagggcgtgagcgggcgattgcgaaagatcttggcgcggtattcctcgtcgggattggcggcaagctgagtgatggtcatcgtcacgacgtgcgcgcaccggattatgatgactggagcaccccgtcagagctgggccatgcgggtctgaacggcgatattctggtatggaaccctgtactggaagatgcgtttgagctttcttccatggggatccgcgtggatgccgacacgttgaagcatcagttggcgctgaccggtgatgaagatcgtctgcagctggaatggcatcaggcgctgctgcgcggtgaaatgccgcagaccatcggcggcggtatcggccagtctcgtttgaccatgctgctgctgcaactgccgcatatcggccaggttcagtgtggtgtatggccagctgctgttcgcgagaacgtcccttctctgctgtaataatttatcgccgccagcgtctgagcaggcggcttcgcatcccggtatcaaagcgccagatatgatcgaaaatgcgcatgatgccgggtttgccgtgtgccgacatcgccacggcatgaaagcgatgctgatgtacccgctgcagctctttcactttactcgtcacgtcgtcaggcaaccgctgagcgataaaatcagaaatcaccaccgcgtcggcatcaaaccattccctgctttgcaagcgttccataatggcgcgaaaacaactggcaagatcggtgccgccacgaaactgctggcttaaaaaacggattgcttgttcgatgccttgtgggcctgaaagctcataacggacgatctcggtggaaaatagcataatatagcagcgccggttttcagcgagagcaatgcgcatcaaggccaggcagaacgctttcgcacactgttcattaaagccgcccattgagccggaagtatccacacagacaataaacggcccgcgcggctgttcatcgtaatctttatgtaccaccggacgttcgatcactttttcacgccacgactcaccgtgcaggcgataggtgagcaactgtttttccaccagccgacggtaaaactcatactccagttccgttatccctagtgtcgccagttctggcggcaggagacgtaaaatatcatcgctttgttgcagaccatcaacctgctcaggaacagttgccggttcgcgcaccatggtgcggaaggcttccatctgcgcatcgttacgcggtattgatttggcttcccgggaacgccccagctgttctgccaggcgtttcagttccggctgttcgttaagaaattcaccgtatttcacaatcaactgatagtcgccacgtttaagctgaccggcgctcatatcccacagacgaccagctgcggtattgttatctgcgagaatcggttcaagttgtccgctcagcgtcatgcgttcctgaacttcacttaacagttgttcgcgttcttcttctaatagctgttgatttaacgtcgttgcttgcacgatcagacttaaacgccaacgctggaggaaaagcgtatgtaacgctgaagtgatcgtgctgttagcatcaaccaactgtcgggcttgttctgcccatggggaattcagacgatgcagtaagtccaggatctgtggtagctgcacaataaactgcggcgtggagaggagctggctttgctgatagcacatcacctcttcggtgagttccggcgggactcgggcatctttcagccgactgcgcagcgcctcacgccagcggggaacatcatcagtgattgccgccttcagtcgtgggaatttttcaaagaagactgccagctgcggtgaggccagcagcgcgatgatcatctcttcgatcaatccctcttcgctgacggccagcatcacattaagcgtatccagcgttagcattgttgtgcctggcgaatctgtgcgccgacatcctgtaggctggcttcaatgcgacctaaccagtcgccagggataaacagacatttttgctgttcgctgaataaagcgtgttgcttgcgccagtcactttcaagctcttccagttgttgttttatttcacctggcagaccttcagccgatgaaccgggaagtgccagcgtactgccttgtaaacttacatcgcgtacaacaagatgttgggcgctatccacttccagattcaatttctgggcaaagccgataccgttcagtttgccgcgaatttcaccacctttactcagccactgttccagcgcgttacgctcaaaggagatatgaaccacttccatatcatgcaattttaacggtttttgcagcagcagagtcagagtggaagcagtaacgttaacaggaagttgatactgctgacgacggctgaaaatgccgcccagacgaattaccgttaaggctgttttatcgctttgttgctgctggagttgcaggtgacgttgcacaatcgcgccaaggcgagtcaacatcccttgctgttgccaggcgtgaccggtcatcaatacatcaatttgttgttgtatcaaattcaggctttgcgcgtcataccacaggcaatctttcagcaaaatgagatctaccggggcaacagcactgcgaccgctaaaaaaggcgctggcctgcaataatcggatcgcttttttccagcgacgatccgagacataaggcgcatccggtaatttatccagttgctggcgcagcataaaaatcagctcaaatacatgatcgggcagcgtaatttcaccaatctctttctgccagcgttcatattcttcatctgtgacctgcaaggcatcaggaaccggattgtcgttttcatcctgttgactggtcagcatggagcggaaattcgctttatcctgcactttatctaaccacagacgaatcagcatgcggtcatataacgcttccagactgctgtctgcttccggcagctcgttggaggccgccaccagcagacgcatcgggattttttctacgtgtgcaccgttgcggaactggcgctcgttaatggcggtgagcaaggtattaagaattgccgggcccgctttccagatctcatccagaaagacaatttctgcttccggcaggtaaccgctggttaaacgttcatagcgcccttcatcttttagcgcctgaatagaaaggggaccaaaaacttcttccggcgtggagaagcgggtcatcagatattcaaacgcgcgggcattctgaaaggcgaattttaagcgccgggcgatcaaacttttggcaatacctggcgggccaaggaggaacacactttcaccacttaatgccgctaataaacacaagcggatggcgtggctacgttcataaagccccttttccaacgaactgctcaggcgggaaattctttccgctaataaatgagggtgagccataatgaagtggcgtcctttcgtcaaaagttctgcgtaaattgcgagtatagacgtttcttgctggtggctaaaatagtctcaaaggggggtaatgccagtcagttaagcaactgactggctctttttcggggctgtggggtatttccagggcctctcctttaccactctcgggaaggccctttcccttcttgtcggtaatttcacaagttgtccca

SEQ ID NO: 88 - DNA, 17537 bp, Escherichia coli
  source 1..17537: mol_type = genomic DNA
gctcagaaacaaggttgggacaagcacttccaggctaacacagtcagaaatcgaaacgtactctcaacagttcgcttaggcatggaagttttgcggcattctggctacacaataacaagggaagacttactcgtggctgcaaccctactagctcaaaatttattcacacatggttacgctttggggaaattatgaggggatctctcagcaccctgcactttttgcgacatataagccatcgcttcattgacggcgagcatcgcgccttcgccaccctgcgagacgctgcctgcaccatcagcaagaaacatcaccagtaatggttgctgatcgtttaaccaggcaacctgcatctggcaggcatcctgacaaggtaaatcagcgctaatgtgcgacgttccaacagcggatgcataaaccagacgccagctcacactgacgtccagccttttggcgcttccagtacaacttccgttcccggcgtggagcgggaaaccgaacgcagcgaactggataaccagctaaacagttcacggaattgtaatccttgcagaggcaaaggctgacgaacgctgatttgtgccagcgtcttcatatccgccccctgaacaccgatggaaaagaaggcaaacttcttatcttcttccccctgaaacactttgttggcggcagcctgccactcatcggttggagcgccatcggtgatcaggaaaatccacgggcgataatacgaaataccatttgcgcggtactcacgtttcctctcttcaaccatatccagggctttggtaatggcggcccccattggcgtatccccctgggcaaacaggatgggcgggaaaaagttagcggcgctggtaaagggttgttccacatgcaccgggccgaacgtcacaatgccgagttccactctttttaaagccagcggatcggcaagcagttcatcacgaaaggtcaccaatccggcgttaagttcattaataggtctgccgctcatcgagccagaaacatccagcagcagaatgcaggggcaacgtggttccgggttactggcaaaatcgctggtggcaaacgtgatttgttcgctcataagaaatcctttcttagagaattatcgaggtccggtatcataccgactgcaataatgaaataagagcaaacgaagaaactttcagaattaggcccggcggcgcagaaaattttgctattcgcctcgcaagaacggagagccgtcgattgacactaagtgcggagtgacataatttcaggagtgagggttagggagaggtttccccctccccctggtgttcttagtaagcctggaagctaatcactaagagtatcaccagtatgatgacgtgcttcatcataaccctttccttattaaaagccctcttctccgggagaggctttcccgtttcagcgtcccgctgaaatcatcggcttacctcctttcgccctgaatgcagtctatcgctaacgcgtgaataaaatagtttcctctgtgattattgcgtaacgactcgcaaagaatatttgctggcaggatcgcagacggcaaatcctgcggattgacaatcttatcgtgaaggcatactttcaggagtgagggtagagcggggtttcccccgccctggtagtcttagtatgctgggtagctaatcactaagagcaccacgatgatgagtagcttcatcatgaccctttccttatttaaggccccttcctcgggaggggctttcccgtttcagcatccggctgaaatctgcggcttacctcctttcgccctgtatgcagtctatcgctaacgcgtagataaaatagtttcctgtgttattactggatgcgtgctcgcaaatgtgcccgccattcagacgattcccgatagtgtttcataattcctccatttttctcccttattggctggctacactagtatcattccgcgaaacgtttcaggaagagaaactcttaacgatgaaaggcagttataaatcccgttgggtaatcgtaatcgtggtggttatcgccgccatcgccgcattctggttctggcaaggccgcaatgactcccagagtgcagccccaggggcgacgaaacaagcgcagcaatcgccagcgggtggtcgccgtggtatgcgttccggcccattagccccggttcaggcggcgaccgccgtagaacaggcagttccgcgttacctcaccgggcttggcaccattaccgccgctaatactgttacggtgcgcagccgcgtggacggtcaactgatggcgttacatttccaggaaggccagcaggtcaaagcaggcgatttactggcagaaattgaccccagccagttcaaagttgcattagcacaagcccagggccaactggcaaaagataaagccacgcttgctaacgcccgccgtgatctggcgcgttatcagcaactggcaaaaaccaatctcgtctcccgtcaggagctggatgcccaacaggcgctggtcagtgaaaccgaaggcaccattaaggctgatgaagcaagcgtcgccagcgcgcagctgcaactcgactggagccgcatcaccgcaccagtcgatggtcgcgttggtctcaagcaggttgatgttggtaaccaaatctccagtggtgataccaccggaattgtggtgatcacccagacgcatcctatcgatttagtctttaccctgccggaaagcgatatcgctactgtagtgcaggcgcaaaaagccggaaaaccgctggtggtagaagcctgggatcgcaccaattcgaagaaattaagtgaaggcacgctgttaagcctcgataaccaaatcgatgccacaaccggtacgattaaagtgaaagcacgctttaataatcaggatgatgcgctgtttcccaatcagtttgttaacgcgcgcatgttagtcgacaccgaacaaaacgccgtagtgatcccaacagccgccctgcaaatgggcaatgaaggccattttgtctgggtgctgaatagcgaaaacaaggtcagcaaacatctggtgacgccgggcattcaggacagtcagaaagtggtgatccgtgcaggtatttctgcgggcgatcgcgtggtgacagacggcattgatcgcctgaccgaaggggcgaaagtggaagtggtggaagcccagagcgccaccactccggaagagaaagccaccagccgcgaatacgcgaaaaaaggagcacgctcctgatgcaggtgttacccccgagcagcacaggcggcccgtcgcgcctgtttattatgcgtcctgtcgccaccacgctgctgatggtggcgatcttactcgccgggattatcggttatcgcgccctgcccgtttcggcgctgccggaagtggactatccgaccattcaggtggtcacgctctacccaggtgccagcccggatgtcatgacctctgccgttaccgcgccgctcgaacgccagttcgggcagatgtctggcctgaaacagatgtcgtcgcaaagttccggcggtgcgtcagttatcactttgcagttccagctaacattaccgctcgatgtcgccgagcaggaagtgcaggccgcgattaacgctgcgaccaacttgttgccgagcgatctgcctaacccgccggtttacagcaaagtgaacccggcagatccgccgatcatgacgctcgccgtcacctcaaccgccatgccgatgacgcaagtggaagatatggtggaaacccgcgtcgcgcagaaaatctcgcagatttccggcgtcggcctggtgacgctttccggcggtcagcgtccggctgttcgcgtcaaacttaacgctcaggcgattgccgccctcggcctgaccagcgaaaccgtgcgcaccgccattaccggcgctaacgttaactcggcaaaaggtagcctcgacggcccttcccgtgcggtcacgctttccgcgaacgaccagatgcaatccgccgaagagtatcgccagctaatcatcgcctaccagaacggcgcgccaattcgtctgggcgatgtcgcaactgtagagcaaggtgcagaaaacagctggctcggcgcgtgggcgaacaaagaacaggccattgtgatgaatgttcagcgccagcccggtgctaacattatctccaccgccgacagcattcggcagatgctgccacagctcactgagagtctgccgaaatcggtgaaggtgacagtgctttccgatcgcaccaccaatatccgcgcatccgtcgatgatactcagtttgaattgatgatggctatcgcgctggtagtcatgattatctacctgtttttgcgcaatattccggcgaccatcattcccggtgttgctgtaccgctgtcgttaatcggcactttcgcggttatggtgtttctcgatttttcaatcaataacctgacactgatggcgttaactatcgccaccggattcgtggtcgatgacgccatcgtggtgatcgaaaacatttcccgctatatcgaaaaaggcgaaaaaccgttggcggcggcgctcaagggcgcaggtgaaatcggctttaccattatctcgctgaccttctcactgattgcggtgttgatcccactgctgtttatgggcgatatcgtcgggcgactgttccgcgaatttgctattacgctggcggtagcgattttgatctcagcggtggtgtcgctgaccctgacaccgatgatgtgcgcgcggatgctcagccaggagtcgttgcgtaaacagaaccgcttctcccgtgcctcggaaaaaatgttcgacaggataatcgccgcctatggtcagggacttgcgaaagtgctgaatcatccgtggctgaccttaagcgtggcactcagcacgctgctgcttagcgtgctgctgtgggtgttcattccgaaaggtttcttcccggtacaggacaacggcattattcagggcactttgcaggcaccgcaatccagctcctttgccaatatggcccagcggcaacgccaggtcgcggacgtgattttgcaggatccagcggtgcaaagtttgacctcatttgttggcgttgatggcactaacccgtcgctgaacagtgcgcgtttgcagatcaacctcaaaccgttggaggaacgtgatgatcgggtgcaaaaagtcatcgcccgtctgcaaacggcggtggataaagtgccgggcgtcgatctcttcctgcaaccaacgcaggacctgaccatcgatactcaggtcagccgcacccagtaccagtttaccttgcaggccacctcactggatgcgctcagtacctgggtgccacagttgatggaaaaactccagcaactgccacagctttctgatgtctccagcgactggcaggacaaagggctggttgcgtatgtcaatgttgatcgcgacagcgccagccgtctggggatcagcatggcggatgtcgataacgccctgtacaacgcgtttggtcagcggctgatttccactatttatactcaggccaaccagtatcgcgtggtgctggagcacaacaccgaaaataccccaggcctcgcggcgctggataccattcgcctgaccagcagcgacggcggcgtggtgccgctaagctcaattgccaaagttgaacagcgttttgcgccgctttccattaaccatctggatcagttcccggtaacgaccatctcctttaacgtgccggataactattcgctgggcgatgcggtgcaggcgattatggacaccgagaagacgctgaatctgccggtggatatcaccacgcagttccagggcagcaccctcgccttccagtcggcgctgggcagcactgtctggctgattgtcgcggcggtggtggcgatgtatatcgtgctcggcattctgtacgagagctttattcacccgatcaccattctctcgacgctacccaccgcaggggtcggcgcactgctggcattaatgattgccggaagtgagctggatgtgattgcgattatcggcattattttgctgatcggtatcgtgaagaagaacgccatcatgatgatcgacttcgcgctggctgctgagcgcgagcaaggcatgtcgccgcgcgatgccatctaccaggcttgtctgttgcgttttcgtccgatcctgatgaccactctggcggctctgcttggcgcgctgccgctgatgttgagtaccggggtcggcgcggaactgcgtcgtccgttaggtatcggcatggtcggcggcctgattgtcagccaggtgctgacgctgtttaccacgccggtgatttatttgctgttcgaccgcctggcattgtggaccaaaagccgctttgcccgtcatgaagaggaggcgtaagtgaagttttttgccctcttcatttaccgtccggtggcgacgattttactgtcggttgccattaccctgtgcggcatactgggcttccgtatgctgccggtcgccccgctgccgcaggtcgattttccggtgattatggtcagcgcctcgctgcccggtgcgtcaccagaaacaatggcgtcttccgttgccacgccgctggagcgctcacttgggcgcattgccggagtcagtgaaatgacctccagcagttcgctcggcagcacgcgtattattttgcagtttgattttgaccgggatatcaacggcgcagcgcgtgatgtgcaggcggcgatcaacgctgcacaaagtttgctgcccagtgggatgcccagccgcccgacctatcgcaaagcgaacccgtcggatgcgccaattatgatcctcacgctgacatccgatacttattcgcagggtgaactgtacgatttcgcctcgacgcagctggctccgacgatttcgcaaatcgacggtgtcggtgatgtcgatgttggcggcagctcgctgcccgccgtacgcgtcgggctgaatccgcaggcgctgtttaatcagggcgtctctctggacgacgtacgcaccgccatcagcaatgccaacgtgcgtaaaccgcagggggcgctggaagatggcactcaccgctggcagatccagaccaatgatgagctaaaaaccgccgccgaatatcagccgttgattattcattacaacaacggcggcgcggttcgtctgggcgatgtggcgacggtgaccgactcggtgcaggatgtgcgcaacgccgggatgaccaacgccaaaccggctattttgctgatgatccgcaagctgccggaagccaatattatccagacggtagacagcatccgggcaaaattaccggagttgcaggaaaccattccggcggcgattgatctgcaaattgctcaggatcgctcccccaccattcgcgcctcgctggaagaagtcgagcaaacgctgattatctcggtggcgctggtgattctggtggtgtttttattcctgcgctcgggtcgcgccactattattcccgccgttgcggtgccggtttcgctgattggtacgtttgcagcgatgtacctgtgcggattcagtctcaataacctttcgttaatggcgctcaccatcgctactggtttcgtggtggatgacgccatcgtggtgctggaaaacattgcccgtcatctggaagcggggatgaaaccgctacaggccgcgctacaaggtactcgcgaagtcggctttacggtgctgtcgatgagtctgtcactggtggcggtgttcctgccgctgctgttgatgggcggattgccgggccgactgttacgcgaatttgccgtgacgctttctgtcgccattgttatatcgttgctggtttctctgacattaacgccaatgatgtgtggctggatgctgaaagccagcaagccgcgtgagcaaaagcgactgcgtggttttggccgcatgttggtagccctgcaacaaggctacggcaagtcgctgaaatgggtgctcaatcatacccgtctggtgggtgtggtgctgcttggcaccattgcgctgaatatctggctgtatatctcgatcccgaaaaccttcttcccggagcaggacaccggcgtgctgatgggcgggatacaggcggatcagagcatttcgtttcaggcgatgcgcggcaaattgcaggatttcatgaaaattatccgtgacgatccggcagtggataatgtcaccggctttaccggcggttcacgagttaacagtgggatgatgtttatcaccctcaagccacgcgacgaacgcagcgaaacggcgcagcaaattatcgaccgtctgcgcgtaaaactggcgaaagaaccgggggcgaatctgttcctgatggcggtacaggatattcgcgttggtgggcgtcagtcgaacgccagctaccagtacacgttgttatccgacgacctggcggcactgcgagaatgggagccgaaaatccgcaaaaaactggcgacgttgccggaactggcggacgtgaactccgatcagcaggataacggcgcggagatgaatctggtttacgaccgcgacaccatggcacggctgggaatcgacgtacaagccgccaacagtctgttaaataacgccttcggtcagcggcaaatctcgaccatttaccagccgatgaaccagtataaagtggtgatggaagtggatccgcgctatacccaggacatcagtgcgctggaaaaaatgttcgttatcaataacgaaggcaaagcgatcccgctgtcgtatttcgctaaatggcaaccggcgaatgccccactatcggtgaatcatcagggattatcggcggcctcgaccatttcgtttaacctgccgaccggaaaatcgctctcggacgccagtgcggcgatcgatcgcgcaatgacccagcttggggtgccttcgacggtgcgcggcagttttgccggcacggcgcaggtgttccaggagacgatgaactcgcaggtgatcctgattatcgccgccatcgccacggtgtatatcgtgctgggtatcctttacgagagttacgtacatccgctgacgattctctccaccctgccctcggcgggcgttggagcgctgttggcgctggagctgttcaatgccccgttcagcctaatcgccctgatagggatcatgctattaatcggcatcgtgaagaaaaacgccattatgatggtcgattttgcgcttgaagcccaacggcacggtaacctgacgccgcaggaagctattttccaggcctgtctgctgcgttttcgcccgattatgatgaccaccctggcggcgctgtttggtgcgctgccgctggtattgtcgggcggcgacggctcggagctgcggcaacccctggggatcaccattgtcggcggactggtaatgagccagctccttacgctgtataccacgccggtggtgtatctctttttcgaccgtctgcggctgcgtttttcgcgtaaacctaaacaaacggtaaccgagtaaatgacagatcttcccgacagcacccgttggcaattgtggattgtggctttcggcttctttatgcagtcgctggacaccaccatcgtaaacaccgcccttccctcaatggcgcaaagcctcggggaaagtccgttgcatatgcacatggtcattgtctcttatgtgctgaccgtggcggtgatgctgcccgccagcggctggctggcggacaaagtcggcgtgcgcaatattttctttaccgccatcgtgctgtttactctcggttcactgttttgcgcgctttccggcacgctgaacgaactgttgctggcacgcgcgttacagggcgttggcggcgcgatgatggtgccggtcggcagattgacggtgatgaaaatcgtaccgcgcgagcaatatatggcggcgatgacctttgtcacgttacccggtcaggtcggtccgctgctcggtccggcgctcggcggtctgctggtggagtacgcgtcgtggcactggatctttttgatcaacattccggtggggattatcggtgcgatcgccacattgatgttaatgccgaactataccatgcagacgcggcgcttcgatctctccggctttttattgctagcggttggcatggcggtattaaccctggcgctggacggcagtaaaggtacaggtttatcgccgctgacgattgatggcctggtcgcagttggcgtggtggcactggtgctttatttgctgcacgccagaaataacaaccgcgctcttttcagtctgaaactgttccgcactcgtaccttttcgctgggcctggcggggagctttgccggacgtattggcagtggcatgttgccctttatgacaccggttttcctgcaaattggcctcggtttctcgccgtttcatgccggactgatgatgatcccgatggtgcttggcagcatgggaatgaagcgaattgttgtacaggtggtgaatcgctttggttatcgtcgggtactggtagcgaccacgctgggtctgtcgctggtcaccctgttgtttatgactaccgctctgctgggctggtactacgttttgccgttcgtcctgtttttacaagggatggtcaactcgacgcgtttctcctccatgaacaccctgacgctgaaagatctcccggacaatctggcgagcagcggaaacagcctgctgtcgatgattatgcaattgtcgatgagtatcggcgtcaccatcgccgggctgttgctgggactttttggttcgcagcatgtcagcgtcgacagcggcaccacacaaaccgtctttatgtacacctggcttagcatggcgtttatcatcgcccttccggcgttcatctttgccagagtgccgaacgatacgcatcaaaatgtagctatttcgcggcgaaaaaggagcgcgcaatgaagttctggcgacctggtattaccggcaaactgtttctggcgattttcgccacctgcattgtcttgctgatcagtatgcactgggcggtgcgtatcagttttgagcgtggctttattgattacatcaagcatggtaatgaacagcgattacaactgttaagtgatgcgcttggcgagcagtatgcgcagcatggcaactggcgcttcctgcgcaacaatgatcgctttgtctttcagatcctgcgttcatttgaacacgataattcggaagataaacccggcccgggtatgccaccgcacggctggcgtacccagttctgggtggttgatcaaaacaacaaagtgctggttggtccgcgagcgccgattccacctgacggtacacggcgacccattctggtcaacggtgcggaagttggcgcggtgatcgcctcccccgttgagcggttaacgcgcaatactgatatcaatttcgataaacaacagcggcaaaccagctggttgattgtcgccctggcaacgttactcgcggcacttgccacttttctgctggcgcgcggtttactggcaccggtaaaacgacttgtcgatggcacgcacaaactggcggcgggcgatttcactacccgcgtaacgcccaccagtgaagatgaactgggcaaactggcgcaagacttcaaccagcttgccagcacactggagaaaaaccagcaaatgcggcgcgattttatggccgatatttctcacgaactgcgtacgccattagcggtgctgcgcggtgaactggaagccattcaggatggcgtgcgtaaattcacgccggagacggtggcgtctttacaggcggaggtcggtacactgaccaaactggttgacgatctccatcagttgtcgatgtctgatgaaggcgctctcgcctatcaaaaagcaccggtagatttgatcccactgctggaagtggcgggcggcgcatttcgcgaacgattcgccagtcgtggcctgaaactgcaattttccctgccagacagtattaccgtatttggcgatcgcgaccgtttaatgcagttattcaataacttactggaaaacagcctgcgctacactgacagcggcggcagcctgcaaatctctgccgggcagcgcgacaaaacggtgcgcctgacctttgccgacagtgcgccaggtgtcagtgacgatcagctacaaaaattgtttgaacgtttttatcgcaccgaaggttcccgcaaccgtgccagcggcggttccgggctggggctggcgatttgcctgaacattgttgaagcacataatggtcgcattattgctgcccattcgccttttggcggggtaagcattacagtagagttaccgctggaacgggatttacagagagaagtatgaccgagttaccaatcgacgaaaacacaccgcgtattttgatcgtggaagatgaaccgaagctggggcagttgctcattgattatctgcgtgctgcgagctatgcgccgacgcttatcagccacggcgatcaggtactgccgtatgtgcgccagacaccaccggatctgatcctgttggatctgatgctccctggcatcgatggcttgacgctgtgccgggaaattcgtcgtttttctgacattcctatcgtgatggtgacggcaaaaatcgaagagatcgaccgcctgctcggactggagattggcgcagatgactacatctgcaagccgtacagcccacgggaagtggtagcgcgcgtcaaaaccattttgcgccgttgcaaaccgcagcgcgagttgcagcaacaggatgctgaaagcccgttgattatcgacgaaggtcgttttcaggcttcatggcgcggtaaaatgcttgacctgacacctgcggaatttcgtctgctgaaaacgctctctcatgaaccaggaaaagtgttctcccgcgagcatttgctcaatcatctttatgacgactaccgcgtagtaaccgaccgcaccatcgacagccacattaaaaacctgcgccgcaagctggaatctctcgacgccgaacagtcatttatccgcgccgtttacggcgtcggttaccgctgggaagccgacgcctgccgcatcgtttagttttagcgacatgactttgttagccggagatggcgttcagaccagatccggcaacattatcccacgcatggtcagcaaactgacattatctctccgccctggcaggcatcagaaaatcgctcatactttaatcggtaaacagcacctttagatgctgttttcgatacgcaatttcaatcaaggagtcattatggctggttggtttgaactcagtaagagcagtgataatcagttccggtttgtgctaaaagcgggcaatggtgagactatcctcaccagcgagctgtatacctcaaaagcctctgcggaaaagggcatcgcgtcggtgcgtagcaacagcccgcaagaagaacgctatgagaaaaaaacggcaagtaacggcaaattctatttcaatctgaaagccgctaatcatcaaattatcggctccagccagatgtacgccaccgcgcaatctcgtgaaaccggaattgcctccgttaaagccaatggcacaagccagacggtgaaagacaatacgtaattacgatgccgggcgtgggttgttggcgtccggctttatatccaaataacgcttagttattaataattaagagtaaccgccgccattaaaatagtgggcactgacgagcactcgttgtgctttctttgtttaccatcccatacttatcctcctgaacatgttcatgtgccaaaatatcttctaatactttcgtgacgctatccggtttatgacatacactgatgtaagatttttacttacaggcgggcgtaaaatggccagaacgatgacggttgatctcggcgatgagttgcgtgaatttatcgagtccttaattgaatccggcgactatcgcacccaaagcgaagtgatccgtgagtcactgcgattacttcgagaaaagcaagcagagtctcgcctgcaagcgttacgtgacatgctcgcagaagggttgagtagtggtgaagctcagccgtgggaaaaggacgcgttcttacggaaggtgaaagcagggataaggaaataatgtgcgtattattaaactcatgccaaaagccaatgaggatttagaaggcatctggtattacagctatcaccatttcggcgaaccacaagccgacagatatgtggaacatctttcagacgttctccagattctgagtaacaataatataggtacgcccagacctgaattaggcgaaggtatttttgttcttccttttgaacgccacgtcatttatttcctgcaatcaccaggggaaattatcgtcattcgtatccttaaccaaaaccaggacgccaccagacatttacactggagctaaacccgccgattgcgctacaatgcccgcccttaaagtgggggcactcccctaaccgcttcatcaggtgaagcggatctgacctgtcatcagaacgagagaattatgtttaaaccggaactcctttccccggcgggaacgctgaaaaatatgcgttacgctttcgcttatggcgcagatgctgtttatgcgggccagccgcgttattccctgcgtgtgcgcaacaacgaattcaaccacgaaaatcttcagctcggcatcaatgaagcccacgcgctggggaaaaagttttatgtcgtggtcaacattgcaccgcacaacgccaagctgaaaacctttatccgtgacctgaaaccggtggtggaaatggggccggatgcgctgattatgtccgatccagggctgattatgctggtgcgtgagcacttccctgaaatgccgatccacctttcggtgcaggctaacgccgtgaactgggcgacggtgaaattctggcagcaaatgggcctgacccgcgtgatcctctctcgcgagctgtcgctggaagagattgaagagatccgcaatcaggtgccggatatggagatcgagatcttcgttcacggcgcgctgtgcatggcctactccggtcgctgcctgctctctggctatatcaacaagcgcgacccgaaccagggcacctgcaccaacgcctgccgctgggagtacaacgtccaggaagggaaagaagatgatgttggcaacatcgtacacaagtacgagccgattccggtgcaaaatgttgagccgacgctgggtatcggcgcaccaaccgacaaagtgtttatgatcgaagaggcccagcgtccgggcgagtatatgaccgcgtttgaagatgagcacggcacttacatcatgaactcgaaagatctgcgcgccatcgcccatgtagaacgcctgaccaaaatgggcgtgcattcgctgaagatcgaaggccgtactaaatctttctactattgcgcacgcaccgcacaggtttatcgtaaagctatcgatgatgccgctgcgggcaaaccgttcgataccagcctgctggaaactctggaaggtctggcgcatcgtggctataccgaaggtttcctgcgtcgtcatactcacgacgattatcagaactacgaatacggttattcggtttctgaccgccagcagtttgttggtgagtttaccggtgagcgcaagggggacctcgcggcggtagcggtgaaaaataaattctccgttggcgacagccttgagctgatgacgccgcaaggcaacattaactttacccttgagcacatggaaaacgccaaaggcgaagctatgccggtagcaccaggcgatggttatactgtgtggctcccggtgccgcaggatcttgagctaaattacgcgctgctgatgcgtaatttctccggggaaaccacgcgtaacccccacggtaagtgattaatttcgattatttttcccggatggaaaattcttagaaaccgatcacatacagctgcatttattaaggttatcatccgtttcgctgaaaaacataacccataaaatgctagctgtaccaggaaccacctccttagcctgtgtaatctcccttacacgggcttattttttatgcataagccctatccctggtcaccgtcttccattgaccacatcgatagaatctcccttcatagcacgatgcctttcacgtaacggcatcgtgctcgcacaggttccggctaagcacaaccagaacgcgcatgtttgacgcttaccaaaaaatattctcactctccacatttgaatgtcagacgagcgacgccatgtaatcctgcaccttctgtcttcaggtcaactatctgcatttttttgccctgagtaacacagaaatgggctgcatcattttttactatattttctgcaccagatattctgcccctggctaaagaagcttcggcttcggtgtagtattggttatcgagtttacgctgaatattacttttatatgcaagaccaaatttaccgatacttgtctcatcattatgcacagcacaaccagacacaataaaaatactaattaatgatatagcagctatctttttcatctcaccttcccccattaaataccaacgacactctctagtgtttaaatataataatggcatgattattataattgaataggattataataaatgttctgtacaacatttcctacataagtaggaattacggacattgaggcccttcagggtaactccatgggggctttaatatattatattgaagatgccactgtttagttgaatattaggtatatgctcttttttgaaatttatcggtggcagccgttagtattcgctgtccccattgcaagctcctggtggtaaccactgaatcctccatacttgaactgactttttatcctccgactttcatcctgttctgactccaccttttgttttctgctctacactatctacagaccaatcataaaggcacatacgatcatggcagaatttcccgccagcttactgattcttaatggcaaaagtactgacaatctacccttgcgcgaagcaattatgctgttgcgtgaggaaggaatgacgatccatgtgcgggtcacctgggagaaaggcgatgccgcacgatatgtagaggaggcccggaagttgggcgtcgcaacggtgattgccggtggtggcgatggcaccattaatgaagtttctacggcgttgattcagtgtgagggggatgacatacccgcgctgggaattttgccattaggaaccgccaatgattttgccaccagtgtagggattcctgaggcactggataaggcgctgaaactggcaattgccggtaacgccattgcgatagatatggcgcaggtcaacaaacaaacctgttttattaatatggcgacaggcggatttgggacgcgtattaccacagaaacgccggaaaaattaaaagccgcgctgggtggcgtctcttacatcattcatggcttaatgcgcatggatactctgcactgagagatcccctcataatttccccaaagcgtaaccatgtgtgaataaattttgagctagtagggttgcagccacgagtaagtcttcccttgttattgtgtagccagaatgccgcaaaacttccatgcctaagcgaactgttgagagtacgtttcgatttctgactgtgttagcctggaagtgcttgtcccaaccttgtttctgagc

SEQ ID NO: 89 - DNA, 17000 bp, Escherichia coli
  source 1..17000: mol_type = genomic DNA
aaaatatcgagttcgcacatcttgttgtctgattattgatttttcgcgaaaccatttgatcatatgacaagatgtgtatccaccttaacttaatgatttttaccaaaatcattaggggattcatcagcacttaactgcaactcttttgccacttcggtaccagcaatagacagcgttgcacgatcggcgtagttaacggcggtaacaataaaaataatcagtaatattaaatagcgggtatgcacgcctttctttttttcgtcaacggtgtccagaatcattttatttacctcgggtacttatgctgatttttattattatggggaaggtgttatttatgagtttcatttatgccgtaacggcaatgaactcgggaattagtataagcagcgcgagaataataatcattgtgcaaatgctaatttaattaatgctatttaaatattattttgagcatatgcacataaggttgcgcgctaaagcacagatttgcgctttaccttgccgggcggcactgcaatccctgaaatgattgacattgatcacatttctgcgtttaaactcctgacattcttatttcacccaatgaagtcatttatttttaaatgagaccaggtcctcattttaataacccctggctggagaatattgcacaatggccaacatcgaaatcagacaagaaacgccaactgcgttttatataaaagttcacgacacagataatgtggcaattattgttaatgataatggcctgaaagcaggaacgcgttttccggatgggctggaattaattgaacatattccccaggggcataaagtcgcattgctggacattccggctaatggtgaaattattcgttatggcgaagtgattggttacgccgtgcgtgcaatcccacgcggaagctggatcgacgaatcaatggttgtactaccggaagcgccgccgttacacacgctgccactggcaaccaaagtcccggcccccttaccgccgctggaaggatacacctttgagggctatcgcaatgccgatggcagcgtgggcaccaaaaacctgctcggcatcaccaccagcgtccactgtgtggcaggcgtggtggactatgtagtaaaaatcattgaacgcgatctgctaccgaaatacccgaacgtcgatggcgtggtggggctgaatcatttgtacggctgtggcgtggcgattaacgcaccggcggcagttgtgcctattcgtaccatccacaatatttcgctgaaccctaactttggcggcgaagtaatggtgattggtctgggttgtgaaaagttgcagcctgagcgcctgctggtcggcacggatgatgtgcaagctattccagtagaaagcgccagcattgtcagtttgcaggatgaaaagcatgtcggttttcagtccatggtcgaggatattttgcaggtcgccgaacgccatctacaaaaactgaatcaacgtcagcgagaaacctgtccggcttcagaactggttgtcggcatgcagtgcggtggcagcgatgccttttctggcgtaacggcaaacccggcggttggctatgcgtctgatctactggtgcgctgcggcgcaacggtgatgttctcagaagtcacggaagtgcgtgacgcgatccatctgctgacaccacgcgcagtgaacgaagaggtcggcaaacggctgctggaggagatggagtggtacgataactatctcaatatgggaaaaaccgaccgcagcgccaacccttcgccgggcaacaagaaaggcggtctggcaaacgtggtagagaaggcactcggctccattgctaaatcgggtaaaagcgcaattgttgaagtgctgtcgcccggtcaacgcccgactaaacgcggattaatttacgccgcgacgccagccagcgattttgtctgtggcacgcaacaggtggcttcgggtatcaccgtgcaagtgtttacgaccggtcgtggtacgccgtacggcctgatggcggtacccgtcattaaaatggcgacccgcaccgagctggcgaaccgctggtttgatttaatggatattaacgcgggcactatcgccaccggcgaagaaaccattgaagaggtgggctggaagttgttccactttattctcgacgtcgccagcgggaagaagaaaaccttctcggatcaatgggggctgcataaccagctggcagtgtttaacccggcaccggtgacctgatttcttttggaacgtccctcgcaaaacatggccttagtgccatgtttttattgtttaaagcccccacgtccattaataatgcatttgcattaccttagttcaagcttataatttgagcagaaaacaggctgtaaaaggacagtgaatcatgcccgctaatgctcgctctcacgctgtactgaccactgaatcaaaggtcacgatacgcggacaaacaactatccccgcgccagtgcgtgaggccttaaaactgaagccaggccaggacagcattcattacgaaattctgcctggtgggcaagtctttatgtgccgactgggagatgaacaggaggatcatactatgaatgcatttttgcgttttctggatgcagatatccagaacaacccgcaaaaaactcgtccattcaacattcaacaaggaaagaaacttgtcgctggcatggacgtcaacattgatgatgagattggcgacgacgaataatggattttccacaaagggttaatggttgggcgctatatgctcatccctgttttcaggaaacctacgacgctttagttgccgaagtcgagacattaaagggaaaagatcctgaaaattatcagagaaaagccgccacaaagttattggcggtagtccataaagtgattgaggagcatatcacggtcaatccatcatcaccggcattccgtcatggcaagtcgttaggctctgggaaaaataaagactggtcacgggtaaaatttggtgctggtcgttatcgtctcttctttcgttatagtgaaaaagagaaagtcatcattctgggatggatgaacgatgaaaacactctgcgcacctacggtaaaaaaacagatgcctataccgtattcagcaaaatgttaaaaagaggacatcctcctgccgactgggaaagcctcacccaagagacagaagaaaaccattgatggtgttcacaatgcccgccgaacgtattcgtgttgaccagcgggcaccctttctcactccccgaccagaatcacttcaaccccagcctttcgcagtccttccaggctatccgcaggaatgccttcatcaacaatgatcatgtcgatacgttgagtatcaatgatcttatgtaaactggaacgattgaacttactggaatcggtgacgacgatgatccgttccgcaacttcgcacatccgacggtttaaacgggcttcatcttcattatgtgtgctgacgccgcgctccagatcgatcgcatctacaccaagaaacagcatatcgaagtggtaattttgcagcgattgctcagcctgatcgccgtaaaaagattgcgactgacggcgcaaatgcccgccggtcatcagcagctcaacgccttccgcttccagcaacgcattagccacgttcataccgttggtcatcgcaattacgtcagtgtgcttgcgcatcagacgagcaatctcaaaagtggtggtcccggaatcgaggatcacccgatgacctggctgaatcaactcaacggcagctttcgcaacgctgcgtttcatcgcggtgttcagcgcgcttttatcttccactgatggctcgactggcggcgtcgtgctatcgcagatcaacgcgccaccataggcacgcacagcgatcccctgcttttccagaaacgccagatcattgcggatcgtcacagtagatacgccatacaatgccgacagatcgttaacctgcacactcccttgctgtcgcagacgctgaatgatctgttctcgtcgctcgctggtgccagtcactcgcttctcacctgaagcgtcggtattactcatagtaagtcctttcgtaaaactttcgtttcatttcgttttgcctattaacgcctttctattaagcaaatgcaagcccaccttgcccattgacgcaagctactctcgtttcagtgactttcattatgtttcttttgtgaatcagatcagaaaactattatctttcgttttatttttatctcaccatgacgcagtatcaactgaaacaaaacgaaagattaatatcgcagtaatctgaactggagaggaaagtgaaacatctgacagaaatggtgagacagcacaaagcgggcaaaacaaatggaatttatgccgtttgttccgcacatccgctggtgctggaggctgcaatccgctacgccagtgcaaaccaaacgccgttactgattgaagcaacctccaatcaggtagaccagttcggcggttataccggaatgacgcccgccgattttcgcggctttgtttgtcagctcgccgaatcgttgaatttcccgcaggatgcgttgattctgggtggtgaccatctggggccaaaccgctggcaaaacctgccggccgctcaggcaatggccaatgccgatgatttgattaaaagctacgttgcggcaggattcaaaaaaatccaccttgattgcagcatgtcctgtcaggacgatccgattcccttaactgatgacatcgtggctgaacgcgccgcccgtctggcgaaagtggcggaagaaacctgtcttgaacactttggcgaagccgatctggagtatgtcattggtaccgaagtgccggtacctggcggcgcgcatgaaaccttaagcgagctggcggtcaccacgccggatgccgcccgcgccacgctggaagcccatcgtcacgcctttgaaaagcaaggtttgaatgccatctggccacgcatcattgccctggtggttcaacccggcgtcgaattcgatcacaccaacgttattgattatcagcccgccaaagcgagcgccttaagccagatggtcgaaaactacgaaacgctgattttcgaagcgcactctaccgattatcaaacgccgcaatcgctgcgccagctggtgattgaccactttgccattctgaaagttggcccagcgctgaccttcgccctgcgtgaagctctgttctctctggcggcgattgaagaagaactggtgccagcgaaagcctgttctggtctgcgtcaggtgctggaagacgtgatgctcgaccgcccggaatactggcaaagccactaccacggtgacggcaacgcgcgtcgtctggcgcgtggttatagctactcggatcgcgtgcgctattactggccggacagccagattgatgacgctttcgctcatctggttcgtaatctggcggattcaccaattccgctaccgctcatcagccagtatctgccgctgcaatacgtgaaagttcgctccggcgagctgcaaccgacgccacgggaactcattatcaaccatattcaggacatcctggcgcagtaccacacagcctgtgaaggccaataagcaaaataaagaggaacacgctatgccaaatattgttttaagccggattgatgagcgtttgattcacggtcaggtcggcgttcaatgggtcggatttgcgggggcaaatctggtgctggtagccaacgatgaggttgccgaagatccggtacaacaaaacctgatggaaatggtactggcagaagggatcgccgtacgtttctggacgctgcaaaaagttatcgacaacatccatcgcgccgccgatcgacagaaaatcctgctggtttgtaaaacacctgccgatttcctgacgctggtgaaaggtggcgttccggtgaatcgcattaacgttggcaatatgcactacgccaatggcaagcaacaaatcgccaaaacggtttctgtggatgcgggtgatatcgcagcatttaacgacctgaaaaccgctggggtggaatgcttcgttcagggcgtcccgacagagcctgctgtggacctctttaaattactttgagggattcatcatggaaatcagtctgttgcaggcattcgcgttgggcattatcgcctttatcgctggcctggatatgtttaacggtctaacccatatgcaccgcccggtggtcctcggcccgttggtcgggctggtacttggcgatctgcataccggtattttaaccggcggtacgctggaactggtgtggatggggctggccccgctggcgggcgcacagccgcctaacgtgattatcggtactatcgtcggcacggcgtttgccattactactggcgtgaaacccgatgtcgcggtcggtgtcgccgtacctttcgctgtcgcagtacagatggggattaccttcctgttctcggtgatgtctggcgtgatgtctcgctgcgaccggatggcggagaacgccgatactcgcggcattgaacgcgtgaactatctggcactgctggcactcggcactttctattttctctgcgctttcctgcctatctacttcggcgcggaacatgcaaaaaccatcattgatgtcctgccgcaacgattaatcgacggcctcggcgtcgcgggcggcatcatgccagcaatcggttttgccgtgctgctgaaaatcatgatgaaaaacgtctacatcccctacttcatcctgggctttgttgccgcagcctggctcaagttaccggtgctggctattgctgccgctgcgctggcgatggcgctgatcgacctgctgcgtaaatctcctgaaccgactcaacctgcggcacagaaagaggaatttgaagatggcatctaatcaaaccaccctgccgaacgtcagtgaaaacgaagaaacattgctgactggcgtcaatgaaaacgtgtatgaagatcagagcattggcgcggagctgacgaaaaaagatatcaaccgcgtcgcctggcgttccatgctgttacaagcgtcttttaactacgaacgtatgcaggcttctggctggttgtacggtctgctgcctgctctgaaaaagatccacactaataaacgcgacctggcgcgcgccatgaaggggcatatgggtttcttcaatacccatccgtttctggtgacatttgttatcggcattatccttgcgatggagcgttctaagcaggacgttaacagtattcagagcaccaaaattgccgtcggtgcgccgctcggcgggattggcgatgcaatgttctggctaacgctactgccgatttgtggcgggataggcgcaagccttgcgctacaaggctctattcttggcgcagtcgtatttattgtgctgttcaacgtggtacacctggggctgcgttttggtctggcgcattatgcttaccgcatgggcgtggcggcgattccactcattaaagcgaataccaaaaaagtcggccatgctgcgtctatcgttgggatgacggtaatcggcgcgctggtggcaacctatgttcgtttaagcaccacgctggaaatcacagcgggcgacgcagtggttaagttacagactgatgttattgacaaactgatgcctgccttcttaccgctggtctacaccttgaccatgttctggctggtacgccgcggctggagtccgctgcgtctgattgcagttaccgtggttctcggcatcgtcggtaaattctgccatttcctttaaatacaatgaggtattagatgttaagtattattttgacagggcatggcgggtttgccagcggcatggaaaaagcaatgaagcaaattctcggtgagcaatcgcagtttatcgccatcgattttccggaaacctcaagcaccgcgctgcttacatcgcagcttgaagaggccatcgcccaactggattgtgaagacggcattgtttttctgacggatttgctgggcggcacgccgtttcgcgtagcttcaacgctggcgatgcaaaaaccgggctgtgaagtgatcaccggcaccaatttgcaactgctactggagatggtgctggagcgcgaagggttaagcggtgaagaattccgtgtacaggcgctggagtgtggacaccgagggctgaccagtctggtggacgagttaggccgctgccatgaagaatgtccggtcgaggaaggaatatgacacaccttctgcgcgccagaaggctgctgactgaagagggatggctcgatgaccatcagttgcgtattgctgacggtgtcatcgcagcaatcgaaccgattccagtgggcgtgactgaacgcgatgcggaactgctctgccccgcttacatcgacacccatgtacacggtggtgcgggcgttgatgtaatggatgacgcgccggatgtactcgacaagctggcaatgcacaaggcacgcgaaggtgtcggcagttggttgccgactaccgtaaccgcgccgcttaataccattcatgcggcgctgaaacgtattgctcaacgttgccaacgcggcggacctggtgcgcaagtgctggggagttatctcgaaggaccgtacttcacgccgcagaataaaggcgcgcatccgccggaattgtttcgcgagcttgaaattgccgagctggatcaattgattgccgtttctcagcacaccttacgcgtggtagcgctggcaccggaaaaagagggggcattgcaggccatccgccatcttaaacagcaaaatgtacgagtgatgctggggcatagcgcggcgacctggcaacaaactcgcgccgcgtttgatgctggtgccgacggcctggtgcattgctataacgggatgacaggtttacatcaccgcgaaccgggaatggttggcgcgggattaacggacaagcgcgcctggctggaactgatagccgatggtcatcatgtgcatccggcggcaatgtcgctgtgttgttgctgtgcgaaagagagaatcgtactgatcaccgacgcgatgcaggcagctgggatgccggatggtcgctatacgttatgtggtgaagaagtgcagatgcacggtggcgttgtccgtaccgcgtctggtgggctggcgggcagtacgctgtctgttgatgcggcagtgcgcaatatggtcgagttgacgggcgtaacgcctgcggaagccatccatatggcgtcgctgcatccggcgcgaatgctgggtgttgatggtgttctgggatcgcttaaaccgggcaaacgcgccagcgtcgttgcgctggatagcgggctacatgtgcaacaaatctggattcagggtcaattagcttcgttttgatggtttgctccattattgggccttcacttcccccgtaaggcctttctttttctttcgttttgatctgtgcagcggtgtcggatgcgacgctaacgcgtcttatgcgacctacggtacgccgcatccggcaatcggtgaacatagcgacgtcattacgcaattctttaatcttcccttgtcttttctttcaacgatcacagatttcgttttatttcctttttctccattgaactttcagtttcttttctatagattttaatcaacgaaagacatcaccaagtgaaatgaaacgaaaggcaagtgaaagcgacaacgcccgacgtcaagttcatcagactaaggattgagttatgccagaaaattacacccctgctgccgccgcaaccggtacatggactgaagaagagatccgccatcagcctcgcgcatggatccgttcactcaccaacatcgacgcgctacgttccgcgctcaataacttccttgaaccgttactgcgcaaagagaatctgcggatcatcctgaccggagccggaacctcggcatttatcggtgacatcatcgcgccgtggctcgccagccataccggtaaaaacttcagcgccgtaccgaccaccgatctggtcactaatccgatggactacctgaacccagcccatccgctgctgttgatctccttcggtcgatccggcaacagcccggaaagcgtcgctgccgtggaactggcaaatcaatttgtaccagaatgctatcacctgccgatcacctgcaacgaagcgggcgctctttaccaaaacgcgatcaacagcgataacgcgtttgccctgctgatgcccgcagaaacgcacgatcgcggctttgcgatgaccagcagcattaccaccatgatggccagctgcctcgcggttttcgcacctgagacgatcaacagccaaaccttccgcgacgtggcggatcgttgccaggcgatcctgacctcactgggcgatttcagcgaaggtgtgtttggttacgcaccgtggaaacggatcgtttatctcggcagcggtggcttacagggcgcagcacgcgagtcggcgctgaaagtgctggaactgacggcgggtaaactggcggccttttatgattctccaaccggattccgtcatggcccgaaatcactggtcgataacgaaacgctggtggtggtatttgtctcaagccacccttacacccgtcagtatgatcttgatctgctggctgaactccgccgtgacaaccaggcaatgcgcgtaatcgccatcgccgcggaaagcaccgacatcgtcgctgccggtccacatattatcctgccgccgtcacgtcactttatcgacgttgagcaggcattttgcttcctgatgtacgcccagacgtttgcactgatgcagtcgctgcacatgggcaatacgccggataccccatcagccagcggcaccgttaaccgcgtggtgcaaggcgtaatcattcatccgtggcaggcataagaggatcgcattatgagcattatctccactaaatatctgttacaggacgcccaggccaatggctacgcggtgcctgcttttaacattcataacgccgagacgatccaggcgatcctcgaagtgtgcagtgaaatgcgatcgccggtgatcctcgccggaacgccggggacctttaaacatatcgcgctggaagagatctacgccctgtgcagcgcctattccacaacctacaacatgccactggcgctgcatctcgaccaccacgaatcgctggatgatattcgccgtaaagtccacgcaggtgtgcgcagtgcaatgatcgacggcagccacttcccgtttgccgagaacgtgaagctggtgaaatcggttgttgacttctgccactcacaggattgcagcgtggaagcagaactgggccgcctgggcggtgttgaagatgacatgagcgttgacgccgaaagtgcattcctgaccgatccacaagaagctaaacgctttgtcgaactgactggcgtcgacagcctggcggtagcgattggtacggcgcacggcttatacagcaaaacgccgaagattgatttccagcggctggcggaaattcgtgaagtggtggatgttcctctggtgctacatggtgccagcgatgttccggatgaatttgtccgtcgcactattgaacttggcgtcacaaaagtgaacgttgccacagaattaaaaatagccttcgctggcgcggttaaagcctggtttgcggaaaatccgcagggtaatgatcctcgttattatatgcgcgtcggaatggatgcgatgaaagaagttgtcagaaataaaattaatgtctgtggttcagcgaatcgaatttcagcataatcattagttttttatgatttatcccaatgtacttcccgattaatatcggggagtgccttaatggaaaaggagatgactaaaccttaataaatacatcagtacaatatcgcaacaataatatattaaaaaaaattatattattcaactttatggtgaggattacacaatgagcagtccaaatattctcttaacccgtattgataaccgtctggttcacggtcaggttggcgtgacctggacatccaccatcggtgcgaatctgctggtagtcgtggatgatgttgtcgctaacgatgatattcaacagaaattaatgggtattaccgcagaaacctacggctttggcattcgtttctttactatcgaaaaaaccattaacgtcatcggcaaagctgcaccgcatcagaagatcttcctgatttgccgtacgccacaaacggtacgtaaattggtagaaggtggcattgacctgaaagatatcaacgtcggcaatatgcatttctcggaagggaaaaagcaaatcagcagtaaagtttatgtcgatgaccaggatctcgcggacttacgttttattaaacaacgtggcgtgaatgttttcattcaggacgtccctggcgatcaaaaagaacaaatccctgactaaatctaaaatcgccttaatattggtttgaggtaataaaaatgcatgaaataaccctacttcagggattatccctggcggcgttagttttcgttctggggattgatttttggctggaagccttatttttattccgcccgataatcgtttgtaccctaactggcgctattctcggtgatattcagactggcttaattaccggtggtctgacagagttggctttcgccggattaacccctgcaggtggtgttcagccgcccaacccgattatggcgggtctgatgaccaccgtcattgcatggtctacgggcgttgatgccaaaacagcaattggtcttggcctgccgtttagtttgttaatgcagtacgtcattctgttcttctattccgctttctcattatttatgaccaaagccgataaatgcgcgaaagaggcggatacggcagcgttttcccggcttaactggacaacgatgctcatcgtcgcttcagcgtatgcggtgattgctttcctctgtacttacctggcacaaggggcgatgcaggcgctggtgaaagcgatgcccgcctggttgacccacggctttgaagtggctggcggtattctgcctgccgttggttttggcttgctgctgcgcgtgatgttcaaagcacaatatatcccttacctgatcgccggcttcctgtttgtttgctacatccaggtcagtaacctgttgccggttgccgtactgggcgcaggctttgcggtgtatgagtttttcaatgcgaaatcccggcagcaagcgcaaccgcagcccgttgccagtaaaaatgaagaagaggactacagcaatgggatctgaaatcagtaaaaaagatatcacccgtctgggctttcgttcgtcactgctgcaagcgagctttaactacgaaaggatgcaggcgggcggttttacctgggcgatgttgccgatcctgaaaaagatttataaggatgacaaaccgggcctaagcgcagcgatgaaagataacctcgaatttattaatacccacccgaatctggtcggattcctgatggggttattaatttcgatggaagaaaaaggagaaaaccgcgacaccattaaaggcctcaaagtggcactgtttggcccaatcgccgggattggcgatgcgattttctggtttactttgttgccgattatggcgggaatttgctcatcatttgccagccagggaaacctgctggggccgattctatttttcgccgtttacctgcttatctttttcctgcgcgtcggctggacccacgtcggttattcagtcggcgtgaaggcgatcgataaagtacgagagaactcgcagatgattgcccgttcggcaaccatcctcgggatcacggtaatcggcgggctgatcgcttcgtatgtgcatattaacgtggtgacatcgtttgccatcgacagtacccacagcgtcgcgctgcagcaggatttcttcgataaagtcttcccgaacattttaccgatggcctacaccctgctgatgtattacttcctgcgggtgaaaaaagcgcatccggtgctgttaatcggcgtgacttttgtgctctctattgtttgttccgcattcggcattttgtaaatggaacgaggcactgcgtctggtggtgcctctttacttaaggaatttcatcctgtgcaaacccttcagcaagttgaaaactatacggcgttaagtgaacgtgccagcgaatatttattggctgtgatccgtagcaaaccggatgccgtgatttgcctggcgactggagccacgccattactgacgtatcattatctggtagaaaaaatccatcagcagcaggttgatgtcagccaactcaccttcgtgaagctcgacgaatgggtggatctgccattaacgatgcctggcacctgcgaaactttcctgcaacagcatatcgtgcagccgctggggctacgtgaagaccagctcatcagctttcgctccgaagagataaatgagacagagtgcgaacgggtaacgaacctgattgcgcgcaaaggcggtctggatttatgcgttctcggattggggaaaaacggtcatcttgggctgaacgaaccgggagaaagcctgcaaccggcctgccatatcagtcaacttgatgccagaacacagcaacatgagatgttaaaaaccgcgggtcgccccgtgactcgtgggatcaccttaggcctgaaggatattctcaatgcccgcgaagttttgttactggtgactggcgaaggaaagcaggatgcgacagaacgttttctcacggctaaagtctccaccgctatcccggcttcgtttttatggctgcacagtaactttatttgtttaattaacacctaaccagatgaaaaatttgctcaaaatgtttaaattaacttatgtaacagtcatgcattatattaaataacatttgactgggttgaacataacgccaatagcaaaaggagttatgttcaacaatttaattttagatatacatataacttgttctattaataaaccatctcgtattctgactcgccccctggcgcagcaaagtcatgcacttatactcttttgaatacatagaaaattgatatcaatataatgaaaatatcaaatattttcatataaatataatcttaaagtttagtctatttaatgttcaatgaaatatttctacctgtataatctttaaagatgttgaacatatattcacattaaatatgattatgtacttgttacaaggataaggttataaatgaataaagttacaaaaacagctattgcgggcttacttgcgcttttcgcaggtaatgccgctgcaaccgatggtgaaatagtttttgatggcgagattttaaaatccgcttgtgaaatcaatgactctgataagaaaattgaagttgctcttggtcactataatgccgaacagtttcgttctgtaggcgatcgtagcccaaaaattccattcactattcctttagttaactgcccagtgactgggtgggagcacgataacggcaacgttgaagcgtctttccgtttatggctggaaacgcgggataatggtaccgtccctaacttccctaacttggcaaaagtgggctcttttgctggcacagcagcaacaggtgtgggtatccgtattgacgatgcggaaagcggaaaccttatgccactaaatgctatgggcaatgataacacagtttatcagatccctgcggactccgctggaattgtcaatgttgacctcatcgcttactacgtatcaaccgttgaagcatcagaaatcaccccaggggaagcagacgctgtcgttaacgtaacgctggattaccgttaatacgttacggcgttatctgacctttcagataacgcccttttccttcctctttctcgttgtatcaggttgaaaaataactatgtcaaaacgaacattcgcggtgataataaccttgttgtgtagcttctgtatcggccaggcgcttgcagggggtatcgttttacagcgaacgcgagtgatctatgatgccagccgcaaagaggctgcgttacctgtcgcaaacaaaggcgcagaaacgccttatttactgcaatcatgggtagataatatagatggtacaagccgtgccccatttattataaccccaccgctatttcgtcttgaagctggcgatgactcatcactacgaattattaaaacagctgataacctgcctgaaaataaagagtcgctgttctacattaatgttcgtgccattccagcaaagaaaaaatcagatgatgttaatgctaacgagttgacgctggtatttaaaacacggatcaaaatgttttatcgccccgcacacctgaagggacgggtaaacgatgcgtggacatcactggaatttaaacgtagtgaccattcactcaatatatataacccaactgaatattacgtcgtatttgccggactggcagtcgataaaaccgatctcacaagcaaaattgaatatatcgcgcccggagaacataaacagttaccacttcctgcatctggcggaaagaacgtgaaatgggctgcaatcaatgattatggcggcagttccgggacagaaactcgtccactgcaataacaaatataaaaaacacaggtcatcagggaatgccacaacgacaccaccagggacataaacgcacaccgaaacagttggcgctcatcatcaaacgctgtttgccgatggtgctcactggcagcggcatgctttgcactaccgctaacgccgaagagtattatttcgaccccattatgctggaaactacaaaaagtggtatgcaaacaactgatctgtcacgtttttcaaaaaaatacgcacaactaccaggaacttatcaggttgatatctggctgaataaaaagaaggtttcacagaaaaaaattacatttaccgccaatgcagagcactgagagatcccctcataatttccccaaagcgtaaccatgtgtgaataaattttgagctagtagggttgcagccacgagtaagtcttcccttgttattgtgtagccagaatgccgcaaaacttccatgcctaagcgaactgttgagagtacgtttcgatttctgactgtgttagcctggaagtgcttgtcccaaccttgtttctgagc

SEQ ID NO: 90 - DNA, 16511 bp, Escherichia coli
  source 1..16511: mol_type = genomic DNA
tgggacaacttgtgaaattaccgacaagaagggaaagggccttcccgagagtggtaaaggagaggccctggaaataccccacagccccgaaaaagagccagtcagttgcttaactgactggcattacccacgccggggacgtttttgagcgcgtcggtaaggttggttgcgccctgatctttaatcacttgttcagaaatcaccgtcatcgtgcgggtagtatccgctaccggacgcgagaatttcggatcggcagattgttgtggcgcataaagcgaaggcgttgatgcttcgacaaccagcgtgtcatccgcgttagtttgcccttcggcggcgagtgcctgagccacaggcgtgatgccaatacaaagaccggcaaagaacgtgagcgaatgaaattgtctggcagggaaattgcgattgttttccattttgcaggtgactttttttatatgttgaaattttcactgccacgagaaagcctctctgcggatgcgatgccactgttaatctcgtgatagtgttcgtgcaagtgataataattttgataagcattatcacttggcgcgattttctatcacccattgcgcgaaaaagaaatacatttatttacattgcgttcatatttgatgttttttgattacaaaacaggcgaaaactgcatccagaggcgaatgcagttacgttggtggggttatttgtagatggttgcagtaccgaacatctggtcatttccgcctgcggaattaatgacataacctttcgcgccttgctcgcgcgctttttctgccagtttatcctccagatcgcttaggtttgatgcgccagttgccgaaacggtaccggcgggccgtagctgaccgctgtccaggttactcatcggttgcgcggcataagccgtgagagagattccgctcaggacggtggcaatcagtagtgtgaggcactttttcataatgacatcctcataaatacaacgggtagtgcctgataagtgtaggtcgcctgcgcgatgcaaatgacgcaaaaaattgacagagatgtgcttattttttgaacgatatatttttacaaaataagacaaatcaatgacatgcataatgctgatttttatgatgaattgccataaaccatagccatgttaaggttttggggaatgataaacgcagccagatatttaccctgtcgcgttatgcgggtatcttacgccgcagcttaaaggagaatgctatgtccgcccagaaaccggggttgcatccgcgcaaccgtcatcacagccgctacgatctcgccacgctttgtcaggtcaatcctgaactcaggcaattcctcacgcttacacccgccggggagcaaagcgtagactttgccaatccgctggcggtgaaggcgctcaataaggcgttgctggcccatttttacgccgtagcgaactgggatatccccgacggttttctctgcccaccagtaccgggccgggcggattatattcatcaccttgccgatttactggcagaagcaagcggaacaattccagcgaatgccagcattctggatatcggcgttggtgcgaactgtatttatccgctgattggcgtacatgaatatggctggcgttttaccggtagtgaaaccagcagccaggcgttaagcagtgcgcaggcgattatcagttctaatccggggcttaacagcgccattcgtctgcgtcggcaaaaagagagtggggcgatttttaacggcatcatccataaaaacgagcaatacgacgcgaccttgtgtaacccgccattccacgattccgctgctgcggcacgggcaggtagtgagcgtaaacgccgtaacctggggctgaacaaagacgatgcactgaactttggcggccagcaacaggagttgtggtgtgaaggcggtgaagtcacctttatcaaaaagatgattgaagagagcaaaggcttcgcgaagcaggtgatgtggtttacatcactggtatctcgtggtgaaaacttaccgccgttgtatcgtgccctgacggacgtgggcgcggtgaaggtggttaaaaaagagatggcccaggggcaaaagcagagtcgctttattgcctggacctttatgaacgacgagcagcgccgccgttttgtcaatcgccagcgttaaagcgttggttcccccggcggtaacggttcagccggggtcgcgcccggagcaggcagcacctgataagtctgcactggcgcgcgaacgcccgccaggtcgaaatgttttttcacctggctgtcgagggcaaagcgtaccgtccactgtttgagtggcagcgtggtgaacgaaacacgcagtgtaaacgcggtattgcttaagccgacaatcccggcaaaattcggttcaccaataatcagcccgcgaatttcttcgttttccattaattccgctaccgcatctttcagtgcctgattggctttatcagcatcttcatggcgatcaacatcataatttgccaccaccgaaccaatgccgcggacaaagttagcaaaggtggttatcgaagaccacggaatgatgtgatacgccccggtatcctggcgtacgcccacggagcgaatcgacatccgttccactgtgccggtcaacggcccgatagtcaccaaatctccagtgttcatgccgttttcaaactgaataaacaccccggtaatgatatctttcaccagcgtttgcgaaccaaacgagatagccagacctaatgccccggcacctgccagcaatggcgcgatattgacgccgatttccgacaacacaatcatgatggtgatggtactgataatcaccgccagcgcgttacgaaacagcgtcagcagggtacgcgtacgggcgctgggtagcgggcggccatgaatatccgaagccagccggttttcgatcaaactggcgagcaccgtccagccaaccgccgagaagaaaagaatgagtgcgatgcggatcaggatatctacggttttctgccccgcgccgttttgcagccagttccagaaatcgaacaatccccatgcgctcaacagcaacattactgccacgcagacggtcagaatacgcgccgttttcagcgccgccgaaagccagccattcagccgtttttgtagctccggatagttacgctgagtatgtggcgagagggtgatggttttcgccagccagcgggaaaacataccggaaacaaacgctgcgataccaataatcgccaggctgcgcaccgttgcacccatcataaatttcaggctgttgcccggatcgaacaacgaaaagaaaaacagcacgataaaataggcgcttgccagccagtgccacaccagcgcaaaggcgcggataaacaggctgaaaaaggccagcgaatgctccgcaaagttgagcaaatgctgggtaatctcttttttattacgaaagatcaggtacaacgcccagacggtcatgcacagcataatgatgacgttcgccagcgcacctatctgtacattcacctgattagagataatcggcacggccacaatcaggccataacctatcaaactgcttaaccagctcaggcgacgactccagtaacgggcgctctcgtcctgaatcgtgaacggacgcagctccgccacgtttgggcaaaaaatcaggcgtagtacggctttgaaaaattcaatcagggcaaaggcattgagaaacaaactttgttggaaagcgatggtgcgactgcctgcattcaggttgtcgcttaatacctggccgacaaataatgtcagggccagtaacagcaggtcgataataaacgccccgataatcatcgccggaagctgcaaccagttgctgcgctcacgatttttttgcctcgcccactgacccattttgcgatacagcggcagtgcgcacaggcgaatcagccagtaaaaaccaaacactaataccgctaacattgaaaaatggctcagcgcattgctgaaggtttgtggattaaatggcttatgcggggagccggtgatattgcgataaagttgcccgaagcgggcggaaagggcttcaccataatggcggctgacttcggtgaccttttgcagcacggtttgctcttcaaccagcgtcggcggcacgatcttcgggaccggttccgcagggggcgtcgcggcgacagtacgcaactggtcgatcaattctttacgcgaggtgtcgttatccagcacatccgccagtgcgccataggccgcttttttttgttcgatatccggttccggggccggttcagtcgttgagtccgttgtcgttgtggttgtaacgccgggtatggataccgcgtgggcaggtgcgcccagcaggcagaagaggatgaacaggatccaccgcatgactcctccagtgagaaaacagagcaaaaagataagtatagatgctgggggaggggcgattttaaatgagaggaatctggtgtgcctccctttcgggtgaaagggaggcagagaagttaagagacgtgctgcaaaaattcctgcaagcgctggctcggcgggttcttgatcaatacctgcggatcgccatcttccgcaatccggcctttgtcgataaagatcagccgcgaagctactttctcggcaaaaccgatttcgtgggtcacgatcaccatcgtcatcccttcttcagccagatcctgcataaccttcagcacttcatggcgcagttccgggtcaagagcggaagtcggttcatcaaacagcatcattttcggcttcaccgccagcgcgcgggcaatcgccacacgctgctgttgaccaccagaaagttcggaagggtagtgatgtgcacgttctgccagaccgactttcgccagcagctcacgcgccagtttttccgcctcttctttgttcgcgccacgcacgcgtagcggaccaaacatgacgttttccagcgccgtcagatgcgggaagaggtaaaactgctggaacaccatacccgcttcctggcgaatcaggcgctcgtcaactttcggatcgttaaccttcaggccatcgacaatcagatcgccggaggtgatttcttccagtttgttgatgcagcgcagcagggtcgatttaccggaaccggacggcccgataatcaccacgacttcgccctgagcaatgttcaaatcgatattgtgcagcacctgggttggaccaaaatgcttggagacgtttttaaattcaatcacaggattttcatccttctttccagacgacgcagaataaagctcagcaccagggtaataatcagatagaacaccgccacggcgctccagatctcaagggcgcggaagttaccggcaataatttcttgcccctgacgggtcagttccgccacgccgataacaataaacagcgaggtgtctttaatgctgatgatccactggttacccagcggcggcagcatacgacgcagtgccagcggtaaaatgacgtagcgaatggtttcccaacgtgaaagaccgagcgccagtcctgcttcacgaaaacctttgtgaatagacagcaccgcaccacgcgtgatttccgcaatgtacgcgccggagttgatcatgatggtgaccaccgccgcagtaaatgggtcgatgcgtaagtcgttaaacgccatcggcagggcgaaatagataaacatcacctggacgacgataggtgtgccgcggatcacttcaataaagaccagcgcgacgtggttggctatccaaccaccgaaggtgcgtgcaaaacctgccagcaatccgattaccagaccgcctgccagaccgaggaccgaaatccacagggtcattttggcaccttcaatcagaagcggaatggcaggccagatggcactccagtcaaactgcatatgttgttcctgttaccgtggtgtaaataatcaaattcagggtaattaatggccccggagcgggtttgcgcccctcaccctaatcctctccctagaggggagagggaactgccagtgcgttttacaggtgtagcgttattatttcggttcagtaccgaaccattttttgtagatttcgttgtaagttccgttctcgcgcagggttttcaacgcgccgttgactttgtcacgcagctcgtcgctacctttcgggaacgcaataccgtattgctgcgcttccagagagtcacctaccgctttgaactgaccgttaccggcggttttgatgaagtacagaatgtttggcgtatcgtgcagaacggcgtctgcgcggttggtgcccagttccatataggcgttatcgatgttcgggaactgacgcagatctttagttttgatgtttgctttcgcgtaatcaacggagccagtaccgctcttcacagcaaccactttcccgtcgagatctttcacgcttttcacatcgttattgttagctttcaccatcactaacaggccgcttttgtagtagccgtcagagaaatcgatcgcttttttacgctcgtcggtgatggtaatgcccgccagcgccagatcgacgtttttggtttgcagtgccggaatgatcccactgaaatccatcggcttcagttcgtaatccagcttcagctctttagcgatggcagcccacagatcaacgtcaaagcccacatatttatcgccctgtttaaattcaaacggaacgaaggcggtatccgtcgcgacaactaattttttatccgcggcatgagaagaaaccgcaaaagccagggtcagtgcagccagtgaaacttttaatacagacttcatagcatttccttttttctatccacgggacgatcccctgcgtgacattcacatatatgaaaaaatcgtgccagttttgcaactcattgatttttcgagatgcggcaaaaacgtgatgcacgatttatagggcaataccctgaagatgcaccattctggggcaccaatctggtgcgctaaaattgtgcactcaacacagtgattatttagcgtaaaacctgatgaaaaaacaatctttatgtaacgattgtgtgatgatgtggatacaaaaaatttacttaatcagctggagatagcagatggatgcactaaataagtgcgttgaggtgggctgcaaaacaaaacggcctcctgtcaggaagccgcttttatcgggtactaaagttctgcaccatcagcgatggatttattcgatgttagactcgataaaccacaggaatttatccaggtcgcgagacgcggcggtcaggatatctgcggtgtcgtcatctttcgcttcgccaatcgctttgcgtacgtcattagcgacgattgcgtaacggtcagccagttctttcaggtgatcctgaacgttgtggatgtccagcgggtaacttttcagcggggttttgctgttgataacttgagtggtccccagagctacaccgcccagctgcactgcacgttctgccatggtatccagatgatcgatcagtgcggtgcggaagccatccagcatttcatgtacggcaatgaagttagcgccgcgcatgttccagtgcgcttgtttggtaatcaaagaaagatcaataaactggataacctggcgattcagcaactctactgttgcttttttctcgctgtcggagacatcgttgcgggtataaagcagattggtcgcttttgatttaactaatttagcggtactcataatttcatatcctcttgatgttatgtcccagtaattaacgagactaagtatagcaccggctatgtgttccgctattctggctgttcctatcacactaatagtggtaacaagcgtgaaaaacaaaactaataaagattcaatgagttagatatattgataagaacaattcttatttatctgctcgccaggaattttcggaataaatatgcttttgcataattcgatatataaagacggtgtagaggaaaagtagcgagaaattctgcatggttatgcataaccatgcagaaatgtaaatttaattaatgtctaattcttttattttgctctctttgcgtactgtcagcgtagaccccattgaagcggcgatgatagcgccgagcgccagcagctgtatgggtgtcagtgtttctccgaggaaaatcatcccggaaacggcagccagcgccggttccatgctcatcagcgtaccaaatgtccgtgttggcaaacgggtgagggcaatcatttccagcgaataaggcagagcggtcgagagaatagcgacagccagacccaatggaataaccgaccagtgccagagtgcttcaccagcctgaagcgctccaattggcacgaaaattaacgctgcaatcaacgaaccaattgccaccgtcgcagggccatgttccgctcctgcgcgttgcccacttaaaatgtaaatagcccaacaagccccggcccccagtgccagcgcacagccggttaaatcgacatgggaaacgtcttgccccagcggtagcaggaaccacagaccaagaaccgccagcacaacccagacgaaatctaccgggcgacgagaagagaacagcgccaccgccagtggtccggtgaactccagcgccaccgcaatacccagcggtactgtctgaatagaaagataaaaaagataattcatcccacccagcgaaacgccgtaaaacaacagcggtaaccgttgctctttggcaaagcgcagtcgccatggcttaaagaacgcgatgaggatcagcgttcctaatgccagacgcagcgcagtgacacccggtgcgcccaccagaggaaaaagtgacttagctaacgaggctccaccctgaatagacgccatggcaacgagcaatatgattattggtaaccagaccggcattttacgtaatgaaccaggcatcctttctcccacaaatatctagacttaagtaaagcgtggagtgtactggatatacccaatgctggttgagcatttgttgaaaaaattttcccccgttttgactaaaatgcgccaggattgatggaatcattagtctggtgattaggaataatctggatgaatgacagggaaaacatgcgtaatacttacgcagttctctgaaaaagtgatttaaatttagatggatagcggtgtatggaaacgttctgttacatgaaatggcccgttagacatcacaaatcgcgaagagtttcccattaatttttgatatatttaaaacttaggacttatttgaatcacatttgaggtggttatgaaaaaaattgcatgtctttcagcactggccgcagttctggctttcaccgcaggtacttccgtagctgcgacttctaccgtaactggcggttacgcacagagcgacgctcagggccaaatgaacaaaatgggcggtttcaacctgaaataccgctatgaagaagacaacagcccgctgggtgtgatcggttctttcacttacaccgagaaaagccgtactgcaagctctggtgactacaacaaaaaccagtactacggcatcactgctggtccggcttaccgcattaacgactgggcaagcatctacggtgtagtgggtgtgggttatggtaaattccagaccactgaatacccgacctacaaacacgacaccagcgactacggtttctcctacggtgctggtctgcagttcaacccgatggaaaacgttgctctggacttctcttacgagcagagccgtattcgtagcgttgacgtaggcacctggattgccggtgttggttaccgcttctaatcactttggtgatataaaaaatccgcctctcggggcggatttttgtttttaaggcttcgggtcgaaaatatcggttccgagatggttgtaatccaccttctgtaactggaagttggtgatgtatatcgacccggctttcttctcagatataaacgggtatttgatgttaatttccttcgctttaattcccgtccactgggagaaaaaacctaagaagtcattggctgagcggcgggctttaatcacccgatgcgctttatcgtcgctggaaatgaccataaaaggcacctggaaattttgctgatacttatcatcatgggcaaggtattgcacgtctttgccgcgctctttaaaggccagaccgtggtcagaaaagtaaaccagcgagaagctgctgccgctgttgcgtaactgatcgtacagcttgcgcagtaaatcgtccgtttgcgtcatggtatagagatagcacgacgtttctttcgactgcacaaaggtttcgtatttgccttgtgtcctgtcgcaggcctgcggatgtgagcccatcagatgtagaacaatcagctgcggttgcgagtgctcttgcgccagcacttgagcggtcatatccagtaacgcttcgtctttggtatttttatctgcttcaaaattaccttctttcaggaagtacacttcatctgctcgtttggcgatgctggcgatagcggtatcgtattcgccgatttgaccctggttggaaaaccaccaggtctggaagcccgcgcgatttgccagggtgacaaagttatcctgaaactgtggtttgccatcgactacgcgattgagcgttaagccaagcgatttctgcgtggagccactggcggcaatgtagtcagcaaatatcaaaccgttaacgctgctggcaaacggggtattgtcccagtgaccgccaaaggcaccgagggcatcgcgacgcgcgctttcaccgatcaccaccacataggtctgatacttcggcttaacggcagtgaccgtccaggtatctttcattccggaaagttttgccatccgttcttgctcttcaatcacctcgttattattgacgatgacatccttagcaaaacgaaataccggatagccagtatctttcagtttaaatacgccaccccaggccaggttttgcacgggagcaacaaaaaatgtcgccacactgaataccagacacaggctgtcgaaggtattccagcgcgctttttcattctctttttttcgcctgattgctattacgccgagcgcaaaaataaataagccgaccaggtagctgtaccacggaaaaatcgtcaggatttcggtcgactcttccatattggtggagtgcaatgccagcaatgtattgaaattaggcgcgccgtaggcctgagcaaaagggaaataacaagccgccaccagcgaactgacaccgaccagaactttttgtacgcgaggcaatgttcgccatagcaaaagcaaaatagccataaacgcagcggtgtagagcaaactgaaggggtaacctaagccgaggttaattaatagcgactgtaaaaagtagaacgcagtccacgggctaaatacccggctacgggtaacaagcgattctttgagggttaaattcatatgccactatcgtaacaaacgccatgtgcttaccctggcgtcaagggtcaatacctgcaagagtgcgtgaagagtggaaaggggtccgcatccgcgagccgcaatatacgcagggctgcaagaagatagagcgagccgccgttcaggtcaactactgacgaacaaatcttttgcgaaggggattgcaaatccgacaaaaagtggggtttttcagaccaaaacgcgttatgcctgcatgaaagcaggagtgaagcggcgtaccgcgacgccgctatttatcggaaggtttatcttgctgcggtttgttgttgaccatatcgcacaacatagagagcagcattaaccgtactttaaagggagaatgactaaacacgcgcatacacctcttgaactcattcataagacctcctgacttgctaatcccgtcgatccttgagggatgattgcattacatacagatatagcacaggctatattatatagctattgctaaaacgttaattttttgtaccttcgcaactctggtttacaatgtgcgcacgaaatgagaacgctatgtatgcgtcaccataatgaggaagcacaatgagtcgtcgcgcaggtacgccaacagcaaaaaagtgacgcagttagtgaacgtggaagagcacgttgaagggttccgccaggtcagagaggcgcatcggcgcgagcttattgatgattacgttgagctgatttctgacttgatcagggaagtgggggaagctcgtcaggtggacatggctgctcgtctgggagtttcgcaaccgacggtggctaaaatgcttaagcggctggcaaccatggggctgattgaaatgatcccctggcgtggcgtgtttttaacggcagaaggagagaagctggcgcaggaaagccgcgagcgacatcagatagtcgaaaatttcttgttggtgttgggcgtcagtccggaaatcgcccgtcgcgacgcggaaggcatggagcaccatgttagtgaagagacgctcgacgcttttcgtttgtttacccagaaacacggtgccaaatgagcctgccttttttacgcacgctgcaaggcgatcgtttttttcagttattaattcttgttggtatcggattaagctttttcgtgccctttgcaccgaaatcctggcctgctgctatcgactggcacaccatcatcaccttaagcggcctgatgctgctgaccaaaggtgtggagttaagcggttattttgatgtgctggggcgcaaaatggtgcgccgctttgctacggagcgtcggctggcgatgtttatggtgctggcggcggcgctgctttctacctttctgaccaacgatgtcgcgctgtttattgttgttccgctgactatcacgctaaaaagactgtgtgagatcccggttaatcggctgattatttttgaggcgctggcagtcaacgctggttcgctactgacgccaattggcaacccgcaaaatattcttatctggggacgttctggtctttcgtttgccggatttattgcccaaatggcaccgctggctggcgcaatgatgctgacgctcctgctcctgtgctggtgttgtttccctggaaaggcgctgcaataccatacgggggtgcaaacaccggagtggaaaccgcggctggtgtggagttgtctggggctgtatatcgtctttctgacggcgctggagttcaaacaagagctgtggggactggtgattgtggcggcaggctttgcgctgctggcacgtcgcgtggtgctcagtgtggactggacgctgctgctggtgtttatggcgatgtttatcgacgtccatttactgacccagcttccagcgttgcaaggcgtgttgggtaacgtgagtcatctatctgaacccgggttatggttaacggcaatcggtttatcgcaggtgatcagtaacgtgccgagtaccatattgttgctgaactatgtgccgccgtctttattactggtatgggcggtaaacgtaggtggctttgggttattacccggatcgctggcaaatttgattgcgctacgtatggcgaacgatcgccgcatctggtggcgtttccatctctattcaataccgatgctgttgtgggcggcgttggtgggatatgttttgttagttatactcccggccaactagggtctggcaaataaaaaaggcggattatgagtccgccttttgctttaagttttgaagattaattcagacgaaccggcatcccggagcggtttttaatcgcttcatcaagaacaacctggtcaacatctggctgaccggtcactgtttgcacgctcttcgtcagggtaattggcacaatttcctgaccttcaaactgggcttcggtggtagacagcgggttatggacttcaatataacggctgccgtctggctcggtggtcgcttttaccggctcatcaataaactgtacgcgggtaccgaccggtactttctcgaacaggaatttgatgtcttcgttacgcagacgcacacaaccatgacttacacgcaggccgataccgaagttggcgttggtgccatggatagcatacaggcgaccgatgtagagtgcatacagacccatcgggttatccggacctgccggaacgacagccggaagcggttcgcccgcagcgcggtactctgcgtgcattttggcggtcggcgtccaggtcgggcctgctttcttacgctcaactttggtggtccagttgataggcgtatctttgcctaactgaccaatgccgatcggcagcacgataacggtgttggtccctttcggatagtaatacagacgcatctctgcactgttaatgacgatgccttcatgaacggtatccggcaggatcagctgctgcggaatgttcagtacagtaccgcctttcggcaggaaggtatccacacccgggttcgcttccatcatattggaaagccccatctggtactccgcggcaaaatactccagcggctgagtgttaccttcaggaatggtgatcacctgattctgaccaaccaggcgactcccgtcggttggcagaggataagttaccgcagaggcggtactgcaaaagccgacaacagcgaaggccgctgcgaataatgttttcaatttcatattcatgttaagcgagattttgtgcctggcaggccattgggttgagaatattagagtattggaagcgcattataagttcattccagctcacagtgaaatcagatgtgtacgaaatcacattttttgcctttggcttgagtgtagaccttaagcgaggagcaggatcttctttcagacttatggcataatgcgcggtttgtcatatctcttttcaggatacgcctgtgttagtttccagtaacgtcaccatgcagttcggcagtaagccgttgtttgaaaacatttccgtcaaatttggcggcggcaaccgttacggcctgattggcgcgaacggtagtggtaaatccacctttatgaagatcctcggcggcgacttagagccgactttgggtaacgtttccctcgatcccaacgagcgcattggtaagctgcgtcaggatcagtttgcctttgaagagttcactgtgctggatacggtgatcatggggcataaagagttgtgggaagtgaagcaggagcgtgaccgcatctatgctttgccggaaatgagtgaggaagacggctataaagtggccgatctggaagttaaatacggcgaaatggacggttactctgcggaagctcgcgccggtgaattgttgcttggcgtgggaattccagtggaacagcactacggcccgatgagtgaagttgctcctggctggaagctgcgtgtgcttctggcgcaggcgctgtttgctgatccggatattctcctgctcgacgaaccgaccaacaacctcgacatcgacaccattcgctggctggaacaggtgctgaacgagcgtgacagcaccatgatcatcatctcgcacgaccgtcacttccttaacatggtctgtacccacatggcggatctggattacggcgagctgcgcgtttatccgggtaactacgatgagtacatgacggcggcgacccaggcgcgtgaacgtctgctggccgataacgccaagaagaaagcgcagattgctgagttgcaatctttcgttagccgctttagcgccaacgcctcgaaatctcgccaggcaacttcgcgcgcgcgccagattgataaaatcaaactggaagaggtgaaagcctccagccgtcagaacccgttcatccgttttgaacaggataagaaactgttccgtaacgcgctggaagtggaaggtctgaccaaagggtttgataacggtccactgtttaaaaatctcaacctgctgctggaggtcggtgaaaaacttgcggtactgggtaccaacggcgtcggtaaatcaacgctgctgaaaacgctggtgggcgatctgcaaccggacagcggcaccgtaaaatggtctgaaaacgcgcgcattggttactacgcccaggaccacgaatatgagtttgaaaatgatctgaccgtgttcgaatggatgagtcagtggaagcaggaaggcgatgacgagcaggcggtacgcagcattctcggtcgtttgctgttcagccaggacgacatcaaaaagccagctaaagtgctttccggtggggaaaaagggcggatgctgtttggtaagttaatgatgcagaagccgaacattctgatcatggacgaaccgaccaaccacctggatatggaatccatcgagtcactgaacatggcgctggaactgtatcagggcacgctgatctttgtttcacacgaccgtgagttcgtaagctccctggcgacccgcattctggaaatcaccccggaacgcgtgatcgactttagcggtaattacgaagattacctgcgtagtaaagggatcgagtaagtgattatccgtcaccccgatactgtcggggtgacggcggctgatgacaaatgcaaaatagcctgatgcgctacgcttatcaggccttgtattatccctccagtgcagagaaaatcggccagttttctctgcctgcagtccgcatgccgtatcgggccttgggttctaacctgttgcgtagatttatgcagcggactgcctt

SEQ ID NO: 91 - DNA, 16425 bp, Escherichia coli
  source 1..16425: mol_type = genomic DNA
aagaacggcattgcataaccttgcagtggcgatcgagcattacaatgaaaaccatccgcatagtgcgttgggttatcgctctccgcgagaatatcgacgtcagcgggtaatgttaacttaagatacaacccctgtctggaaataagggggcaagaacatgacgtttgttaacgcccaggccgaagacagccaaatctttttatataagcgccgctatgttccggtagaaggctatgcaccgtggctggtttctggcaatgccagcgaactggaacgcattcactatgaaggtatggacgatgttattctgctggattttctgcccaaagagttaggttttgatatgaacatgcatatcctctcttttgcaccaggtgccagccacggttatatcgaaacacacgttcaggaacacggtgcctatattctttccggtcagggggtttataacctcgacaataactggatcccggtgaaaaaaggcgattacatctttatgggcgcttattctttacaggctggttatggtgtagggcgtggtgaagcgttcagctatatttactcgaaagattgcaaccgcgacgtagagatttaagtcataccactcgcctgattatttttagctatgttggattttgccacggtttataccgtggctttttttgtaacattgcctgatgcgcttcgcttatcaggcctacatgatctctgcaatatatagaatttgcgcgattttcaggaaggatatagtactcatgccgcatccggcatgagcactgcgctcttatacgaaataaatagcatccgctttaaaggcaagagtcaatttttaattccctgacctattttaatggcgcaggcaatatttcgcgcgctgttgaagagattggtttcaccgctggcgagcacttcggctaaaggtgccagacgtggcaaaatgctgaataccgcatcaatgccgtactggtgcaccacttccacgccatcacccaatacgccagcaattccaagcaccggtacattaaactgtttcgccaccgacgccacacccagcggcgctttaccgcctgccgtttgcgagtcgatgcgcccttccccggtgatcaccagtgctgcgccctgcactgcctgcgcaagattgaccgcattcaacacaatctcaatacctggtttaatatccgcattgagaaataccgccgccgcaatacccataccgcccgcagcgccgccgcccgccatctggcagacattaatttcagtttgctgttgtaaaacacgggcgtaattttgcagcccctgttccagttcttcgaccatttccggcgttgcccctttttgcgggccaaacaccgccgccgcgccgcgtgcccctaccagcgggttatcaacgtcacatgctacttcaatatggcaattcgccagacgcggatcgcattcatccatctcaatgcttgccacgcgcgctaaattaccgccgttagccaccagcacctgaccgtcggcatcaaggaaacgcacaccgagcgcctgcgccatacccataccaccgtcgaccgtcgcactgccgccaatgccgagaataatatggcgaatgccgttatccagcgcatgacgaattaactcccccgtaccaaaactggaggccagcaacggattacgcttttcaggcgcgaccagcatcaggccacttgctgccgccatctcaatcaccgccgttttcccgtcgccggtaaggccataaaaagcattcactttttcgcccatcggcccgcagacttcaagcgtcacgatgttgccgcccgtcgcggcgaccatcgcatccaccgttccttcgccgccatccgctatcggcaaacagatatagttcgcatcgggaaagagggtcgaaaacccggctttaattgcctgacaacatttttctgcacttaagctctctttaaaagagtctggcgcaatgacaatcttcattatcaatcctttttcaacaaattattcgatacgttcccacggaataaggttatccataagaacagccagtaaaatcccgaccaataagccgttactgagcagaggacgaagcgttaatggaaggtcttgcagatacacaggcggtaatgccattaaaaatatgccgacaaataacggcaatgcgagtcgataaatattgcgagcggtaaaggttatttgctggctaaacaccagcgcggaaaagagtaaaggcagataagaaaccagcatgaccgcgctactcacgggtaaagggatactgcaaaacagtcgtgtgagtgccggaaccagcgccaccagcaggcaaataacgctgccataaataaacgaacgccgcgtgtaatcgcctgtctgggttaataaaccaatggatgaaacaaacggtgaaaatggaattactgccagcggtacggttagcagtgtcataaatccggtcgccacaaagctacgacgataacgcgtattccccgcgccctgctgcggataaaaaacatccgtgccccgaatcgcaccgtaggtattgctgatattcaccagacctgtaatcaccgccgtcagaataattcccggagacaaagcacctccactgccgagcgggaaccactgccagtgcaactcaccggagagcgagtgcgaagaaggaaagcaaaagtaccacaacaaccagccggttatggtgccgaccagcaggccataacgggcaaaacgttgcggcaggaagataatcatccccagtaccaggcacatcaccgccaccgagagcgcgaacggcggtaactgaattttaaaatttgggtcggctatgccaaacggcagcccgagcatacctttgaaaaagatagtggtcagctgcgcgcccagcatcaacataaacaagaccatcaccgacggcgtaaataaccgtgccaggcgatggcctaatccgctaaaaccaatcaacatcgtcagcacgccggagagcgcaatccccaccgccaggctggtagcgatatcgttgatcggtgtcccgcgcgatgcttcgccaagggtgatagtaaggatggttccccaccacaggccacccggcccttccataatagcgcgacgatgaccgcagaacgcctgagcgaagcaggccagtgcggtagcaagaaaagcatattgcgtgagcgtaagcaggctactttgcggcaactgaaaagcagaaagtagcgtaggaggaaccacaaccgtgttgcaaaaaataaagaaaaaccactgaaatcctgataacaggctttcgcggctcactgcaaaattgaacataaacacaccttaaccggagaatgcccgccgcaaggacgggcattgcaggggccagattactgctgatgtttaaggataaattgacctttcggcgcaacagggaagccctgttcaatgtcgtaaatcacatcaccacgtaagatggttttcgtgatacgcgcgccaatggtacggccaacatacgggctgactttgtggcgatattccagatcgtcattggtaagaacatagctgctattcggctgaatgaagacgaagtcggcatcttttcctggggcgatacggcctttttgctgcagaccgaaaatatctgctgcgttagtcgccattaatttgccgaacattggcagagacattccgcgtttctgtaccgcttcatcgaacatcacgtccatacagttttgcagaccggcaataccgccccatgcttccatgatgttgccggctttcatttccggagggcatggtgagtggtcggaaaccaggcagtcgatttcaccgttaaacagtttttcccacatgcctttctggttttccagatcgcggatcggcggtgaacacttcgccagagtgccgatttcttcgaactgatcggtatccagtacaaagtaatgcgggcaggattcacaagtaacgtcctgaccttcctgacgtgcacgagtcacttcttcaacgccttccgggctgctgatatggcaaacgtgcagacggcaaccggcaactttcgccagatacagcacgcggcgaatcgcttccacttcggtaaataccggacgcgaagccacatagtcatgggcagttacgcgaccttcacgtttcgcttcttcgcccagtgcgtcacagatcagcgcgttttcgcagtgcaccagcaccggctgccccagttcgcccagcttctgcgcacctttgaagaactgccagtcgtttacatcacggaagtcgttgtcgataccgcgatcgccacaggtcgcaacgaagcatttgaagccgacaacgcccacttcatccagctcatgcagacggtcgatgttgtaagacaccaggccaccgagttgtgccgcatcgatagtcagcttgcctttagcggcatcgaacttcagttcaattgaagcgcggtcaaccgttgcaggcagctggttgagcggcatttcgatcatggtggtgataccaccttttgccgctgcgcgagtaccggtttcataaccttcccagtggctacgacccggttcagaaatatgggtgtgcgcatcaaccatgcccggcgaaaccaccagaccagacgcatccataacttcttttgcatcgcccagatcctgaccgatagcagcaattttcccgcctttaacggcgatatctacaacgcgagcttcgttttctaaaataacggtgccgtttttaatgattaaatcaaaagacataacaaactccttgtaaaatacagattggtttttaactcaatgttcaatatcgggattaattaacctatggttttttgctctcctgttttttctgctgttgtacgtttctttaataaggcgtaggccgcaaaggcgacgatgacgccgacaaaccatgaaacacgcgataacggttccataaagggaataaacttaccgccaagagataaaataacggccaccagagttactgaaaacgcggtgaggttaaaaccgttatcgtaatatttataatcgccaggtgcggtgtacagttcatcaagattaatttgcccacgcatcaccacaaaataatgtgccatcatgacaccaattaccggacccagcattccgccgatgatatcgaggaacagataaatactgtcctgattttccattaatttccacgggcagatcagcaggctgataatactggcaatcagtacgccgtttttataggtcagttttgtcggtgcaatggcagcaatctgataaccggccggaataatattaccggtggcgttagtggaaatagtcgtcatcagaataaccagtaccgcaaagaacgaggcaaacaggctgtcccaacgctgaacaatatccagcacgttccaggtgtcagcgccgtagtgaatactggctccggcaataatacataccccagcgaccgcaaacagaatataggccacaactaaacccagcgtttgccccagcgcttgctcacgaaacgagtgggcgttttgcgtaaagtcggatgcgctcaccgccggtgccgcccagaccgcaactaccgcgttaatcaccaccaggaacaagaatccactgttttctgctttctgaataccgctcggaatgtagtcaaagattggaccgagcccgaccagcgaaatcgcccaaatcgccataccgccgaaaacgatatagatgcacgggttaagaatggcagtgaatttatttaaaactttgccaccgccaaaacctataccaacgttgaccagccagaagagtaagaaagtaattaagcccggtagagaaagccctaacagcgtgaaatcaccaccgagagttaaaaatcccggccagattttgccaatcagaatcaagcaggccagtgaccccgcgtaacattgcaggccaaaccacataatggcagcaataccgcctcttaataatccgggaaacagtgcgccacgtacgccgtaagaagcacgcaggatcatggcaaacggtacgccgtatttactgcccgcagcgccgtttaataccattaccgcggcaatgaaaaaggcgctgaggataattgccagcataatactaaaggtagacaagccgagaataaaaaagccgccgaccatcacataattgggaacgttatgaaccgaacccatccataaggtaaaatagttaaatgttttccaggtccgctggctttgcgttttcggcaatagatcttcgctatagccgcgttgctggaatagttttctctgatgttccataaatccctcttaatttcacgtatcgaataacgttgttttaatctagctatgaggaacaaataaaataaaaatattatttttaatactgaagcaacatctttggctgctttcttttttaatattgctggccgattcatattctgatatcggccatttttattgcgggtatcaggccagtttatgattcgccattaattccagcgcctgcactaacgcagagtgatccaactggctgccaccgtttgccgcacaggtattaaataactcctggcaggtcgcggtgtttggcagattcagcgcaagtgctttcgcactttgcagtgccaggttgagatctttctggtgcagcgcaattttgaaacctggattaaaggtgcgtttaatcatgcgctcaccgtgaacttccagaatacgtgaggaagcaaagccgcccatcagcgcctggcgcacacgtaccgggtccgcaccggcttttgaagcaaatagcagggcttcagaaaccgcttcaatattgagcgccacgataatctgatttgccactttgcaggtttgaccgtcgccgttaccgcccacgagggtgatatttttaccgagcagttcaaacagcggtttaacacgttcaaataccgcttcatcaccgccaaccataatcgacaacgtcccttcacgcgcaccgatttcaccgccggagactggcgcatcgagataatcgccgcccagttcattcacctgacgagcgaaacgcttagtttcaatcggggaaatggagctcatatcaacaatggttttgcccttcagcgaggctttggtacaaccattttcaccgaacagaacttcttcaacctgtggtgtatctggcaccataataaaaatgatgtccgatgcttccgttacctggcgcgcagtttcaacactgacggcacccagtgacagtaattcatcagcaaccggtccaatggtcgtgacatgcagttgatgaccggcacgcgccagattaatggccatcggtgtacccataatgcctaagccaataaatcccagtttcataattaacctcttttaaatttcgcttttcctgaattcagacaacacgatcccctgccaacttagcggcctaaaaaagcattgtctgaatagcgttacgttttaacggtacggatccatccagcgtaaaccagcttccgtggtggtttggggtttatattcacacccaacccaaccgttgtagtcagagttttcaattaccgtaaagagatattcgtaattaatttctccggttcccggttcgccgcgatgcggattatcagcaatttgcaggtgaccaattttatcggcccactgagtcatggtgttggttaattcaccttccatccgctgcatgtgataaatgtcatactgaattttcaaattgcagcaaccaacatcatcaatcaatttcagcgcctgccgagttccggtgagatggaaaccaggaatatcaaaatggttaataggttcaatcagtaataaaatatcttctttcatcagcatattcgcggcataacgcaggttttctacaagcgttgcgtgaatctgttcactgctgaaaccagccggcgttttaccgaccagacagttaatttttttattccccagcgcacgggcataacgaatcgctgctgctacgccatcccgaaactcttcttcacggccaggaatacaggcaataccgcgctcccccgccgcccagtcacccgccggtagattgtgcagcgtatgttcgagtttattactcgccagcacctgttttaattcttcaatgtcgtagtcataaggaaacataaattcaacgccgcgaaaaccacactgcgcagctttctcaaaacgggcgagaaaatcatattctccaaataacatcgataaattagcagagaaacgtaacattatttatctcccttattcatagtgcatgaagcaggtttcagtcggtgcgtccgctgcgttatcggcgatatcttcaaattccatgacgttatccagttcgctgcccatcgaaatattggtcacacgctcgagaataacttccacgactaccggtacccgatattgcgccattaaggctttcgcctgttcaaaggctggcgcaatatcttccggtttgaagacgcgaatcgctttacaacctaaaccttccgctacttttacgtggtcgacgccgtaaccgttcacttcgctggagttgatattctcgaaagcgagttgcacgcagtagtccatatcaaacgcgcgctgcgactggcgaatcagccccagataagcgttattgaccagtacatggatgtacggaattttgaactgcgcgccaacggctaactcttcaatcaggaactggaagtcaaagtcgccagaaatcgccaccacattgcgtttcggatcagcggcacaaacccctagcgcagccggaatcgtccagcctaacggaccagcctgaccacagttgatccagtggcggtctttaaagacatgcagcatttgcgcagcggcaatttgcgacagaccaatggtggtgacatagcaaacatcacgtccaaaagctttgttcatctcttcatacacgcgctgcggtttcaccggcacgttgtcgaagtgtgttttacgcaacaaagtacgtttgcgctgctggcactcagcaacccactctttacggcatggcagacgccctgctttttgcatttcctgcgccacttcaaccagcagtgtcagcgccgctttagcatcagagacaatccccagatccggacacagcacgcggccaatttgcgtcggctcaatatcgatatgaacgattttgcgcccttcggtgtatttctctaccgaaccggtatgacggttagcaaaacggttaccgataccaaacaccatgtcggacgccagcaacgttgcgttaccgtaacgatgcgcggtttgcagaccgaccatcccggccatcagttcatgatcgtccgggatacagccccagcccatcagcgttgggatcaccggaacgctggtcagttcagcaaactgttgtaacagtgcagctgcgtcagcattaattaccccgcccccggcaacaatcaccggacgttcggcctggattaacatttctacagctttttcgatctgcatacggctggcagcaggtttgtagaccggcagcggttcgtacatgtcaggatcaaactcgatttccgcaacctgaacgtcgaacggtaaatccaccagtaccggacccggacgaccagaacgcatcaggtgaaatgcctgttgcagcacgcgaggcaccagcgccgcttcacgaactgtaaccgccattttgctgaccggtttagcaattgcttcaatatctacggcctgaaaatcttctttatgcagacgggcgcgcggtgcctggccggtaatgcacagaataggaatggaatcagcagaagcggaatagagcgcggtgatcatgtccgtgcccgcaggaccggaagtccccagacatacgccgatatttcctgccgttgcgcgggtataaccttccgccatgtgcgaagcaccttccacatgacgcgccagaatgtgacgaataccgccgtgcttacgcatcgctgagtagaacggattgattgcagctcccggaacaccgaaggcggtggtgataccttctttctccagcacatacattgccgcgtcaacggctctcatttttgccattttattcctacctctatttattggaaaatttttccaactttcaaattttgtcaaaaaaacccgctccgcagagcgggatgcgacagacattatggatgtgctttcagtcccaacgccgtgctgatatcgcgggcggtgtctctgaccagctcaccctgactgacaaaacgatcttctgtcagtcttgatgaaggcccggagatggagatagcggcaacaacactacctacatcatcgtaaattgctgaagctaagcaattcagacctacaacatgctcttctttatctacggtatagcccagttcacgcgcttgttccaggtccttcagcaaggtgggcatatccacaagcgtagttggcgtaaactgctgcaaaccggtttgcagaatgatgctcatcaactcctcttccgccagcggataaagcagcgctttgcccgcaccggaagcatgcagcggcagacgactgcccagtggcgcacacatcctgaccattgatttacactctaactgaccaattaatactgcttcattgccgttacggatcgcgacattgaccgtttcgccggaaagtaacatcaggcggcgcataaacggcccggcgacggagaggacatcgcggttatggatgtacgccgcaccgacgttaaagacacctaatcctatatgccaccagcctaattgactgtcctgatagacaaaatccgctgcttgtaaaaccttcagcaagcgaaaggtcgtggagagcggcaaatccagattgagagaaatatcgctaaccgacgaacttcccccacttttttccagatattgcagaatcgcaattccccgctctaacgcctgtgcgcccttctgtgccacaggctccgcctgtcctggcctgccgcgccgtctaacttccgtcatacctacgttaactccgacctacaagtgagcataaacaatgaacaattagtttatcttatgcaagtcggttgcaggcgtcacgcaaaacagagttcctgttcaggaatactttcaacatcacagttgtcactgccgccgcgatcgatggtcagaaaatcggtgacgcgctgccaggcgaaaagtgggtgatgccagacgttacgatggtaattcactccctgttcgccgttggtgataaacgcccgcagcgttgacaggtctggtttgtcgtcgcctaacgccacgaccaccacaaacacttcacctttcatcgggataaaggcctgagtgcccagcggatgacgttcgagttcgtgaatggtcagcggcagattcgccggttgcgcgcggttaatgctgataagcgtacggtcttgctcaagaatctcaaccagcgccaaatcgtggtaacgctccaccaggccattgttaatatggaaaaaatcccgttgctgagtttcgattacgtcgccataagcactaaaggcttcctgacttaacggtaatacctgaagtttcatctttttgtccttgtaacataattccgttcaaccatcgccgaccggtcagcttggtttcaataacaggcaatctaaaaccttaagagaacaacatcaatacaaaagttggaatatttttccaaaactagatttagtccacaaattgaacagggttatcatgtaaaaatactgataaatcagaggataagaaaatcacgcaacttgcggatttaaaaggggatacctgaagatgttcgatccagaaaccttgcggactttcattgcggttgctgaaacaggaagtttttcaaaagcggcagaacgattatgtaaaaccacggcgacgatcagttatcgcattaaacttctggaagagaataccggagtagcgctgtttttccgtacgactcgtagcgtgacgttgacagcggctggcgagcatctactttcccaggccagagactggctgagctggctggaaagtatgccaagcgagctgcaacaggtgaatgatggcgtggaacgccaggtgaatattgtcatcaacaacctgctctacaacccccaggccgtcgcccagttgctggcgtggctgaatgaacgttacccctttacccagtttcacatctcccgacaaatctatatgggcgtctgggattcgctattgtacgaaggtttttcactggctatcggcgtcacgggaaccgaggcgctggcaaatacctttagtcttgatcccttaggatcggtgcaatggcgctttgtcatggcggcggatcatccgctggcgaacgttgaagagccgctaacagaagcgcagttgcggcgctttccggcggtcaatattgaagacagcgcccgcaccttaaccaaacgcgtcgcctggcgattgccagggcaaaaagagattattgttcctgatatggaaacgaaaatcgccgcccatcttgcgggcgttggcattggttttttgccaaaatcgctttgccagtcaatgatcgataatcaacaactggttagccgggtaatcccaacgatgcgccctccttcgccattgagtctggcatggcgcaaatttggcagcggcaaagcggtagaagatattgtgaccttgtttacccagcgcaggccggaaatcagcggatttttagaaattttcggcaacccacgcagttaaaaatcaagtttccttgcgcgttggcgcgtaaaatagcgcgcaagctgatttgaggttcacttttaactatgcaagagagacacacggaacaggactatcgtgccctgctgattgctgatacgcccattattgatgttcgcgcccctatcgagtttgagcaaggcgcaatgcccgccgctatcaatctgccgttaatgaataacgatgaacgcgccgccgttggcacctgctataaacagcaaggctcagacgcagcgctggcgctggggcataaactggtggcgggtgaaattcgtcagcagcgcatggacgcctggcgggcagcgtgcctgcaaaatccgcaaggtattctctgctgcgcccgtggcggtcagcgctcacatattgtgcaaagctggttgtatgcagcggggattgattatccgctggtggaaggcggttataaggcactgcgccagaccgcgattcaggcgactattgaactggcacaaaaaccgatagtgctgattggcggttgtactggcagcggtaaaacgctgttagtgcagcaacagccgaacggtgttgatctggaagggctggcgcgccatcgcggttcggcgtttggtcgcacgttacaaccacaacttagccaggcgagttttgaaaacctgctggctgccgaaatgctgaaaaccgacgcccgtcaggatttgcgcctgtgggtgctggaagacgaaagccggatgatcggttcgaatcacctgccggaatgcctgcgcgagcgaatgactcaggcggcgattgcggtggtagaagatccgtttgagatccgtcttgagcgcctgaacgaagagtatttcttgcgtatgcatcatgattttacccacgcttatggcgacgaacagggctggcaggaatattgcgaatacctgcatcacggactttcggcgattaagcgtcggctggggttacagcgctataacgaactcgctgcccagctggatacggcgctgacaacgcaactcaccaccggcagcaccgacggtcatctggcctggctggtgccgttacttaaagaatattacgacccaatgtatcgctatcagcttgagaaaaaagcggaaaaagttgtctttcgcggtgagtgggcggaagtggcggaatgggttaaggcgcggtaatgagggacgtatttgtattagtcgcgacttgatctgacacatggccttgaaaggttgagagttaccggttttgatatgagtgtcgaatccttatccaaaacaagaggtaactctcatgcttcatactgccaatcccgtcatcaaacacaaagccggtttgctcaatctggctgaagaactcagcaacgtatcaaaagcctgtaaaatcatgggcgtttcgcgtgatacgttttatcgttaccgcgaactggtcgctgaaggcggtgtggatgcgcagattaatcgtagtcgccgcgctcctaaccttaagaaccgtaccgatgaggcaactgaacaggctgttgttgattacgccgtcgctttcccgacacatggtcagcaccgggccagcaacgagctgcgtaaacagggggtttttatctccgacagtggtgtccgttctgtctggttactccataaccttgagaatctcaaaagacgatactgaacaaattttatcaggtgacgttccgtaaaaagttgtatggagttctcgatgcagtcggcgcgactatcagtacccccgctgaaccctggactatcgggccgccgtactggggcatgtcaccctggcgtgccgctggttttccgctaatggtttatttcctctttctttcccggcaagaatttattttaatccggaaggattatttattttcagatagggactcacattaaacacgtaacattttaattaatgcatggctgaatatgtattacacaatgtcagatatcgtaaaagaccagtgcaattctatgtaaactctctgactgttcattttatttgttgtttcagggtcggaactcaccctcaataaacaactgaatacgagtagatattcatcgtctgagctatatggctttacacaatagccgacatgtcttttctcagtcaggaattttacttttcctcactacgaagttgacgacttcgatatgggatagactcttaattcaagcaattactctgcacaagcatcaggcaatccagctccaatatttgttataaaataatgcgtaacattaatttcaccaacaaaaaaaaggtttacaccatccccttgccctggtatcttaccatatttacaccacactttttttgtatctggatcattctttgatacgattttcgccacttgttccctggccctcactgtcaatgttttcttaaacctacccccatcatcatttgttagggaaaaataagaaaaaaaataatcatcttctacatttgtgtatattgatatatccaccgctacgtgcggaaaaaaatctgggagccatgtaaaaactccatcattttctggtattgccatatagtttatgtaatgtttacttacaagagattcatctttgtataaataaagataagtaattacgcataaaacaacaatgattataatagcaaaaataaatattatcatctttgatagattacttgagatagccagcatcttgtaaagcctttatcgtttttttatgctctggattaatataatcactacatctatctgagcaatctgttgttgatggacatgtcaacccatggtcatttacagccaagtcttttttattatcttcaatcatttcagaatgggatagctttacttttctgccgtacataccgaacagatttaacccgtaatctctaatctctttttcataacccagccctttcgccgatcggctaacaccagcgtcatttaatttagacactcgacaaaatgccatacaatggaaaaattgatcagtcccacctaaatttaatctcttcatatcttcataagtatcagataatatatcccatgctctttgatggtttagttgatcttttcttcttattagcgctacatctgcgggacttaaccctaatggatcaataccattcaccggattcagcggatacgcatacagactccatcccccctccagccctatcgggtcctgagtgatataccgcccctgcaacggatcgtagtaccggttccggttgtagtacagccccgactccttatcatactgctgccccggcagccggtacggctggtgcaggtgatgcgggttctcctcattaagctggttgccccattcatcatattccgcgctccacgccgtattgccgtcttcactgataagcgccagcggcaggccccggtggtcacagtgataaagatgtatttttcgctcaggcaaataaaccggctctatctgtgccgccagccgctccaccgtcagcccgcactgcgcaagccactggcggctttcactgctcacgcagtttgcccggatttccccctccagcctgtccagcagccccaccagttcagccgggaacaccacaccgtgaccgtcttcgctcccttcctgctgtaacttctccgccaggctgcggcactgcgctttctcccgttcaccgttgtctgtttcgatgcggatgagcggcgcgaagctccccggctggtataccgtctggatacgcgtggtgtcggtctgtaccgtcgtcagcctgtcgccgtcccagccgtaccatgtctcctccggtttacgcgacagcgacatccaccccgtcaggtcacgctcccgccgccatacccgtttcgccattcgccgtcccagcgggtcgtagaggtagcggctctcgaccagtggctcgccatgctgt

SEQ ID NO: 92 - DNA, 16293 bp, Escherichia coli
  source 1..16293: mol_type = genomic DNA
tctgagacaacatctggcaaggctgggacggaagtcactgtcgttctcaaaatcggtggagctgcatgacaaggtcatcgggcattatctgaacataaaacactatcagtaagttggagtcattaccgttaagtcagcatccgaatgccgaccgtcatataaaccagcattcgccaggaaccatattgcgtaatgtgaaaaatttccaggttacaggggactacccggtccggaattcacgtggtgcatcttctccctttcacatcccttgctctgtgttctacgatcccattcatcctggcattaccccaattctcccaattctcccaattctcccaaaaatggtaaaccagctctcagcccgcgccatgactggcttaagacgggatccctgcggcaaaatgcgcctttacgtatttggttttaccagcaataatgagtgataatcaaacaaaagaatccgcgcgctgcgatttattgtcgtggaaggatccgggcgttcaggtcagaatacctgtatccataaacagtgcgtgtgctacgtgaaaaataactcatgaacaatgtcattcccctgcagaattcaccagaacgcgtctccctgttacccattgcgccgggggtggattttgcaacagcgctctccctgagaagaatggccacttccacgggggccacaccggcctacctgctggccccggaagtgagtgcccttcttttctatatgcccgatcagcgtcaccatatgctgttcgccaccctctggaataccggaatgcgtattggcgaagcccggatgctgacgccggaatcatttgacctggatggagtaagaccgtttgtgcggatcctgtccgaaaaagtgcgtgcgcgacgcggacgcccgccaaaagatgaagtacgcctggttccgctgacagatataagctatgtcaggcagatggaaagctggatgatcaccacccggccccggcgtcgtgaaccattatgggccgtgaccgacgaaaccatgcgcaactggctgaagcaggctgtcagacgggccgaagcagacggggttcacttttcgattccggtcacaccacacaccttccggcacagctatatcatgcacatgctctatcaccgccagccccggaaagtcatccaggcactggctggtcacagggatccacgttcgatggaggtttataccagagtgtttgcactggatatggctgccacgctggcagtgcctttcacaggtgacgggcgggatgctgcggagatcctgcgtacactgcctcccctgaggtgacggcatacgcgcttccttatataagcggtggtcagcagaacagacataacataagctggagcatgtatataagctgtagtgagtaagtcatgttttatgaagggagcaatgcctcagcatcaggttacgggatcacttacgtaagggacaggcagatggcagctcagccacagacagcactgcaggaaacagaatataaactgcagtgagcagaccactcactgcaccggttaatataagctgtagtcattaaaggagcgctcttcactgattacagtttatgttcagcgggatttgaagagtttttccaggtcctccagcgtgatgcccagtttttcaagcagggcaagcttctccgccatctccggactgattttttccgcaggtgaaggtggcaacggattttccttactctcatcattcggtgcttttaaccggggacgccggtagtgaatgcagaagagttttgtccgcccccgctggatctccgtgtaatcaagatatccaatctcgcgcagctgctccattgcccgtctgaccgtctggttctgggaaaatacaggagacttcagattgaggcgtgcacgcagccgcgccagcgataccggtgccggatcccggggcaggctctctataaaggtgtagagtgcctgggcggactcccgtcgcttcagggcattaatcgccttaagctggagaaggacttttctgtcaaactggtacagttcaaacaggcggggatcggcctgtaactgaacaatatcccgctcagtatcgtagtaggctgactgtaccagatgggtgatgtattcccgggagtgcttctcatcggtacgggaaaacgagatcacggtaccggcaatgcgcttcagggaagggctgatgcgctcacgcagcctgcgggatgactggcttgaaggtataccacacagttttgcaaactcaacaaaaggcagttcaactttgtcaccagtcacgttatggcgggcaaaggaatgaatgatccccacccaggtcttgaaatcgttatccatatccaggcgggggccggtgatctcaaccttatcgaatccctcagcacgggccagggaaagacgtgtcagctcttccgtggcatcagtacgtgacagtgtattttttttactgttcttcagtgatttaagcgtgggaacaaacaccccaagccgcatcagtgccacaggctgcactgtattactggcattaggtgtaagatttacgacttcaccggaggatttatccacctcttcaaacagcttttttatgtccagattgtccttgtccagatagcctccgatcggtggatagtttaagaataaaagcagccactcttttcattagatggcctgtaaagcgccagacaactggcttcagtttatacacaaccctgatgaactttcagggggcatactcactgtagtttatatcactcgctcattacagtatatcctctgcataacacagcttattgtataccagttacagtttatgatttacttgctacagcttatgtgatcatgctccaggctcagtgctggcgcggccttcagagatgtcgggatcttctttggatcttacagggatcgctttaaggatcttattactggatcgaatgaatgtatatgtggataacctgctgagcagcaaggcaattcagatagttcttcagtgatcacttgccgcgactacagtgcgtacctgcttccttcagcttctgtgttattgcgcttcctcgccggttcgcgggctttagcccggtcaccggactgcggcgagcactgatggttcagccctcaatgtagagtatgccgtacctgaattgctcgcagatccataatacggtggttacgtagtgcagtttaataatgacttcttaagatcagacccgccaaagatagtctgagcctgctcagattagcgtcgtgagtcttctcactatacctttacgtgctatacccggattcataaccaacttgtggttgaaacctgcataccataactctattatgtttgtacggtatttttccgtactcactatcaaagtatcaccatgaccggcctggataaatgttatcgccttaaggcccgaacttaacaaagctgaccgttctttcagaattaagagtggtcagggagaaaaaccatgtcagcactgaagaagcagcgcatcgatctgagattaaatgaagacgacaaacacatgatcgaagaagctgcagcaatgactaaccagtccatttcgcagttcatggtcagtaccgcctcagcacgtgctgctgaagttattgatcagcaccgtcgcctgctcctcaatgaggagtcctggaatctggttatggatgcaatcactaatccgccagcaccaaatgaccggctgaaacgcgccactaaccgtctccgggaactggagtaataaatggacggtttaaggattgagattttttcagaggaagttgaatatcaattaagcaacttcgattgtggagaagagtatctgaatacttttctcaccgatcatctgcaacgtcagcacagtagtaagattttacggggttatctgctcgtgacgagagaggatagacctcgtgtcatggggtactacaccctgtcaggcagttgctttgagaaaatacttctccccagcaaaacacaacaaaagcgtgtgccctacaaaaatgtgccgagcgtgactttgggccgtctggcaattgataaaagcattcatcaccagggatatggagaaacacttgttacccatgcgatgaaagtcgtgtatcaggcctcgcaggctgtgggtatacacggaatgttcgtggaggcgctgaacgataacgccaaaaaattctaccttcgactgggttttatacagttaaaggaagaaaactgtaattcgctcttctacccgacaaaatctattgaagtattgtttgaagtaaatgacgaataaaaatcagatttaaaccgttcgatactggatcagggctggtatgaaatgcgctgccagcttgagtataagctgctctggcgtggtggtcaggtgctggctgtggtcatacagcgaatgccgatgtaaacggcactcgtaacattttagcggcggggcatgccgtgcttgcgtgtggaggattggggcagtcaggccgcctgtttaagccggaaccacacgtccttcagagtgtgggcgatgttaatttacccagtcttccagcttcaggcccggcaatcgccgtatcgttctggccgatcggcgtcccggcctggcgcagtgccactttaatatccgtggtgccgtccaccgcggcgcggtcccaagacaggatggcatcgaggcacgggcagaatttatcaaccagttgcacgtgacgcggggaggccttcggaccggaggcaccgaagcgcatttcagagtaagtaatggccgagaccacaatgcggtgactaaacacgccgcctgctcaaggcgcttcagcacagtttccggctgcttgcgcatgatgaacgagcagatacaggtgtcgagcatatacgttttgttcacaggtcaaatcgaccttcgtcgctgacaacattctcgcgctccgccataaaatccggatcggctttttcgagctgcgcgaacgagccccagttcggctggacgggacgcaggatgatgctgtctccttcgcggacgatctccagctctctcacccgctcaaaatccaaatcgcggggcagatggatggcgcggttattgccgtttttaaaaatggatacagttctcattatttccccctgaccgggcggcctgtatggctatgctcagtatatgcatatgctttgaatgtgaagatgtctggcatatggatatgtcaggcctgtgtaatttctttcttttccatcgaagaaccaaaaaaggtataatcagaaaattaaaaagccgcatttgcggctttttctgtatgctcagtaagcatgatggtatcaggttttactgagccatgagccgtaaacttccctgcgtcgctcgaaggcttcccgccctccttccattaccgaaataatgtgctgttgtacaagaggggcatccacgcctccgccgacagtctggatctttccgtctgaatattcacaggcacagacattttctgcatctccgagcaccggaatattggcattgtgagtggcaaagataaattgcgtgcggggtttcatcgccctgatgattttaatcacgtcgtcataaatcgtctgattgtccaggtcgtcttcgggttgatcgatgatcaccacatcattgtcctgctgattcaggacaaacagcattaatgcggatgcgcgttgacccaatgagtgttgttccagtggttttccccggaattcaatgatgtaggtattcgggatctgccagacaataagcgattctatctgctgctccagatacatgctgaacgtctccgcagagctattgataatcccggggagtttatccctgttcagccagagctcgccaaagttactgaagctgtcaaccacggtctggtaggtactttccctcaaccggctgccagtacaggcttctttcagaacggccagcatggcttttttatcgctcgcaaaggacggcacgatcttcaggggcgaatctgcctggttgatggcagccagcacggcttcaatttcctgatactcttccacccacagttcagacaatcggtttagcgcttctgtcagactcttctccagtaacgtctggctgctttcagcccgggtcagctcggctattttttgttccgcaacttccagcccggctttcagcttcaggaagtcggcgggatctgctttttccaccccggctagccgcagctcttctgcaaggccacgttctatttcggcaaattcctccgtcagcgcctgctttttctgcaggaaggcctgctgcttaacgttgagctcatctaggatctggcgggcaccgtcgacaatggtgttcagggagctgagatgagtcgtaaagcggtcatatccctcacgataatcatcaatatccgcctggttatgtgctgactcatgtttctgctcctgtttcagcccgtccagagtctccctgattccgtcctgcagactgtccagcgctcggcttgccagggaagtgctgctgctgagatagcgctcatcccgcccgaaggtggtctgacgctccagtttttcttccatgccatgctgggcatagaagcgcaggcggaactgcgcatccttctctttcgcctgccattcggagagcgcttctcccgatgttttcagacggcgaagctggactaacctgtcgagcacgaccgcattctgctgccggattttctctcgtacgggagccagacgctcaccgaccagtttttctatcagatcgtgttcaaatccggcaccggtattggacagatctttctggccaaaatacactggcttatgcagaaccgtttcccgtagcgccaccccgtgccggacctggccgtcaaaaatgacctgcggctcctgaccgaaaatgcgaactatctgataggcccgtccgtgacggcacacggcatcaacggtaattttccctccgcttttcagtaaattactgaccagattttctttgtagtcgcggtcagaggccttctcgccaaacggaatgtccagggcatatcggatcccttcaaggatggaggatttgccgctgccgcggatccctatcagggtgttcagttctggagataatttcaccacggttccaccgagcgaaccggcgccctcgaatgctatctggcggatatggctgtgggtcagggccggtttctctccgctgacgcgatgcggaaaatcctgcagcgcaaagcggacggcttcaaaactgtaatcccccagcttcagatagctggcgacttttctggcaccaatgtgatccagcgttttggcatcgcatccctggacttcggcaggatagcgctcaccgagcacgcccttaattttgacccgcaggtcgtgggtcatcaccttctgaaatcccgtcacgcgccggcggacaaggtcattatcaaaaagctccccgatccggcctgggctcagcccgccccataacccgttttgggcctccacgtgagcaaatacaatgaagtaatccctttcataccggtcaaggcgctggatggtctgtgtgatattttctgttgaacgggcattttcattctcaaaattatcaacgcccgcaaacgtggccgtaaggaaactttcaatatggttcgtctgctgtggattgataaaccactcatcagcaaacaccacgagcgtgtgcacgccggcctggccatcattaacggacagctccacgccgggaagcaggtccataccttcacggcgcgcggctttccgcaatactttaaactcgccgggatcgaatttattgtgattggtgatcacgcccacgctcacttccgccgctttgagggcattgacgtaatcgcgaatatatctgtcggattcgccggcatagcgaaattctttgtctgcacgggtatgaaggtgaaaatcgaccttgacccagcatgagccattctcaaatacgggatacattccttgatacctttattcagtcgctgatgaatgcccgaaggctacgcataatttcatttatattagggatatctcgttccggtttcattttatccatcaccggttaataaataattgatctgaacccgagccgcttttaacaggttatggatgagagtgaatggcaaatatctccagatgattgtttttggcaatagaaccttattattagtgcatttatagcaatagtgcaaatatggcaataatagttatttttaattgcataataagcaaatataccattatcttctctcatagatccgatttctgtcagtcacggatcttcctctcccccacgcaacgccatctcctgtaagtacaacatgtagtgcttcatttagctacttatgacactatatgttgtgttatttccctgacctgtgatgcgccacgcaggggcggaaaacagcgatatgatgatttcctcagagtggtactcttccggaaacccgtcaataacagaaaaatcggatctgccggaaatggtccttcgataattaagctttgtttttataagtctgattttaatttttattggttaacataatgcaaggaaaaataaataaggcttactaaaagcaagataacagtatgtgtattaacgcgctgattttttcggcataagaatatatactgatatgcataccagaagtatgtcaaaaagaggtgtgctatgaagcagcgtattacagtgacagttgacagcgacagctatcagctgctcaaggcgtatgacgtgaatatctccggtctggtcagtacgaccatgcagaacgaagcccggcgactgcgtgctgaacgctggcaggctgaaaatcaggaagggatggcagaggtcgccaggtttattgaaatgaacggctcttttgccgatgagaacagggactggtgaaatgcagtttaaggtttacacctataaaagagagagccgttatcgtctgtttgtggatgtccagagtgacattattgacacgcccgggcgacggatggtgatccccctggccagcgcccgcctgctgtcagacaaagtctcccgtgagctttacccggtggtgcatgtcggggatgaaagctggcgcatgatgaccaccgatatggccagtgtgccggtctccgttatcggggaagaagtggccgatctcagccaccgcgaaaatgacatcaaaaacgccattaacctgatgttctggggaatataaatgtcaggctccgttatacacagccagtctgcagccatgataccggcagtgtattctgccggacagcctgcatcgctgcctgttgccattgattatccggctgcgctggcactccgccagatgtcgatggttcatgatgaactgccaaaatacctgctcgcccctgaagtgagtgccctgctccattacgtcccggatctgcgccgcaagatgctgctggccacactgtggaacaccggtgcgcgcattaatgaagcactggcactgacgcggggggatttttcgctcgcgcctccgtatccgtttgtgcagctggccactctgaagcagcggacagaaaaagccgccaggacggcaggaagaacgcctgccgggcagcagactcaccggctggttccgctctccgactactggtacgtcagccagctgcagacgatggtggcaacactgaaaatccccatggaacggcgtaataaacgaacaggcaggacagagaaagcgaggatctgggaagtgacggacagaacggtcaggacctggattggggaggcggttgccgccgctgctgctgacggtgtgacattctctgttccggtcacaccacatacgttccgccattcctatgcgatgcacatgctgtatgccggtataccgctgaaggtcctgcagagcctgatggggcataagtctatcagctcaacggaggtctacacgaaggtgtttgcactggatgtggctgcacggcaccgggtgcagtttgcgatgcctgaagtggatgcggtagccatgctgaaagggaatatttaagtaattaggagaatgatgctggcgaacgtccagctcgccgatgaggtctgctgaattcaaattgcttagtgaaatgtctggatatgccgcattttacccagtgcggcgtacttttggttacggatatgatcgagccagcagtgctcgccgcagccgagcgacagggcgaagccccgagtgagcgaggaagcaccagggaacagtacttatatattccgcttacgctctatgcctgaaaaatctccttacctaggggttatccacttatccacctagttatttttataagatctttttttatagttgttagatctttatttttagaatgcccgcaggcctttatccatgcgggttccagagggggaagtgtgacaaaccgccctttcagtgtgacaaatcacccttaaccctgtgacaaattgccctcagatggcgttgcttttcacaaagttatccatccctgttgactctgttttatgaagtgtgacaatctgaaaacctgtcacacttcacatgggcctgtcatggcggaaatagcggttataaaccataaaaaacgtaaaaatagcccgcggattgtccagtcaaatgagctgactgaggcggcatatagtctttctagggatcaaaagcgtatgctgtatctgttcgttgaccagatcagaaaatccgacggttccctgcaagaacctgatggcatctgcgaaattcacgttgctaaatacgctgaaacattcgggctaacctccgctgaagccagtaaggatattcgacaggctttaaaaggttttgcgggtaaggaagtggttttctatcgccctgaagaggatgccggtgatgaaaaagggtatgaatcctttccttggtttatcaaacgtgcgcacagtccatccagagggatttacagtgtacatataaacccatatctcattccctttttcatcgggctacaaaaccggtttacgcagttccggctcagtgaaacaaaagagattaccaatccgtatgccatgcgtttatacgaatccctgtgtcagtaccgtaaacctgatggctcaggtgtcgtgtccctgaaaatcgactggatcatggagcgctaccagctacctcaaagttaccaacgtatgccggattttcgccggcgtttcctgcaggcaagtgttgatgagatcaatagccggacaccaatgcgcctctcttacatcgagaaaaagaaaggccgccagacgactcatatcgtattttccttccgtgatattacctcgatgacaacagaatagtttgagggttatctgtcacagattttaggatggttcgtcacatttgatccggcaggttgagggtgatttgtcacagttttgctgttccatccctggcagcctgcgcttactcatagttttttggctgtaaccggtagtgaaaccaagtttgagggcaatttgtcacaatacatgagggcagattgtcacacttgttgccctgaacaggctatccgtgtgtgcctatacttgtggtgtttcccgcagatcaggccgtccacgaagttgacctgtttcccacagaggatggaaaaatattcttgtgttgagcgtaagagctatctgcaggaacgatccctcttcgcttcctcgccagttcgctcgctacgctcggttacatggctgcggcgagcgctgcctgattctaacagcaacttttcagcatgatagctgcaataaaatagattgcttctatcatgctgtctgtagacgccgggacttatagtgacttagtttccagacaatcattttctggtggtatagcatagcgctcggctcatgttttgctgtgtgcatgcttgtggcaatcttgctgcatctgccaatgcaattctggatgagttttcttttattgttgctgcaagattgcataaagcttgcagcttttattattgttaacgtgacacaagtattcggctgtcaattccagcactcttctgaatagcaagattgaatcttgctgctagatttatgattgttgtaatcttgctgcaagctgatatcttgttctggaagagttattttacctaacctcaacctggtttatattgatgtttgctgcaagatagcagcaagtaaaggaggctaaatggcctggatagttggttttatttcccagaaaggtggtgtgggcaaaagcactaaagcgagagcgttagcgcgtgaagcatccgcctgtggcatcaaaacaaaattagctgatctcgacctggaacaggcaacgagtgctgagtggcatcgtcgacgtctgtcagctggtttgccaccggttgcttcagttgaagtgttttcaacagcaaagcaggcgatagaatctgccggcgattttgaccttctgattcttgatggcccagctcgtgcaagcaaagggacttcagaaattgctaaggtcgccgaccttatcgtccagccaacgggggcctcccttgacgatcttgtcccggccattaaagttttcaacgcgctggtaaaagaaggtgtgccacgttcaaaactggtctttgctttaagccgggtaggtaccgaagcggaagagctggatgctcgtgcatatatcagtgaagcaggttatgaaactttatctggatgcctttttgagaagccagcatacagaaaagcgatgaattcaggactcgcagtgacagaaacacgttataaaggtttaaacgagagagctgatgaacttatccaagcactcatcgataagattggagaagagtaatggctgatgcatcaaaacttaaaactaaaaggacccgtggtgggctgggggtacccccgggccccgacgaagtggctaccagcctgaatgcgcctgaaatagctccggctgtcgctgccactgatgttcagagacaacaggcagactcatcgccagtgcaccatgagcctgtggttacgcaaacagtgaccgaggtatatacccgccgcgatggccgttctgccagaaagacaaacaggacgctggcatttgcaacacgtgtcacacctgctttcgaccaagagatccgggatatcgcagagcgtgaggggttgaaactggtggaagttctggaaaaagcagttgaggcatataaggaaaaacagggctattaatccggaatgcagcaatcttgctgcattcttttttttgtatgcaatcttgcagcaagatttatgctagataaatgctagattgctgcaagatagattgtataatgctcaaattgagtagttaactgccccgtgaagtacgcagtttgagtacttccctgtggtttatgaacgtatttacttaatgtgagtagttattgggcgaagatgaacactcaaattgagtataaatggagatggtatgaaaattttttgcgatgatggttctacaaatgtgaaacttgcctggtttgaaggcaagacgctgaaaagtgcggtatcagtgaactcttttcgccataactggaaagtcgagggcttaggcagcagtcatacctataactatctgcttgatggccgtaaatatacctacgacccggtcagcgaagatgcgatcagcacgactcatattgagtatcagtactctggtacaaatgtgttggcagttcaccacgcattactgaacagtggaattgaaccccaggagatcgatctcaccgttacgttacctatcagcgagttttacacggctgactgccagaaaaatacgcttaacattgagagaaaaattcacaacctgatgcgggaagtcaccctgaacaaagggggaacttttaccattaaaagcgttgaagtgatgcctgaatcactcccggctgtatttactcgcctagttgctgacaatgttggtcagtacgaaaaatcattggttatcgatctcggtggtacaactctggatgtcggggttattgttggccagtttgaggatgtttcggcagtacatggtaatcctgatattggtgtatcaatggtcacgaaagccacgctcactgcactgaaaatggccagcagtgataccagtccaatgattgctgacgagttgatcaaaaacaggaagaacctggattttgtggggcaggttgtaaatgaggtctctaaactaaatctggtgctggataccattgatacagcgataaataaactgggcgagctagttgttgatgatttgctgcagtatcgaaacgtaaaccgcgtatatattgtcggtggcggggcagcactcattgctgatgctgttcgtaagacatggaaccaccttggcgaaaaggtggtccttatggatgaacctcagacagcgctggtccaggctattgcacgcttcaaagcggaagagtaatcgatgtacgacggcgaagaaaggaaaaaactttcactctaccttcacccggaggactctgccgattgtcttgcactggctgaaatcgaaactgttccccggaaaaaacggggggagttatatcggcaggctttgataaccggcctgataatgcatcagcttgatgagcgaattcccgccgtgttaaccgcgctattcaccagagaactgaatgcggatgaggtcattagtcagattgccaggataacaggctggaaaccctcctccggtgatttaaaagaggtactgaaggcgttgggagggcttcagagtacagtttcaccagaatactctcaggatgacggtgaacaggcccgtctgaaagcggctagggtgaagatgcaaaacctgatctaaaaaagtctcgctccatgaaacctgcaaaatttcgcggggtgtgcggcttaatttttagatttccgcgtttcccgccatttgagtcaatggagtgctggttgacagctccccgctctgaaggacggggattcccacatatgcagccagatttccgggtagtgtggtttcagacgttgttcgatttcattctgtagcgcctgaagtgtgcctgatttgaggttttttgtgctctggcggtcgaaaagaatttcaatgcggatcatgttctcatctcccttttcttttgctgtatgcatatacagcattctaataactgaatgcacacagtcaaatgtccttattgtgactaaaaaacgctcagctctctgagtgtgtgcctgtatgcctgctgtggactgctgtgtccagcttatccacagcattatgcgcacggttctgtggacaaaatacctggtcagcctgcacaaccggcagcagacacatcagccaggacagaaaagccggctccccgctggttccgcctcagcaacggcaggcaggttaacctggccgactggaaggtggtgctgtttatgcaggggcattgcccttactgtcaccagtttgacccggtactgaagcagctggcacagcagtacggcttttccgtttttccctacaccctggatggtcagggggataccgcctttccggaagcattaccggtgccaccggacgtgatgcagaccttcttcccgaatattccggtggccacaccgaccaccttcctggtcaacgtcaacacgcttgaggcattaccgcttttacagggggcaacggatgccgccggttttatggcgcggatggataccgttctgcagatgtacggagggaaaaaaggtgcgaaataagcaggtggtgttactcattgccggaatatccggcatcgcgacggggataatcgtcagcctgaatatcccctttatccatcaggggcttttttatcccgccagccctgtagaaattgtcgtttcgctgtgccttaccttttctgtttctgttgtgttttttgtgggggcaattgtgggatggatttcggtgtctgaaatatattacagccgcaggactggtctgaatgaattatcggaaatatcagagggaacttataatgagagaaaataaaaataatcctgaactcaaaatcagaagtacagaacgagattataaatacatttccagaattactgacaggtacgctggattgtctctggtgttcctgactgccggaattgttttgtggacagctatgaatattatttttgatgcctgtattgattcgtggaaaacggacccggaattaaataattcgatttatatgtggaatatcctgatatatgtcattccgtatgcgttatatgcgcttgcagccgggtttcttgttacattttttctgttcccaatgtacgaattaatatacggaaatatcgggatattcctgttgaaacgccgtatgcgccgggagaacacattaagggagggcagcaataatgcttcgcattaagcctctttttattctttgtgccgccttactgacggtgacgcctgcagcgtcagcggatgtgaaca

SEQ ID NO: 93 - DNA, 15891 bp, Escherichia coli
  source 1..15891: mol_type = genomic DNA
caggtgacgttaaccagttaacaattaacgccggatacagagaatccacccataacactgtttttggttttaactgttccgcgtgcgcttagccgcattcaccgcatcacaaaattcactttaaaaacggcggcagagcagtcacggagtaaaactgataccgccaaacgtcaccagaaaattgataacagagggcgttgcagcggggttgtcacttaagcgtatggtcaacctgacaactcggtgtcctcaacggggaaggaataaccccgccatacttaccgccgcgccatttcgcgggttgccacaaccggaagcgcacggtcgaattaaatttaacgacaccgtacagtgagacgaacttcgccgtgcgctttcgtgttgtgtgcctgcttttaaccacgtcaggcgaggtggtatccttcttatcccgaataaccaagaaggaaatctatatgactaaagaagaatttgtctcttatatttttgataaaacggttgaaatgtatgccgctacttacgggtcctgtaatcctctgaataaaccagaggggaaagatgatttcgacaaaatttaccgcttcttggaggaccgctatatcaaaaggttagaggacgcagggatcaaatccccagtgaagtcaccattgtcctgagaacttgcaggacgtcatgatcgtaacttccatccaaaccgcgacggcaaattgcttctcgtattaccggaagcagttcgctggaaatctcggtgcatatttcacctgataatacgcctggctcaagtgagaatattggtgaacttacggtcttggtctcgacagtttcagagtcagtgccaacattataaagctcaacgaaagcggtcttgattttccgggccagatcttttgctggctcgcttgcaatatctttcccgatttctcgcagcacagaatgcaatgtatgagctgctgttttctgtacatcagacggtaaatctttaaattccatcgtcagcctcatcagtcagtgtttctggctaaccagcaacgcgcgccagattcggttttaaacgttttgcttttggtatacgtcatcgcggtgaacgtgccgtcctggttggggaacacgccacataccagagattcgctgttgccaagatcgatagtatccatgctgacctcatttccccttaacgccggggtagcggaactgtttgctgagaacaccgtgcggtgtcttgatggaaagtaatttagaataacctaacataagaggcaagtgttttttgttagattagtctaacaaaaagagtgggcgcaactaatcacttgaaaagaatgttattttattgatttatttttacgcgctttaagcatttcttcgaagagtttgttgaagttttctactcttgcgcgcatttcagacagcaaggcttcctgctcggaagatggaagagcatcgaataattcgatcaattctttgtggttgggagttagctctgtttccacatgaagttcttgtgccggcactggtgccttgtcttcgtcaccaaacattagccatgtaggtgagcacttcagagcatccgctaaagcaaacaatcgttttccgactggctgggtttcgtctctttcccattgtgaaattgtgacgtgagcaaccccagcgaggcgcgcagcttctcgttgtgttaagcgtaattcttttcgtcgcgccagaactcgctggcctagggttcttgtatccatagttaggtaattctaatttttcttgacttaggtatcccgcgcacaataatgttagaaaagtctaacaataggaggctttgatgcttaaagctgacgcaattactttttttggcagcaaaacaaagcttgccaatgccgcaggagtgagactggcaagtgttgctgcttgggggatactggttcctgaaggtcgcgcgatgcgtctacaggaggcatctggcggggagcttcagtatgatcccaaagtttatgacgaatatcgtaagacgaagcgggcggggcggttgaacaatgaaaatcactcctgaacaggctcgtgaggctctggatgcctggatatgtcgaccaggaatgacacaggagcaggcgacgatattaatcactgaagcattctgggctttgaaagagcgcccgaacatcgatgttcagcgtgtcacagatgaaggtggcgcggttgatcagcgagcgcttggcgttaatcgagtgaagatattcgaacgctggaaggctatcgacactagggataagcgtgaaaagttcacggcgctagtgcctgcaattatggaggctatccggattaatgatttcaggttgtatcgtgaaattagtgacggaaaaagcatcacgtacatgatcgccgggttaaacaaagaatatggcgatgtggtggagtccggactgctttttgctgatcctgccgtagtggatcgtgaaactgacgaacttatagaaaaagcaattgctttcaaacttgcgtatcgactgcaataccaacaaaaagctggatggaattatgagccttctttttgctgaacgcccactggttataaacacacagcttgcgatgaagattggcttaaatgaagccattgtgttgcagcagttgcattactggttgagagataccaattccggcatggaatgtgatggtgttcgctggatttacaacacaacggaacaatggctggaacagttcccattctggtcagagtcaacgttaaagcgcgcgtttgcaagtctgaaaacgctggggcttttgcgttgtgaaaagctcaataaatcaaagcgcgatatgaccaatttctacacgatcaactatgggagcgagcttttagatggtggcaaattgaacgaatccatcggttcaaaatgcgccgctccatcaggtcaaaatgacacgatggaagaggtcaaaatgaaacgctccattggttcaaaacgacccaatgtcatcgggtcaaaatggcctgatgatcttacagagaatacaacagagattactacagagaataaaaacacttttcgtccggaagcttcgcaaccggacccgcagaccgctgaacaggattttttaacccggaaccccgacgcggttgtgtttagtgcgaaaaaacgccagtggggtagcagggaggatttggcgtgtgcgcagtggatttgggggcggatcgtgaacctttacgaacaggctgccagcgacgatggagagatcatgcgaccaaaagagcctaactggacagcctgggccaatgacgtgcgcacaatgcggatgctggatggcagaagccacagacaaatttgcgaaatgtttggtcgggtacagcgagctccattctgggtaaaaaacatcatgagcccgtcaaaactccgcgaaaaatgggacgaactggtcatccgcttgggacgttcacctgtacagcgttgtgtgaatcatatttctgaaccggatacagaaattccgcctggtttcaggggataagtgttgatttcaggtcatgaggtaattttaaggaggacttgtggcaaaagtttttacacaggaagagcgggaaaaaattaaagagcaggtggtcgaacttgtgcgccagagcggtcgcgagacattacgacagttggaagctaaaacaggtgcgacaagatatctgatgagcattcttgccagagagctggttgccagtggttatgtatacaactccggctacgggttattcccgtctgaacaggcacgaaaggactggcaaaatgcccgcaaaaaactctctagggcgaaggtgaagaaacccgctgtggttgatccggaccttatctggtcactacctgatggagaaatacgtcgctacgacagtcgtctaaacataatctgtcgcgagtgccggaagagcgaagttatgcagcgcatattgtcgttttatcagggaaatgttcggtatctatttaagtgacgagattaaagtgcattagttaagatgtaaattgacattttcatggcatagggtagaggtagcgtggttgtctgctttgtgccatgaactgatgtcgcttgtgtgcgtggcaattagtgtataacggatatcatcagactccagcagtagcattgcttgagcatactaacatatgaaatctttagttaacgtaagataaattagatttagtttttttgagtatgagctcataaataatcaaaaaaacttgatacgccatatgactttgatttattttggaaaaacataaaggtaatgtaatgtaaagaggaaaatgtggacattagagactggctaccagaatttcaagtttcagcagaaacagatcgggacttacagacctatttttttaagctaccggcgataaaggatattattgaaagtagggcttggttggttcttggaagaaaaggtactggtaaaacagccatttatgaacaccttagaagaggaaaaccagccaatctcaacgggttttactcagtatgtctaaattttagtgactatccatggccagcccatcaactttacaaggatgcaatggctggagaactttccgcttatcaaaaaagttggatgtatcttttttatattaaggcattatctaaacttattgaaataaaaaatgatgctggagagactttaaacaaagatctaacgtgggcacataattatatcaaaactatctttggtagtcccgacccaactcttagggaggttttgttttcaaaaataaccagattaaaaaccataaaagggcccagtgctggtcttaatgaagtatcattggacgcaggtgaaatttcgttagaggaagttgctgagaatgctcagctaaagcaaaagctaagagctaatgctttcacattgcttacgtattttgaaaaaatttttaaagataacattggtaatgaaaaaataattatcgcccttgaccaattagacgaaaactggctagaggggcaaattgaagaatatagtaaggttttaataaatctgctaaatgtctgtagaaacatagcatctgatgaacgcctcaatgataaattaaaagtcattcccttcctacgaacggatatttatcattctttgaaattcaatgataaaaacaaattattgcaagatagtgctatcataatctcatggaatgaaaataatctaaacgatatgtattatgagaggataaagaaatacaaacctaatgatctcatattagatgacgaaaaggacagatctgggaaagtatttgaggtttcattcgttaggcaggggactcctccatttaaatatatatgtcgccgttctttctttaggcctagggatattattgtctacttcaacaaaattagggcatgtcataaaaataatgtctcaggtctttacacttccaatgagctttatgaagctgaccgtgaagcatctataagtgtgtacaatgaggtgattgatgaatggtccaaccaattccctgaaattgagaacttactaactgttcttcaaactatccaagtagaaacattcgattttaatgatttctccgagaagtgccgtaatgaatttgcaggtatttctgatggggtgatacgtcaatatatcaacttcctgtttgataactcacttatcggacaaaaaaaacaaggtagatgggaatacgtaagtagtttgcctaacttaaaaattaatctacaaaatgagtttaggacacatcatgctttaaaatacaggttgcatttaatagaaagcagaccgagccaaaatatttagcttacatccatctccattaagaaatcttgctattgttcttatggatcgtctttctgactgatttcatattggcgaggtaaaggtagttaagtagaatggctgcgggtgcttgaggctatctgcctcgggcatgaacaccaaaggcagatagagaaaagccccagttaacattacgcgtcctgcaagacgcttaacattaatctgaggccaatttcatgctagacacatgtaggttagcctcttacgtgccgaaaggcaaggagaagcaggctagtgttaacaccaagctgtaatgtcccctttgaaccattctaaaatgtccccagacaattctctgggggatttttcatgatcaaagagactgttacgatgagtcataaggaactccaccgacttcagattattcaggagtcaattaatcgacatattactcaggaacaagctgcggcacgcattggcatttctattcggcaggttaaacgtctggtgcaacggtatagaaatgaagggccttctggtctggtttcccaccgacgtggaaagcgtcctaataattccttttctactgaattcagagcaacagtaatttcactcctcaaaggccgttacgctgattttggacctacgtttgcgtgcgaaaaattgcgcgagatacacggtttatctttatccgttgaaactctcagaaagtggatgatagaagaggggttatggcgtgaacgccgtcgtaaaattgcccgtatatatcaacgccgcatgcgacgaccatcttacggtgaactgatccagattgatggctcacctcatgactggtttgaaaatcgaggccccagatgtacactgatcgttttcattgatgatgccaccagtgcgttgatggcgttgcgttttgtgcctgctgaaacaacccgggcttacatggaaaccctccggggttaccttaatgatcatggcgtaccgctcgctctctactctgatagacacagtatattcagggtaaataacccagagcgggaaggtgagctgacccagttcactcgtgcgataaagacactgggcatcgagccaatccatgccaacagcccgcaggcaaaagggcgggtagagcgcgccaatcagactctacaggacaggctggtcaaagaaatgcggcttcagaatatcagtgatattgaaacagcaaatgcatggttgccgacctttattgaagcctataacaaccggttcgctacgtcgcctcgtactactgataatgctcatcttgatgagcaccattctgaagaggaactgggttatatcttcagcctacaggcgaagcgcgttctgtctaaaaatctcactttccagtacaaaagcagtgcgtttcaggtacgcagtgagggccggggatatcgacttaggcattcggttgttactgtatgcgagaactttgacggtgaaattaacgttctgtatgacgggaaagcgctgggctgggaaaagtatgttgatggcccggagcctataccactggatgatgaaaagagtgtccatgaacgagtggataatgcccgtattgatttacgctcaaaatactatgttaaacctaaagctgaccatccctggcttacgcgccgaacgcaaagtcatcagcaagttaagcccccgaagttacctaaaaagaagcctgatcccgataaaaaagattgaaaccaagatcgattcggttgagtgcatatccattcatagggtagattcttaagtcgcgtttctggtgttcattttcgggtggtttgttacttgttttaccggggatatgccagaaacgcgctgagtcagtctgggcggtgcgcgtaatgaggcgttatggtaaatagcctatgctaatgtccgctaagagcaagaagcggaagttggcagttttgtggactgtccccacaaaagtgactacagaaatagttgcaattcataattgatcatgggttgtcagttaaactcgtggcgatttaaatagactaattgggagtgcgtccattacttatatcttgtaatgttaactatcagaaatgatacaaagataatatgtctttaaagaaaaggctgatggcgaaaagtggcccgatgagggccacaatacggctgtcacttagacgtaaatatcaatggtgccagcggtatttgtatcgtcttttttctcttcttttttatcaggctgaactgtcgcgtcttcattctttttctctgcctgctgccttaacaactgctccagttgagcccagaggctttcaatttgcttctgtaccaatgcagccatttcttttttctgctgtgtcgtcatcccctcttccgatgagattttcccaagcttttcagtcagcacctgaatttgtcttgtgattttggctatttctgatgttccttccggggcggagttgtttgaaataacggttgaggtatttccctgaattgtgacagacatagatttctccttttaaaaaagcactatcggcatgcacaaaaaaatctttaatcgtatttcttgtgtcattaattgtttgatgttcagattgttttcctcgcgggctggcgcgcctcagaaagtaaagcttgttgacaggggtaaacgttcggcaataattttctgccgcatgcgggtgttgcataaaacgtgttacgttcctttatcgacaggtcaggtcaccgctcacccgccgacgagaaagcaacactgacatgctaaagcaaaaaatagatgaataagttgagttgtgcatatgtagcctgaccgtcacaaagtatatggtgtctgtaccagtaagatgatggccggactctttaaaaacgagctgacctgcacaatacaggatggacttagcaatggctgctcctggcagaaagcggacagtgatcaccgttcttacgactactttctgacttccttcgtgacttgccctaagcatgttgtagtgcgatacttgtaatgacatttgtaattacaagaggtgtaagacatgggtagcattaacctgcgtattgacgatgaacttaaagcgcgttcttacgccgcgcttgaaaaaatgggtgtaactccttctgaagcgcttcgtctcatgctcgagtatatcgctgacaatgaacgcttgccgttcaaacagacactcctgagtgatgaagatgctgaacttgtggagatagtgaaagaacggcttcgtaatcctaagccagtacgtgtgacgctggatgaactctgatggcgtattttctggattttgacgagcgggcactaaaggaatggcgaaagctgggctcgacggtacgtgaacagttgaaaaagaagctggttgaagtacttgagtcaccccggattgaagcaaacaagctccgtggtatgcctgattgttacaagattaagctccggtcttcaggctatcgccttgtataccaggttatagacgagaaagttgtcgttttcgtgatttctgttgggaaaagagaacgctcggaagtatatagcgaggcggtcaaacgcattctctgaaccaaagcatgacatctctgtttcgcaccgaaggtgacacttctgctttgcgttgacaggagaagcaggctatgaagcagcaaaaggcgatgttaatcgccctgatcgtcatctgtttaaccgtcatagtgacggcactggtaacgaggaaagacctctgcgaggtacgaatccgaaccggccagacggaggtcgctgtcttcacagcttacgaacctgaggagtaagagacccggcgagggagaaatccctcgccacctctgatgtgtcaggcatcctcaacgcacccgcacttaacccgcttcggcgggtttttgtttttattttcaacgcgtttgaagttctggacggtgccggaatagaatcaaaaatacttaagtagcgcgcagggataagagggatggtcccttaaaggggagagctaattatccggaaggattctgatgatgaacatcgaagaactgcgtaaaattttttgtgaagatggcctctatgctgtgtgcgttgaaaatggaaatcttgttagtcattaccgcattatgtgtttgcgaaagaatggggctgcgttaattaattttgtggatggtcgagtgacagacagatttatcttgcgcgaaggtgagtttgtcacttcattacaggcactgaaagagatcggaataaaagcaggcttttcagcttttgcagaagaataaactcatctacaatcttgcgcggggctgaactcccgctgagtaacaccgtgccaccggagaaaaccgatggcacgcaacgtaaaatattacaattctgataattcgcccgttcttgcctgcacgcacgagcggtattctcacgcattcaagtctgaatggttccaacaccctccatgcactgaagagctggctgaatggataattcagtgttaccgcaggcgcggatacgaggttaagaaagcccttagtctcgactaccgtcactggataatctcagtcagattgccttactccgaacgcccaccacgtgcgtcccgcactttccagcaacggatctggaggtaacgtgcgggtattacttagacctgttctggtgcctgagcttgggctggtggtccttaagccgggccgtgaatccatacagatatttcataatcctcgagtgctggtggaaccggaaccaaaaagcatgcgtaatctgccatccggagtcgttcctgccgttgaccagccgctggcggaagacaaaacattgctgccgttttttagtaacgaacgggtgattcgtgctgctggcggcgttggctcattgtctgactggctattacgtcatgttacatcctgccagtggcctaatggcgattaccatcacactgaaacagtcattcaccgttatggtaccggcgcaatggtgttgtgttggcactgcgacaaccaactgcgtgaccagacatcggaatcactggagctgcttgctcaacaaaatctgacagcatgggtgattgacgtcatccgtcacgcaataagcggtacgcaggagcgggaattatctttggctgaattatcctggtgggcggtctgcaatcaggtggtggatgcactacctgaggctgtatcgcgtcgttcgctgggattaccagcggaaaaaatctgctcggtgtaccgcgaaagcgacatcgtaccgggagagcagaccgccaccagcatattgaaacaacgcacaaaaaatcttgcaccgttgccttacgcccaccagcaacaaaaactaccacaggaaaagacggtggtaagcatcaccgttgatccagagtctccggaatctttcatgaagctgcctaaacgtcgccgctgggttaaggagaaatacacacgttgggttaagacacagccgtgtgcttgctgcggtatgccagccgacgatccgcatcatctgattggtcacgggcagggcggaatgggaacaaaagcacatgatctctttgtgttgcctttgtgcagaaagcatcacaacgagctgcatacggatacagtggcatttgaagagaagtatggctcccaactggagctgatatttcgttttatcgatcgcgcgctggcaattggcgtactggcgtaagtggagaacgagcatgaaccttgaagccttaccaaaatattactccccaaaatctccaaaattgagcgatgacgctccagcgacaggcaccggttgtttaacaattacggatgtaatggcagcgcaggggatggtgcagtcgaaagcaccacttgggttggccttatttctggcaaaagttggtgttcaggaccctcagtttgcgattgaaggcctgctaaattacgcgatggcactggataacccgacattgaacaaattgagtgaagaaatccggttacagattattccttacctcgtgagttttgcctttgctgattactccaggtctgcggcaagtaaggctcgctgtgagcattgttcaggtacgggattttataatgtattgcgcgaagtggtgaaacactacagacgcggggaatctgtaatcaaggaagaatgggtgaaggaactatgtcagcattgccatggtaagggcgaagccagcacagcgtgcagagggtgtaagggtaaagggattgttctggatgaaaaaagaacccggtttcatggcgtaccggtatataagatttgtgggcgttgtaatggaaaccggtttagtcgtttaccgaccacgctggcacgacgtcatgtccagaagctggtaccagacctgaccgattatcagtggtataaggggtatgcggacgtcattggtaaactggtaacaaagtgctggcaggaagaagcatacgcggaagcgcaattgaggaaggtgacgagataaatgatttttgctgaagatggcgacatgatgtttgcatttttcaaaaaatatggataaaattttttcaacgatgggctttgtatacccgacgttaagaaaaagtagaaaacccgctgatgagcgggttttgtgctttaaatggggcaatggtaatgatgaatctcatcccgggactcatgtctgttaacttattatttagctggtgacttggttatttgcctgatgtttaaaatgttttcttccagtacaatgtccctaaacacaatgagtctgcttattatattattagcagagctattacggccaaagtacagcataagcttttaaagccaatcaaccagtcatcaagacagacggggttattcataaaaactctccatgtgtgatccgatggggcctgaaattaaagctttaatatagctcatgaaaggtaaacattggcagctgaagggccacgcagaccatttatccggcaaaattccacgcgtaatccggtggtaatttcttctgcatcgcggagattgagcgctgaaacatgaagctggacatcgatacgaccatcggatggggtgataagacccttgccgcttttgccgtcaaaggttttgacaattcctgtcattttacgggacaaaaaaattccttaatactgataacttggcgcactatacacacgttcctgaagaaagctatagttttttgatggggttgaagatggctggatgtctaaaataaacattgcttcatatgttcaactatgcgttaatgattgcgtcggtttgaagaacagacgatatacgaagtagtttactaaagcagttctcatttcaggtgttattcacttattccttctttgagtctctccaattaagtacgaagtcgtttctgttatgcaaaccatttatgccgaaaggctcaagttaaggaatgtagaatgtcaaataaaatgactggtttagtaaaatggtttaacgctgataaaggtttcggctttatttctcctgttgatggtagtaaagatgtgtttgtgcatttttctgcgattcagaatgataattatcgaaccttatttgaaggtcaaaaggttaccttctctatagagagtggtgctaaaggtcctgcagcagcaaatgtcatcattactgattaaaattcatcgctcgtctgtatacgataacgaagaaggctgatgcctgagtagagatacggacagagtagtgaatattggatctctttaataaaaagtaaggaggtccaatacatgaaacaatggccagcatatttggcaaaatcttaatcaggaaaagtatgctaaccattgtggtgaagtgcaggtttgctgcatgaatagtttcacagcagaagctaactgctggcatcgcaaaacaaagtgcgtaagtggatgactcccacaaaaagcaccacaatctcaaacccgctcaggcgggttttttattatctgttttaaatatattattaaaatataaaaaatacttgttactaataaaatcaatcaggctacagctttaagatttgtctggaatactttgttgcaatgagggcagatcaaaagggcacctttttgtactcttgaaaaactgtgttctgactcttgggtgcagtttgggcaggaacatttaacgagataattacggcgtgattttgagtctttacgttctgacataggcttttcctgtataaatggccgtatacagtacactaaatatgaaaacatttctcgtattattattttatatatgactttctttcaaaataattacccacatttttaatgtgtatgtttttttagcgccgttgagaacaacgtgtgctgtcaaaactaccccgtagactccgatcttttcaaacatattgcaccatccgtgtacatcggggtgaggatatgaaatcaatggataagttaacaacaggtgttgcctatggcacatcggcgggtaatgctggtttctgggcattgcagttactcgataaagtaactccgtcacagtgggctgcaatcggtgtgctgggtagcctggtttttggcctgctgacgtatctgacaaatctttatttcaagattaaagaagacaggcgtaaggctgcgagaggagaataatccaatgactcaagactatgaactggttgtgaaaggagtccgtaattttgagaataaagttacggtaactgtagccttacaggacaaagaacgctttgacggtgaaatttttggcctggatgtcgccatggaccgtgttgaaggagctgcgctggagttttacgaggcagcagccagaatgagcgtccggcaagtcttcctggaagtagcagaaaattgtcagaaaagttgagtcttatctgcagcatcagtactcctttaagattgaaaatcctgccaataagcacgagcgtcctcatcataaatatctatgaacacaaaaatcagatacggcctgtcggctgccgttctggcgctgattggtgctggcgcatctgctcctcagatacttgaccagtttctggacgaaaaagaaggtaaccacacaatggcataccgcgatggttctggcatatggaccatctgtcggggtgccacagtggtggatggaaaaaccgtttttcccaatatgaaactgtcgaaggaaaaatgcgaccaggtcaacgccattgagcgtgataaggcgctggcatgggtggagcgcaatattaaagtaccactgaccgaaccacaaaaagcgggtatcgcgtcattttgtccctataacattggccccggtaagtgtttcccgtcgacgttttataagcggctgaatgctggtgatcgtaaaggtgcatgcgaagcgattcgctggtggattaaggatggcggacgcgattgccgcattcgttcaaataactgttacggtcaggttattcgtcgtgaccaggagagcgcattaacctgctgggggatagaacagtgaatcagatattcatggtgatttttctcgtgttgtcaggatttatcgtcggaaatgtctggagcgaccgaggatggcaaaaaaaatgggcggaacgtgatgctgccgcattatcacaagaggtaaatgctcaatttgctgctcgaataattgaacaggggcgaactatagcccgtgatgaggctgttaaagatgcgcaacagaaatctgctgaaatttctgccagggctgcttatctgtctgatagtgttaaccagttgcgtgccgaagcaaaaaaatatgccatacgccttgacgcagcgaagcataccgcagatcttgccgctgccgtcagaggcaaaacaaccaaaaccgccgaaggaatgctcaccaacatgctcggagatattgcagcagaagctcagctttatgctgaaattgctgacgaacgctacatcgcaggagtgacttgtcaacagatctatgaatctttaagagataaaaagcatcaaatgtagggtaatattaaatcggaacatttacatcgcggaatgtaaaatttaaataaaaaggactcttccatgagccaaaattcctgaaatcttaagggtaagataaaaggtcttaatcagaatgacacgttttattaataaataaagctattctttcattgctgtgtttttctttacaaaagtaggtgatgctgccaacttactgatttagtgtatgatggtgtttttgaggtgctccagtggcttctgtttctatcagctgtccctcctgttcagctactgacggggtggtgcgtaacggcaaaagcacc

SEQ ID NO: 94 - DNA, 15730 bp, Escherichia coli
  source 1..15730: mol_type = genomic DNA
gctcagaaacaaggttgggacaagcacttccaggctaacacagtcagaaatcgaaacgtactctcaacagttcgcttaggcatggaagttttgcggcattctggctacacaataacaagggaagacttactcgtggctgcaaccctactagctcaaaatttattcacacatggttacgctttggggaaattatgaggggatctctcagaacaaagtaccaatactatagccaatagctccccatactaagctaaatacaatcatcaatggtattgccagaaattttattcttaaactaaaaatcagtccaagaaaagaaccgccaaaggcccaccatgatttagacattaaacctatcagtattgacagaattcctatttcaataaagagaatattagattgctcttcattgaatttcgcatttgttacacctttacgaacatgttcagatgacatgattaactatctcctgccacagataaaacgccttaaaataacattttgtagcataaagtttcaccatgcaatggtcaaaatctttgacccatatcaattaaactcatacattttagttaccagagaaataattcacatggttgcatgttgctctaattattttatttttttagcttcatatgctacattaacttgcttgcgtgctaatgcattttcggtttatcctaaacaggcatcttagtaaaacggatgccgggattggaaccccggataatgcaaaaggcgacacagacgccaaaagcgtctttttttgtgtcatgccatcgcacagccatacgtagcacatagctccgagatcaatggtagtgctggctgggctgccgaaaggcaggccggttcccttttgcgccggtagttccaacccagtcagtgctaccgccattgagattggaacctcacgcggtagctccttaaattagcaaaaggaggctgccattgtggctactatccctacctctactcatcctgaatttatctggcgcttttactcctgccaaaaacaccactatcacttcgttatcgcagcaactgaagacgaagcacgctctcaattgcctgatggcccctgcatttttactgcccgtttttctactaactcgcgcaattcacttagttactggaacctccccttctctgccgacgttcagggggttttatgaaaaaacctctcatcacccggaatgaaatagccgaagcgatcgccctgcatactgcctgtatgccaacacgggagatccccggcgcaattgccaactatttcatgataaccaggcgtttttatacccgaacagataaggctgtgatcaacaggctactgatagccgagatcagggactatttgattgaacaaggacgtctacgttacgcaacagtggcagcagaaatgagaaaggaggcacatagaatgaccggtaataatttgaatgttgaaaaaccagcacctgttgcttcagctacgccagcaccagccctgaatgtcatccccaacaccggagacacaatcgacagccaaacattgttgaagatggtcaatgaggcacggaaattatgtagcgaaaaaccagttcgcaacaatgatttcattgccagagttaaggatgagcttgaaggagaaacctacgaaattttcgtaggtcaaaaaaacggcgcagaaatagatattataaccatgacctacaaacaagccctgcgagttgccgcgcgcgagtcaaaagcggtccgccgttcgctacataccatgattcaggcattggaacctataaatgttgaaaatcatcctgatgaaattcccgttctggaatggcagggagtacgcgtcgtgacaaccgagactcttgctagagggtatggcactacacctattcgtattcagcagaactacaatcgcaatgaagaacgatttgtagagggtaaacacttctttaaaatcaaaggagatgagataaaaagtttgcgactatcttttagcgagttgcaaatttcccccaagaccagatccttaatactctggaccgaacgcggagcggcacgcatgtctaagatcgtagacacagagcaagcgtgggcattctttgaaaaactggaagatagctacttccggcaaaaagaacagcaaccggtcgcaatcccccagacgcttcccgaagctctgcgcctggctgccgagctggctgaacaaaagcagctactggaacagaaaactcaccagctaaatcagcagctggtggccgcagcccctaaagtcgattttgccgaccgggtatcagtggccaatggaatcctgatcgggaactttgcaaaggtcgttggacttaagcaaaacgcccttttctcatggttgcgccagaacggcattctcatggcttttggagcgcgcaaaaacgtaccgcgccaacagtacatcaacgccgggtatttcacggtgaaagaagtggtgctggatgatgaaaatggctaccagatacggctgacgccccaattaacgggtaaaggccagcagtggttaactcgcaagctacttgatgctggtttgttaaaaccagtagcaataggttaacaaaagaaaaaaacctgccagcaaactggcaggtttctgagcagatcgaccaacccgatctggatcgagttagaaaaatttgctctaataaatttcgttttctaagtgcaaagaatcaccatttcgagctggtgattgaaggttgatgcaaatttggagaaaaaatgcaacaaacattcaatgcggatatgaatatatcaaaccttcatcaaaatgtcgatccttcaaccactctgcctgttatttgtggtgttgaaattacgaccgaccgcgctggccgttacaaccttaatgctctacacagagcgagcggactcggtgcccataaagcgccagctcaatggctaagaacgctgtcagccaaacagctcatcgaagagcttgaaaaagaaactatgcagaattgcatagtttcgttcgaaggccgtggcggcggcacttttgcccatgaattgctcgctgtggagtacgcaggctggatttctcccgcgtttcggctgaaggtaaaccagacatttatcgactatcgagccggaagattacaacctgctattccgcagagtctccctgaagctctccgtttggctgccgacctggcagagcaaaagcaacggctggagcaaaaaatgcttatggatgcacctaaagtcgaattcgccgaacgcgttgctaccgccagcggggttctaatcggcaactatgccaaagtgctcggcctgggccaaaactatctcttcacctggttgcgtgataacggaattctgatcgcaaccggtgaacgcaggaacgtccccaaacaagaatacatatcccgtgggtatttcacccttaaagaaaccgtgatcgatacaagcaatggaagcaggatttctttcacgactcgtataaccggcaagggtcagcagtggctgatgaagcgattgcttgatgctggtgtgctggtacctgtcgcggcaacgcgctaacagacgtagtaagaaccaccagcattgtaatgctggctaaagtcactttcctgagctgtataacgatgagcgattttactttttctggctatgaattggcctgctttgtaacacactccggtctatcccgtagcgcctggcatatcctgtcgcaatgtgcaaatctcgcggcaacaaccagtgaatacttcattcacaagcctcaccgcctgatcgcggcagaaactggttatagccaatcaaccgtcgttcgtgcattccgtgaagctgtaaacaaaggaatcctgtctgtagagattgttatcggcgatcaccgtgaacgtcgcgctaacctgtaccggtttacaccatcctttttggccttcgcacaacaagccaaaaatgcgctgattgaaagcaaattaaagatctcttcagcggcaaccaaggttaaagctgttctcgctaagacattggctttatttaattttttatccacacccccatgtcaaaatgataccccctccccctgtcaggatgacgtggcaataaagaataagaagtcacaagttaaaaaaacaaaaagatcagtttccggcggtgccggaacgaccagactcaaaaaattgacttcatggatcgctgaggcaaaagcaaaggctgacaatctgcggttatccaaaaaacgcgctcaaaaacatgagttcaagcagaaagtagaggcggcagcgcggaaatatgcttacctgaaggacaagcgttctcctgatattggcgggatatcaaacttcgataatctgccgcattgcatgacggtaaacgaagctcttaatgcggttttagccaaaaataaagataacgaacaatggggtataccggcaggattcagagggtgatagattgctctaatctggagtcacctggcgttttcagtttgaggtcggagatgcaatctgattttttacagttagcgatcgcttttgcagggcatctttgagacatatccatatataaaaacccaaagccagatcaaaacttgtactgataaaaacacagctaaccatcacaacttgtaacgtttataatgagtaaaagagtgatacattgctacttttacatattttttgactcaattcatggatagtaatggagatgcataatgacttatgctggcacacaaacagcagataacgccggggataccatgaaatcgtatgctatttggaataataaaggtggcgtaggaaagacctacttatctttcgctatggcctgtgaatacgcaaggcaaaatccagaaaagcgtattatttttgcagatatgtgtccgcaggctaacttatctgaaatattgctcggcggtaacggtactggtgctgctaacctcgcgagcttaattcaacaacgaaaaactgtcggtgggtactttgacagaagaactcgcagcccccacatgcttaccggttcagaaacaagtttcttaattcatgtctctgaaattaacgggcatgtccctgacaatgtatttttgattgcaggcgacccaagcctggaagttcaggcgcaagtaatcaatcagttaagcagcgtaaacttaccagttgactcatggaaaagcatccacctgtggctacgagatttgcttgttgcatgtgcacaacaacaaggtatcgaagaaaccatttgctttattgattgcaaccccagtttctctgcctataccgaactatcactgatagcagcaaatgcaattataataccttgctcaagtgatggttcttcggctcgagcagtggataacctaagccagttggtttatggcgttggagtacaaaacgattatcgttctgttaacttttacgatcggtgtcaacagtttggtctagcggttcctgtcattcattctctagtttttaatcgttcgacagagtatgacaaacgagcaagtaaagcgttttcggcaatgttcgacgaaatcagggatagagctgaaaatctgcggacgaataaaccaacagcgttccaaggcggaaatttaaaaacgtttactgtgccagataaccattccgtagctatagtatcttcccatctaggaagacctctatttgatataaaacccggcagatatcagatccatgacactgagccacaaatcaataatgaaccattagaaagatatggtgcagcaattgaacgtcttgttcagagtttatagtggcttatctcagtcataatggctgaaaaaaggctgcaacagaggttgcagccttttttataaaattacattaacagattggtagcgatagtaaattattattccatcgattgtctgcatacgttctaataaactgccttccaccattaccaggattaacgaccccaacttctacacgattacctgcattatctgttacatagaatgtatggagattattatcaatagcattaatcacctgctcaacagtccatttcccattgccagtattaaattgaggacttcccacatgagtaatatgctcatggattgattgcgagccggagagggtaatgcaagtaatgcgtacatcagccatatatacttcctttattctatagattataggaattgtgccgcctaaaaaacaaacagcacaataacaataaagaaacatacacacaacaaaaactaacgctatttattgatagatttgcctgatgaatactagctctctttgctacctagcactcaaacaaataacagaagaaagccccagataacattacgcgtccggcaagacgcttaacattaatctgaggccacatctatgcttagcatacgtagattaaccctctccccttttaaggggtaaggaattttttactgctatgccgcctttccagttatggattcagcgaccagaacaaccccatgcttacttcgatctgggtgttcactccatatctcggattcaggaatacttaccccgtcatagcaaacacgttcgccgtcaaacgggtaatactgagcggcatcggtgtcgaggataaacacttttagctcggaagagcgacgggcgatgtgttgccaaagagcttttccaccttcgtattgctcattatcactgagcaaaacaacaccagcttttgaggctacggtttcgtaaacaaaagtagctaaacctacatcccggacagttccatcaaccacaataccttcaatctgggcaacatcgctatcctcccaaaacttccttaccagtacgccttcaagctgcggacgacgttgaagttcaagagtagcgacaaccttatggcgcatatcaccatcgataacagaaggcgcagcctctattacagctgcaaatggggttttggaatcccatataacctggtaaagcacaccctggatggtaactccgtccaggatcgaaaatcgacgagcgacagtacccggggagtacgacattggaatcacagccattttagagtccccctttaacagtacaggcacaaacatctacctcaataattgtagtttattagaacattaataatctaacataaaactccagacaatgttatcgatgcatttttatataaaatagttataaaaaaaagctcccgtaggagctttaaaatacaagggatgactcttaatcccaatcaatccagttgtagacgatacgaagtgacgggcgcacagcggcagtcacatcttcggtactaaagtcgattgcatcactgtagattttgcagtccaacatttcaattgttgtagcagcttttgtcacagcgttaaccccggaagatttggattcaggggtcgcagccatcgtgatatcaacatagtccttcgccgcaatgcgatccttaatgaactgaagaatatcaccttcgatagtctccacgcactggacctggatttccccagagtttcgaattggaccgtgctggttgaacttcacaccattcggaccatagtcctccacatcctcgcgggtcatttcagggatttgcgacgtgcgaaccagtacgctgatatcttcatggccagcaaaagtgagctggaattcagaagataccagtcgttcacctttggccgcgttggcagtatagcggcccttaataaatttacggtttcccttagtgttattgtgccccatataaaatccttttactggaacgcccgaacaatatcggagctgttatatatcgaagaaccggtcaactggaggttgacggtgtttttcaggaaatatccattactgtcccttggcgcatcgagatcaaaacttaagtcctggatggcgacatcggtgatgttgatccggcgaccaatgtttagcgtcacgcgctccgggattcgaccaccaacattggccgcttttagttccgggctaatcatggctgtcaacgcggcgatagcgcctgaaacttcaatgaatggattgttcaaagcaatgaaagttacaggcagcgtgaacgtcggcggagtccccccttcccaaaccattaagctattccaacgggcaaccgatgttgtttcagtacctacttgcacaaaaccacccagagcaccagaaacagatcccatggacataccggtaaacggcgcttcccaattctgggccatgttcattgccgctccctggctgatatatccggtaacctggtactgagagttcgttaaagtaactttcagatatggcgatacaccgtcagcctggctgtaaaccccataaggtataggtgccattcaagttaaaggccggagttctccggcctcctcctttagccaaggcgcttacggcgcagtttcattgactttttgcgggcaagttttgccgcgccggtctgggcttttcgacgcgcttttttcagcgccgatttttgagccgcagtcagacgttttttacgcaggcgtttacggatgagtttgatctcaccgttacgaacaaccttcttaaatgcttcagtcagcatttcatcagaagtgccagcaacaacaaacgccgcttccagttcgtcacggtcgtcgctatctaaaccagcgatagaggcaccaacatcagcggctgcgtcgtcgtcttcatcgtcagccagtgcttcgatcaggtcatcatctacaccgcatgctgcgaggaagtcagcaacatttgcccatgcttcgttataggcatcgtcctgttcttctgtaacttcggagtcgtcgtcatcagagataccagcgatagcctgaacgaaaccatcaagggagtcgaaagtcagatcaccgctatcagcccaggcgaaaacggcgtcggccgcatcactcaacgcattctgcatagcacttcgatttgcagcttccagaatcatctggtgcgcctgttcgacggtccattctttaccgtctttcccttccaggatttgctcaggagccggggcagatggaacgttatcgttagtctgtgccgccggttccggattattattaataaccggatctgttggcggttcggcgcttgctcgggcagactccatcagctgcacaggatcagagttcaaagcgaaacgggacagtccattccccaaaaatgccccggattgaaaaaagtttttgctcattgtattcccttacttaataagcagcggtacgccctggatacgacgggctacgccagtcgggcagcaggcccagactacttcccatttatcgaattccgcctgcgtaactttcagcacatacggttctgtaccgtcagcatcaggatcacgaggagccaccagagcgccggaggcgacaaagcgatccaaaagtttggtcatccctttagtcagaccagcggcagtaataccgtcagggctatgcttcatctggcgggctaactggacaaagaaacggctgattgcattcatcagggatgggacgtgctggaagtgcagatagttatcctgcgtgcagcaagttaaagcatcgtcgatgatcatctggccagaggtgccaacagatactttattgaggcggcccttaaccattgcttcttcgtccggggtatcttccggatacagcggttgaattgacgcacgagcaatgacggcacgttcttcaccagccggtgagtaatgccaaccgccgacatcagagtttttcttgacgccacgagctttcgccgcatacgccgcgccagacagaccgaagaccacacgggattgggtccatttgtctttgcaggagaacgggaagtgatagacagcacagcttacataatcggtaccaagtaaaccggtatcttcaacagcagagagcgcttccgtatacgtcaatgtcggtttgacatcaaagaagccatcaatcaggcgatctgcacagattttacctaatgcggtgatagccgcattgtcatagcagcccaggccgagaacagcggtgtacatgtacggcgcattgttcagcactttcaccgcacgcaggtaagcagcagtggaaatgttcgactgatcgccgttggtaccgccagtgaacgccagcgattttttatttgttactttcgccgtcgaaatcagctcttcattaacaaccgcgcgcagatatttagaacgggcttccagagccgtaggcagataacacaagcggcccatgtcatctttcgcttcttccgccaaagacacagtgtgtgtctccagggtcgttaccacgccgagcgaagtcgtctgggtcagttttaagaggaagcgttcattacccgcgctgtccgctgttgccgtttcgatggttaactcacgggtaggtgaaatacacggatcaccatcatcaacgtagatagcaaaggcttcgccactatcaagttcaatttcagaaccgtatggcaacgcactgtaagccggttcgcctgattcatcgaacataataatcgggaacttcgcatcatccggaacagcacgaacaacataacctgacgtttgctgaatagcttcgtatacgtggcgaattggttcgaactgtgagccggaagacggcttcagcggttcgccgagaacatcttcgtaattggactcagtaaccgcaagaacagtaaacggcttgccacgcgcaaatacgccaataccagcccacaagctgctatttaatgcaacaccggtagataacgtcgcatcggcattgatcgggctaacagcgacgccggatgcattacctaatgactgttgaattgaatattgagacataactttccctgttatgcgccccgcacgggggcgctatgttaaacggagaacttcccctgattactcagagtcaccggcatcaatcgtgtcgccgcttataaagttaagcccgccttttttggccattgtcagcgttacacgagtgaagtaatcagcgccgttgcgtgggtgcatatcgttgatagccgaaccccacagcgtggtacggttgaccagcgccggagtggtcggatgctggaacgggatggccgggacagcatcaccagtcacgaagcctgctttacccggattttcatcacggacgtagcacagcacatccatcgagctgaactgaatgttctctgtcgttaagttcttacaaataccagcaggtacttcgtacactttcacgttaccgaacagggtaccgatgtagtgaacatacggagtctggatatagtcttcggctggctggaagaaatccttcggcaactgtttgaagaaagatgctgcatcagcgccagcaaacatccccatcgcaccagaagatttaacgcgctcaataatgtcgcgatatacagtctggaatttgccacgaatgatggttgcccatacatcaaaggactggttaaccggcagagcgatgtcaaaggtgtcggtcgcaagagtacgccagatcatgatgcggagacgcaacatatcctgttcatgggacaggtattctttcagggtgcggaactgtagggaacccaggtccagaccaaattcacgctgtgcttcatacgccgcctgtaccgtgtgctcagccgcgataacgaactggcttgggaacagggtgtatttcttcatttcgtggttgatcagcgggatcagctcaggagcggcttcaatattgatttccgtctcaattgcgatctcagtgcctttatccggcgctttggagaacgacagggcaatctgaccaatgttgtagttcagagagcaagtaacagtgatttgctcaccagcagcattagtaaacgagtgaagtaggctgccggaaccgttatcaacaacagacttaatacggttaacgtagatgttagtgcgaccttttcggattggtacattctggccttcgaagtcttccatcttgaaggttgcggttttgctggtgccatcggagcttgccaccagcacatagcggcggcgtaactggctgtacacaccgacggattgcatgtccagaacatcaccagcagcataagaaccaaaagaggaacctgccacgttaaagacttcatagatgtcggactggtcacgcgtaaccggaatgaaggtacacgcatcagcggtagctgcccccaactgaacaggcaggatcatcgcgaggaataaaggcagacgcataacaccgtcagaaacgctcatcatctctgctgcgacggattccagcatcgctttattagtggcatccatgctgttgcgggtggactcaatcaggcagttttccagcgtctggtggcaggaggccagaatttccggacgcggcatagatttatgtgctgcggcgtagtcagccagtgcacttgcccacgctgtagcgatttgagcggtggcattatcagagatacccgcaaaaaccgggtctttacgtgcagcttcaaggatagatgcggcacgcgcggcatcatctttaatgaattggttatcagtaccgaactgcgcagtgcttgcccagccaagcacagctttagagcgttttgcgatatctgcaatacgattctggtattcgcgtaagttactcaatttactcttccttaaacacaaggcacttgtgtgaatcccttttcggaagagattttattgaaagtcacttgttgactttctcgtgacaagcaatttttttatttttttcgggagtaggggaggaaggtaaaatccaaggtgaaatcgtggcgatttcaccttgaaattttagatggatttactttaaaaacagtaggttaatagtgaaatttgaatggcgaaagtttaaggcttcggctttttatcgaggctctttctaaggatatgcccaatcatcctgtcgagttcttcctgtagctcttttgaaagtcgattaaactcataagaaaatgcacggcctttcacgcgcttccttgcaaagcgatccttgtcctcaaatttccataattcagtaactacggacttatctttagaacctttatccgtgagtagtgaggcttcctttgttatcaagcgcaggattttatttttaacttcatcttcggccatttcgtcaatggataagatgtcgtttatttccggggatatgttttgaataagctgatcaaactctaaattcttgttccccatttcgtcgccaacagcacaaagcgttttgtagtccgaaaaggttaattccgactgcacagggaaaagggcgactaattcttccggagcactcgctgcctggagagcacgcgtgaccttcgcctgagacagcccttctttggctgcaatatccttctgactcatcccatcatttttcattcgcatcaaacgcagacctatttctcgaatgctgtgctgcaatgctgtctgaacgtctttcgctaaattttgcgcttcctgaacgctgatctcctggtccgtgactaaaacccgcaaccctacgttctctaagatggcagaagctcgacgccgggaaccatccaaaatttcaattttccctgtagcccgtctgacacctattgcagggtaaaattgctgatgcttaatagtgcttcggatactttttaatgattttggcgtaagagatgcctggtcacgcccgttgttatgctgatcaacaaaggtatcgctttctacctggttcggaggtattacctcttcaataaatgtggcctggcgaccagttgataacttgaatacctgctcgactcgatcgccagaggctgaagaactatcaaatccgcttaatattgaaggattaagggttcgcccaattgttggtctgtttttctttgacatgggggtttcttactcctcagttagatctgataaattcaatacggtcaaaaactgctttagcaaaatcttccgcggcaattcgcgcgttcttcaatgcatcagcactaccaacatacgttgccgggttagctgaaataacagtgtcaaaagactcgccgcaacgttcaaaaccgtcaaggcgagggaggacgacatcgagcatatccccaccgaacacttctttagccaggctatggcaatacttatgatctgccttgttactcaacttggacataaaaccaatgttagtcgcaagctggcactcgcagccttcatccgaaatgagtttcaccaactcaggaaggcgggcaacgtatttaagcgatgagtggaaatcgacagttgctggcggcagaggtgtaaacagtatattggccgaggccaaagcatttttcaggaaggcgtcaaggtgaggaccactatcaacgaggataaagtcataatcgctcttcagcttatcaatcacattctctttcaggacagcatggatgttctgacccggtagatgctcattgcacagctctctccaatcggatgcaataaaggcatcgtcaatcgacgcaggcataacgtcaaccccaggtacaacagaaggaacaataaactcctctaacagctcttcacggcttacattctgcaacatagcctgtgcagatgttgcgtttacgataccaatagagtgtttatggcttaaaaacatcgttgctgaagattgcggatcaaggtcaataaccagaatccttaaatcttccatcagaagatgagggtgggcacgcattgcatgcgccagagaaaccgtcgatacagtttttgacacaccgcctttaagattggagatgaaaatcacatacgcttcgctgtagcgatcccggtattttggcactccgcgatgttcatatatgtcaatgatgttctgaattgacatcgcatatttcattgaagagccagcagggcgtttatcgaaaacataacccttttcttccatttcacttacggcatagtcaacgttcgctcgagtcagtagaggcaattttgccagtgccgctttcgcatagacctggtaaaactcgttcgcgtgtagctcatccttttgcaactgtacttgttcagtcagaacattgagcattctgtttgctctttgagcaaccttgtgaagctggctggaatcactcatcgaaagtcatcctttatgctgtatttttgaatttacttaaaaatgctgcataaaataataatgtatgcacagatgcttgtacatagcattctctgcatgtttggttcattttgcacgattgagagttacaaggaggacacaaaaaagccccgttcaggggcatcagtgttatttgctaagagcagcgaataatcgttcgaaatcgatagtatctatagcacgcgtaagcgccggaagttcagtctcaaagtacccgtgtcgatcgtaaaagaagggaccgaagagcgaggcatgttggattctacttcgccccagcccggacacacagttaagcccattaccggctaaaaggctaaaaaacttctctggattatcgtggtaaagctgggaatcaatggtgccggttaactcttccatagggaagcacacccgccctgtatcccagggatatttagtccgaagcataaacattgctttcagcaattcacattgagcgcggatcgcgtccggttcatagccagatatggagacataagccacgtccctcattcctgcgtcatctttgaaagtcacgatagaagtaacatccagctctttttcgaaagagcaagcagcatctactggacgctgaagtaaatcattcgacttaatgcgctcgagaatctgttcttgcccccttatttccagacaggggttgtatcttaagttaacattacccgctgacgtcgatattctcgcggagagcgataacccaacgcactatgcggatggttttcattgtaatgctcgatcgccactgcaaggttatgcaatgccgttctt

SEQ ID NO: 95 - DNA, 14942 bp, Escherichia coli
  source 1..14942: mol_type = genomic DNA
atgtaaaagtcctctctgctcagcatgttgatgtcctttctggtgtgagaaccttaaggaaacaacatgttgggtggagcggacaatccaaatggtgaattaccgtcttatatcactggcgctgacatattctccggtagcgctctggcaggtgttgttcctcagtacggcggcggcggtaaccacggtggtggcggtaataatagcggcccaaattcagagctgaacatttaccagtacggtggcggtaactctgcacttgctctgcaaactgatgcccgtaactctgacttgactattacccagcatggcggcggtaatggtgcagatgttggtcagggctcggatgacagctcaatcgatctgacccaacgtggcttcggtaacagcgctactcttgatcagtggaacggcaaaaattctgaaatgacggttaaacagttcggtggtggcaacggtgctgcagttgaccagactgcatctaactcctccgtcaacgtgactcaggttggctttggtaacaacgcgaccgctcatcagtactaatacatcatttgtattacagaaacagggcgcaagccctgttttttttcgggagaagaatatgaatgcgttattactccttgcggcactttccagccagataacctttaatacgacccagcaaggggatgtgtataccattattcctgaagtcactcttactcaatcttgtctgtgcagagtacaaatattgtccctgcgcgaaggcagttcagggcaaagtcagacgaagcaagaaaagaccctctcattgcctgctaatcaacctattgctttgacgaagttgagtttaaatatttccccggaagatcgggtgaaaatagttgttactgtttctgatggacagtcacttcatttatcacaacaatggccgccctcttcagaaaagtcttaatttgttgaaatatcgagcataagatgaatctggagagaatggtctgctgcgaatcagccaacctgaaagtatggataacacaaccctcaaggatgactaatcattgaggaaatagaataaatgttcagaccttttttaaactctcttatgctcggcagtttgctttttccttttattgccatcgcaggaagcaccgcgcaagggggggtgatccatttttatggccaaattgtggaaccggcatgtgacgtcagcacccagtcatcacccgtagaaatgaactgcccacagaatggttctgttccgggcaaaacctattccagcaaagcgttaatgagcggtaatgttaaaaacgcgcaaatagcctcagtaaaagtacagtatcttgataaacagaaaaagctggctgtaatgaacatcgaatataactaagtttctgaacaacgcacgttgctgagcagaaaaatgcgatttaaccaaaaagcctgctgtacacttaagaaacaagaaggtgtaaggaggcgttatgaaaacgcgtattcatgttgtgcagggtgatattaccaaactggccgttgatgtgattgtgaatgcggctaatccgtcattaatgggaggcggcggcgtcgatggggccattcatcgcgcagcgggtccggccctgctggatgcctgtttaaaagtcaggcaacagcagggcgattgccctacggggcatgccgttattacgcttgcaggcgctcttcccgctaaagccgtagtgcacaccgtcgggccagtctggcgtggtggtgaacaaaacgaagaccagcttttgcaggatgcctatctcaatagcctacgactggtggcggcaaacagctatacgtcagtggcttttcctgcaatcagtactggggtttatggttaccctcgtgcggcagcggctgaaatcgcagttaaaaccgtttcagaatttattacccgtcacgctttacccgaacaggtatactttgtctgttatgatgaagaaaacgcccacctctacgaaagactccttacccaacaaggagatgaatgatttgccccggctggcgagcgcggtgctgccactgtgttcgcaacatcccggtcagtgtggtcttttccctctggagaaaagtctggatgcgtttgccgcccggtatcgtctggccgaaatggcagagcatacgctggatgttcagtattacatctggcaggacgatatgtcgggtcggttactgttttccgccctgttagccgcagcaaagcgtggcgttcgcgtccgtttgttgctggacgacaacaatacgcccggacttgacgacattttacgcttgcttgacagccatccccgcattgaagtccggctttttaatcctttctcgtttcgcttgctgcgtccgcttggttatatcaccgacttttcccgtctcaatcgccgtatgcacaataaaagtttcactgtcgatggcgtggtgacgctggtaggggggcgaaatattggtgatgcctattttggggcaggggaagagccacttttttcggatttagatgttatggcaatagggcccgtggtagaggacgttgccgatgatttcgcccgctactggtattgcaaatcggtttcacccttacagcaagtgctggatgtcccggaaggtgaaatggtggatcgcatcgagttacccgcctcctggcataacgatgctatgacgcatcgttacttacgcaaaatggaatccagtccgtttataaatcatctggttgatggaacgttgccgcttatctgggcgaaaacacgtttattaagtgatgatccggcgaaaggggagggcaaggcaaaacggcattcactgttaccgcagcgcctgttcgatatcatgggctcacccagtgaacgcatcgatattatctcttcctattttgtaccgacacgcgcaggtgtggcgcaactcttacggatggtgagaaaaggggtaaagattgcgatcctaaccaattctcttgccgctaacgatgttgctgtcgtccatgccggatacgcgcgctggcgcaaaaaattgctccgctatggcgtggaattatatgaactcaagccgacgcgtgaacaaagtagtacgttacacgatcgcggcataaccggtaattccggagccagcctgcatgctaaaacctttagcatcgatggtaaaacggtgtttatcggctctttcaatttcgatccgcgttcaacattgctcaatactgaaatgggcttcgtgatagagagcgaaacgctggcacagttaattgataaacgctttattcagagccagtatgatgcggcctggcagctccgtctggacaggtggggacggatcaactgggttgatcgtcatgcaaagaaagagattattctcaaaaaagaacccgccaccagtttctggaagcgggttatggtcagactggcgtcgatattgcccgtggaatggttattgtaaatgtggcttaacgggctggtgctttatcgttctcacgcttaacaaccggtttaccagagaacaaaaacttcagtaacgggatgcgcaaatgaatttcatacagaattatcgcaatccctactacaaatatcaggccacagagaaaaccaagccagttggaggtgatgtgcggtgtaatgtatgcgccgaaaaacagcgttaacgggtggtgaaccagatagataaacagcgatgcgttaacaaaataagtcacccgcgctgactggaagttaagcaaacggtggccaaaggagaagaccacattcaccatccacagaccgaggaccatggtgatcaccgactcggtttcgtacatccaggcatcgccactgccatagcgctggttgagtaaataagcgacaaacgccaatgctgctgcaagggtacagccacgagacggcgtggtaaacaaggctttaagatgagggaaaatgaaagccagtgcgccgaggataaagaacggcaaataaaacagcgtttgcatgacaataaaattgaacatgccattactcagaatgggcggatacacaataaaaatcgttcttcttattaccgcataaccgatgccgaggcataaaaaaatcaccgatagttttaccatcgagaattttttattcgttttatcagaattttctaaattatttctgatgcgtttaaatatccatacgcacagcgtcgtcatgaccactaacaccagtaaaaaccacagatgtgatattaattcccaggccaacgtattatatttgtcatacaatgacagcccaggccaactttccgctttccctttgacgtattgcagcataataaattgcggcaatgtcagtagggggatggctgttaacatcgggatacctacacgttcgacacgtactttccaccattttttcaagggatagcgtaaaaaaagcatgtaggaaaagtagccggatataacgaaaaatacctgcatgcggaacgagtggatgaagtcattaaaaagggtcagccacaatgatggttcggcgctattcacatgccatgtatggctcgaatagattaaagaaatatgaaaagggatccctaacaacatcagccaggcgcggatggagtcgaggaaatattcacgttgcgcgggtactggattcatatatggttaactaatctcggatttttcgtcttatccctgtcgggttatgcctttaggcttgttgccatagcgacaccgacctgaccgcgccaggcgcaggcttcaaggtttttatgcatagcatcatcgctaccactaaccagaatggaagcgtctgtaagacggttgataaataaaattgctggcaaaccctacacgaagtcgatgcttctgtctttaggagaagcacggaaagtgaaaacggttgcaatcaggtgcttaatccatgagccagcgtgctgaacgataccgggattctgttgtcggaatggctggttatccattaaaatagatcggatcgatataagcacacaaagggggaagtgcttactaattatgaaacataaactacaaatgatgaaaatgcgttggttgagtgctgcagtaatgttaaccctgtatacatcttcaagctgggctttcagtattgatgatgtcgcaaagcaagctcaatccttagccgggaaaggctatgaggcgcccaaaagcaacttgccctccgttttccgcgatatgaaatacgcggactatcagcagatccagtttaatcatgacaaagcgtactggaacaatctgaagaccccattcaaactcgagttctaccatcagggtatgtacttcgataccccggtcaaaataaatgaagtgactgccaccgcagtcaaacgaatcaaatacagcccggattatttcactttcggcgatgttcagcatgacaaagacacggtaaaagaccttggttttgccggttttaaagtgctttacccgatcaacagcaaagataaaaacgatgaaatcgtcagcatgctcggggccagctatttccgcgtgattggtgcaggtcaggtttatggcctttctgcccgcggcctggcaattgataccgccttgccatcgggtgaagaatttccacgcttcaaagagttctggatcgagcgtccaaaaccgactgataaacgtttaaccatttatgcattgcttgactcgccgcgcgcgacaggtgcttacaaattcgtggttatgccagggcgtgacacggttgtggatgtgcagtcgaaaatctatctgcgcgataaagtcggcaaactgggggttgcaccgttaaccagtatgttcctgtttgggccgaaccaaccgtcgcctgcaaataactatcgtccggagttgcacgactctaacggtctgtctatccatgccggtaatggcgaatggatctggcgtccgttgaataacccgaaacatttagcggtcagcagcttctcgatggagaacccgcaaggcttcggtctgttgcagcgcggtcgtgatttctcccgctttgaagatctcgatgatcgttacgatcttcgtccaagcgcatgggtgactccgaaaggggagtggggtaaaggcagcgttgagctggtggaaattccaaccaacgatgaaaccaacgataacatcgtcgcttactggacgccggatcagctgccggagccgggtaaagagatgaactttaaatacaccatcaccttcagccgtgatgaagacaaactgcatgcgccagataacgcatgggtgcaacaaacgcgtcgttcaacgggggatgtgaagcagtcgaacctgattcgccagcctgacggtactatcgcctttgtggtcgattttaccggcgcagagatgaaaaaactgccagaggataccccggtcacagcgcaaaccagcattggtgataatggtgagatagttgaaagcacggtgcgctataacccggttaccaaaggctggcgtctggtgatgcgtgtgaaagtgaaagatgccaagaaaaccactgaaatgcgtgctgcgctggtgaatgccgatcagacgttgagtgaaacctggagctaccagttacctgccaatgaataagacaactgagtacattgacgcaatgcccatcgccgcaagcgagaaagcggcattgccgaagactgatatccgcgccgttcatcaggcgctggatgccgaacaccgcacctgggcgcgggaggatgattccccgcaaggctcggtaaaggcgcgtctggaacaagcctggccagattcacttgctgatggacagttaattaaagacgacgaagggcgcgatcagctgaaggcgatgccagaagcaaaacgctcctcgatgtttcccgacccgtggcgtaccaacccggtaggccgtttctgggatcgcctgcgtggacgcgatgtcacgccgcgctatctggctcgtttgaccaaagaagagcaggagagcgagcaaaagtggcgtaccgtcggtaccatccgccgttacattctgttgatcctgacgctcgcgcaaactgtcgtcgcgacctggtatatgaagaccattcttccttatcagggttgggcgctgattaatcctatggatatggttggtcaggatttgtgggtttcctttatgcagcttctgccttatatgctgcaaaccggtatcctgatcctctttgcggtactgttctgttgggtgtccgccggattctggacggcgttaatgggcttcctgcaactgcttattggtcgcgataaatacagtatatctgcgtcaacagttggcgatgaaccattaaacccggagcatcgcacggcgttgatcatgcctatctgtaacgaagacgtgaaccgtgtttttgctggcctgcgtgcaacgtgggaatcagtaaaagccaccgggaatgccaaacactttgatgtctacattcttagtgacagttataacccggatatctgcgtcgcagagcaaaaagcctggatggagcttatcgctgaagtcggtggcgaaggtcagattttctatcgccgccgccgtcgccgcgtgaagcgtaaaagcggtaatatcgatgacttctgccgtcgctggggcagccagtacagctacatggtggtgctggatgctgactcggtaatgaccggtgattgtttgtgcggcctggtgcgcctgatggaagccaacccgaacgccgggatcattcagtcgtcgccgaaagcgtccggtatggatacgctgtatgcgcgctgtcagcagttcgcgacccgcgtgtatgggccactgtttacagccggtttgcacttctggcaacttggcgagtcgcactactggggacataacgcgattatccgcgtgaaaccgtttatcgagcactgcgcactggctccgctgccgggcgaaggttcctttgccggttcaatcctgtcacatgacttcgtggaagcggcgttgatgcgccgtgcaggttggggggtctggattgcttacgatctcccgggttcttatgaagaattgccgcctaacttgcttgatgagctaaaacgtgaccgccgctggtgccacggtaacctgatgaacttccgtctgttcctggtgaagggtatgcacccggttcaccgtgcggtgttcctgacgggcgtgatgtcttatctctccgctccgctgtggtttatgttcctcgcgctctctactgcattgcaggtagtccatgcgttgaccgaaccgcaatacttcctgcaaccacggcagttgttcccggtatggccgcagtggcgtcctgagctggcgattgcactttttgcttcgaccatggtgctgttgttcctgccgaagttattgagcattttgcttatctggtgcaaaggaacgaaagaatacggcggcttctggcgcgttacattatcgttgctgctggaagtgctgttttccgtgctgctggctccggtacgcatgctgttccatacggccttcgtcgtcagcgcgttccttggctgggaagttgtgtggaattcaccgcagcgtgatgatgactccacttcctggggtgaagcgttcaaacgccacggctcacagctgctgttagggttagtgtgggctgttggtatggcgtggttggatctgcgtttcctgttctggctggcaccgattgtcttctcgttgatcctgtcaccgtttgtttcggtgatttccagccgtgccaccgttggtctgcgaaccaaacgctggaaactgttcctgatcccggaagagtattcaccgccgcaggtgctggttgataccgatcgcttccttgagatgaatcgtcaacgctcccttgatgatggttttatgcacgcggtgtttaacccgtcatttaacgctctggcaaccgcaatggcgaccgcgcgtcaccgcgccagtaaggtgctggaaatcgcccgtgaccgccacgttgaacaggcgcttaacgagacgccagagaagctgaatcgcgatcgtcgcctggtgctgctaagcgatccggtgacgatggcccgtctgcatttccgcgtctggaattccccggagagatattcttcatgggtgagttattacgaagggataaagctcaatccactggcattgcgtaaaccggatgcggcttcgcaataaaaacgtagttgcctgatgcgctacgcttatcaggcctacatcgttcctgcaatttattgattttgcaagattttgtaggttgggtaaggcgttcacgccgcatccggcaaaaacaacgagccaataaaaataccggcgttatgccggtatttttttacggaagaggtatcaaatgcgtttaattgtggtgagcatcatggtgaccttgctgagtggctgtggcagcattattagtcgcactataccggggcaggggcatggcaaccaatattatcccggtgtgcaatgggatgtgcgtgactccgcctggcgttatgtcacaatccttgatctgccattctccctggtttttgatactttactgctgccgatcgacattcatcatggcccgtatgagtgattaacgttcatcccactcatcagctgctgcgcgtccttcctcggtatccagcggtggctcaagctgaaattccccctcgtcccattcatgtaatgtattctcttcctgccactcctggcgtatctctatctcatcatagtcgccatcaaaaacactttgcgcggcttcaccgctaagcataggtaaacattcaccttcttccccttcgtcggcaaaaaactcaacttgccacatgatgtcgccgtcctgcaaaacgtatttttgggcattgaactgttgcacattcgcatcttcggcgtcgatgccggggttgtctgcaagaaattcttcgcgtgcagcgtcaatggcttcttcaagcgttgcgtacatggtcatcacgattctccctttgagttgatgaggtttcagggaaaaggatagctgattctccgcttttgcaagtatgaaaggcgaaaaatcagttcgatacctggggtattcgacgacgacgtagactgttccatgaatagactgcgttgaataacactacgccagcggtgacgagaaataccgctctgaaaccgtagttcgctgaaatcgctgctcccatcaatggtccggtaacgttgccaatatcacgaaacgattggttatagctgaagatacgcccggcgatctggttgctcgagttgtaaaccaacagtgtctgtacggcggggagtagtgcaccatcggcggcaccgagcaaaaaacgtaaaatcccaagttgcaatggcgtctgaacgtaagacattgggatcaacagcagtacagaaaagatcagcgctgtaatcaggatcttttcgggtccgattcgatcgccaagtttgccgagtcgtggtgcacttagcagagccgccacgcctggcaccgaggcgatcatgccactgataaaggcgacgttactgacgttacccgccagttcgcggacatacagcgtcagaatgggggcaattgagcccgtcgccacctggatgattaacgtagtgacaaacaggctgagtaccagtttcgggtttttaagtgatgtcaccacttcccgcatgtgcagcatctcttttttgctgaccggctggaatttttctctgatgcaaaacagggtgacgaaaaagcagagtatgagcacactggcggtaataaagaataccggacgtaagccgtagctatcggcgagcaggccgccagccattgggccgagcaacgcaccactaacgccgcctgtggagagcgtacccagcgcccagccgcttttattacgcggtacttgtgtggcgataagagcattagcgttggggacaaatccgccaagtaacccaagaagcgcccgtaggatcaaaaactgccagatattttgtgccagtcccatcaacaccatcacgatgcccatgccgagagcagagcgtaatagcatgagttttcgacctttacggtcggcgagtccaccccaaaacggtgaggcgatggccgaaaataaaaatgtaatgctgatattaattccctaaatacactatgagaacatccgaatcctatcacctgttaataacaggctttatcaggtgaatgactatgcaatttaatggtggatttccaagtatccaagcagttttacgcagaatctatgcagtattggtatagttcctttttagcataacttattgaaatatatagataatatgcgaagtctcttttcaggaaactatgcagggtgttagtcatccctctctcgacttctataaaattgctatttacaggtctatctaactgattggattcgcattaaaatttctcaaaccagagttttctatggagcagtaattgtgagtagtgaagaaagtatcacggaatcagttaagcaggcgttgaaggaacgagtagctaaccctttatggggctacatcattttgtcatgggtgggatttaactggaaaagcattgctatcatgtgtcttagtgaggcttcggttgttactcgtattcaacaaatcacatcgacggaagacttctatctaaaaacattatgctatcccgtagggctagggttcattttggcgacctttttcccttacttcagcaaccttgtaacactacttcaaatcaaggcaaccgcatggcgagcaagacaaaaagtagaagctgaaaatcttgaagagtcagctagactgacgtcaaagttgaagattgagaaacaaaaaaaccttatcgaaagagaaaaagaagatacaagtaatttgaaatctcaggcagagaaattggcgacagatgtagataacttaaatgctgagataggaaagttagagaatcaaaaaaagcacttgtctcgtgaacttgatttcctgcaacaagatgttatgtctattgaagacctgatttcaaaacttgttgcggatgagtgttctattgatgagtacagaagcgaattaaaaaaacttgttagcccagaaataatgatgcaagcaagaaaccgtaagaatctcccaagtttatttggaagaaaaatctaatgtatttcctgacttaatcttcagctttaatacgctgtacagttgacttggcaacgttgaattgagcggctactttagcgattgaaccaccagcagcaagagcagctttaataccttctctgtcaaccgctttaccgttaccccttccaactacacgaccagcagctttagcagcttcatagccttctcgttgacgctcaagcatcattttacgttcagcttcagccactgctgaaaagattgtgagaatcatcttagacgtggggttatcgtcaccagttatcagaccttctttgtgaaagtgaaccttgatacctttctgtgaaagtttatccaccagcgttaatacatccacggtagagcgccctaaacgtgacaagtcgtgtacatggataacatcaccttcacgaacataatcgagcatagcctttagttgtggacggtctgtattcttcccagatgctttatcagtaaatatcttatccagtacgaccccttcaagttgacggtctgtaatctgctggattgatgaaactcggatataaccaatgttagccataatatactcatttgccttactcatttgatgagttgagtataacgtaccgataaagtgttttacaaggctaatcggtatggtttttacagggggttagctatacctttttagtatgctataacggtatgcctaagagatggagcggtctttataacagttcacataaaaagtcaatagatattttaaaattttgcaaaggggaccacttaggcgtagtgacgggtacttagcaggtatagacctgtgatagatatttttgaagattatcggtgaaggggaatgtagaggggttactacgattttttataaaaaaatttagaagctgaataagtgttgtgtaaaatttatgcaactctaccaagcctcatagaaagctctgtagcgagttttaaccccatttttagggtaacctatagggatgtaccacccaccttaaaataaggtggtaaaatcgcttagaatgcgttacagagcgtctgagaagctatattcacagattttactaaagtctcagacttctaagtagtctttttaacaggaggggttcccctatggtcactatatccctctcttcccactaagtaagctacacagacctagagaatatgccttcacagcatctatatcaggtcagattcagaggtcttgatggaatcttcaaaggcacttgacagataactatgaagttgctaggaaaaactgtctaacgggagaagagatacgatataacccgaagggagagtatcaccttaacagtgattcttaagagatgccttgagagttatctaaacaaacctcttaagtaaaagacaacactccagaaagagtgtctgttcaacaagcttctcaaaagctcttaaaaagtctgttaagtaaggtcatgtgaacaattttaccattttgtcaatgcttttgtctttgacctgaatcaataaaatgtatcttttgatatggttttaagcaaaatagctaaaaaatctttttagaagtgagggttctttctcatgtaccaccctctctcctgcttagcggatggttaagaagacctctgaagcttctttgtgaagaagctgaaaaaaccaacctcaccaatgctaacagtaacgctggtcgggtagcttcaaagcttaaaaagtactcagtgaatcctaataagagatactaaatcgctactacatcaacatctattaaacccctctcagtgacttcagaaagcgactgtatggcctctgtaacgtcctctgaggggttttctgttataggtaggtcaattaccttaccgttgtgaaaagtcactttacagcgacgtttagcggcatctataactatttctttgagtacgcccttgataagtagctgtgtctctatcatcccttcctttgttgtcctgtcaatatctttgaggcttccagttgtgatggcctttatccgctttgtttcctcttcgatatcatgattgagttttgatagcgcattcttcatatcacgtaatttctctgtgataattgtcatgtcattgagttcaatagcgagttctgccatttttgagattttacgctgcaaatcttcacgctgtaatttaaggctatcaatagtgtcagtattttcagtttcaaaacggtcgcataatgcgagcatgtaaaggatagttgtatccgtttgcttacgactgatagcctttgcactacacctgttagctgaacgattagggcatctgtacatcccaaaacgttttaaggcatatccaccaagaacaatagtagccccacactcagaacatttgatgatacccctgaacaagttgactgatagcggattacttgatacagaagccctaccatattgccctgtgttcagttgctgtactcgatagaatagtgactcactgattattgcggggtagtaaccctgaacttcttcacgtccagcaggtgtgaaacatccaatcacagcacgatttctgagtagtttctttacagcagtatcagaccatcccttttgtttaggtgtgtattgattcaatgacaagtggccttcatcgtttaaagttctggtgatagcccaaaagcttaaaccctgtaatctcaggtcaaatgctcgtttaacaacttccactttatcggggatgatagtgaatgttcgacggtcatcattcagccttaaccatgcaggacaacgcctagataccttgataccttcggagatgagttcttttttacggttccatgcagcttggacacgctcagacttcctcagtgttcttgcccccttatttccagacaggggttgtatcttaagttaacattacccgctgacgtcgatattctcgcggagagcgataacccaacgcactatgcggatggttttcattgtaatgctcgatcgccactgcaaggttatgcaatgccgttctt

SEQ ID NO: 96 - DNA, 14901 bp, Escherichia coli
  source 1..14901: mol_type = genomic DNA
aacaggtaaccagcataaataccagacccgtgtggtctcaaatgcgaacaaggttaacctgaaatttgaagaggcgaagcctgttctcgaagaccagctggccaaatcaatcgcaaatattctctgattatcttcaggaggctggtctgaccggcctcctgactgacgtctcgctttgctcgtggtccaaccccggaaagaaaaaaataaattttatttctccccggcgtttccgaaataaatatgaaaacactgagcggttgtgcaaattctttgtgcgaccgtgaagtgttgccggcgaagccggaatttaacggttattaatcttttcatcattaataatcagtccgactgactttttttcttcggaatatcatcatgagttttaacgcaaaggatatgacccagggcggtcagattgcgtccatgcgtatccgcatgttcagccagatcgccaatatcatgctttactgcctgtttatttttttctggatactcgttggtctggttttatgggtaaaaataagctggcagacgtttgtgaacggctgtatttactggtggtgtaccacgctggaaggcatgcgggatttaatcaagtcccagccggtatatgagatccagtattacggcaaaaccttccggatgaacgctgctcaggtactgcatgataaatatatgatctggtgcggagagcagctatggtccgcattcgttctggctacagttgtggcactggttatttgcctgattaccttctttgttgtctcctagattctggggcgtcagggtaaacaacagagcgaaaatgaagtcacaggtggtcgtcagctgacagacaatccgaaagacgttgcccggatgctgaaaaaagacggcaaggactccgatatacggattggcgacctgccgattatccgggattccgaaatccagaacttctgtctgcacggcacggtcggggccggtaagtcggaagttatccgtcgtctggccaactacgcccgtcagcgtggagatatggtggtgatttatgaccgttcaggggaatttgttaaaagttactatgatccctccatcgataaaatcctgaatccgctggatgcccgctgtgccgcctgggatttgtggaaggagtgcctgacacagccggattttgataataccgcgaacacgctgatcccgatgggcacaaaagaggacccgttctggcaggggtcaggacgtaccatttttgcggaagcggcgtacctgatgcgtaatgaccccaaccgcagctacagcaaactggtggacacactgctttccatcaaaatcgaaaaactgcgtaccttcctgcgtaattcaccggcggccaacctggtggaagagaaaattgagaaaacggcgatttccatccgtgctgtgctgaccaactacgtgaaagccatccgttacctgcaggggattgagcataacggtgagtcttttaccatccgtgactggatgcgtggtgtccgggaagatcagaaaaacggctggctgtttatttcgtcgaatgccgacacccatgcctccctgaagccggtgatctccatgtggctgtccattgccattcgtggtctgctggcaatgggagaaaaccgtaaccgtcgtgtgtggtttttctgtgatgagttacccacgttacacaaactgccggacctggtggagatcctgccggaagcccgtaagttcggtggctgttatgtgtttggtatccagtcctatgcccagctggaagatatctacggtgagaaagcggctgcctcgctgtttgacgtcatgaacacccgtgcctttttccgttctcccagccataagattgcagagttcgctgccggtgaaattggtgagaaagagcacctgaaagccagcgagcagtattcctacggtgctgatccggtacgtgacggggtatcgaccggtaaggatatggagcgccagacgctggtcagttattccgacattcagtctctgccggatctgacctgttatgtcaccctgcccggaccgtatccggcagtaaaactctctctgaaatatcagacacgaccgaaggtcgctccggagtttattccgcgtgacatcaacccggaaatggagaaccgtctgagtgccgtacttgccgcaagggaagcagaaggtcgtcagatggccagcctcttcgaaccggatgtcccggaggttgtttccggagaagacgtgactcaggctgaacagccgcaacagccggtgtctcctgccatcaacgataagaagtcagattcaggtgtgaatgttccggcaggggggatcgagcaggaactgaaaatgaaaccggaagaagagatggaacagcaactgccacccgggatcagtgaatccggtgaagtggtggatatggccgcttatgaggcatggcaacaggaaaatcatccggacatccagcagcagatgcagcgtcgtgaagaggtgaacattaatgtgcaccgggagcgcggggaggatgttgagccgggagatgatttctgatgaacaggtcaactccagtcttcaattctcaggccgcccacacgttcaaattcccgggtgttattagtcacaataatcagtccccgactgcgggcatgacctgcgatcatttgatcaaatggcccgacagggcgtccctgacgggcaagttctgctcttatctggccggtgtgtgtggcagcagcagcgtcgtaatccagaacgtcaatgcgggaaacaaatccctcgatcacagcgagattacgttcaggcatctggcttttttctgcaccatatatcagctccatcagagtgaccgaactgatgcacattctcccctggttcaggttaaaacgttccctgacactggcgggtttgttctttatcgtaaaaatgcagatgttggtatcgagcataaacttcagcatcagaatgactccctttcctgcataccaggctgttccctgttatccataaaatcagcgctgacactgtttccgtcgaaccattcgtcccatgtctctccggcaggcgtaatgattcgggttcgtccgacagcaatcacttcaacgcgttttacgttttccggcaatgcaaccgcttttggcagtctgaccgcctggctgcggttgctgagaaatacggtggtttccattatttgcctccttatgtggatatgtcttgtgtatatccattgtgggattgatgccgggatatgtcaaagggatatacgtttatgatgagtattgcgcaggtcagatcggccggaagtgccgggaactattataccgacaaggataattactatgtgctgggcagcatgggagaacgctgggccggccagggggctgaacaactggggctgcagggcagtgtcgataaggatgtctttacccgccttctggagggcaggttgccagacggggcggatttaagccgcatgcaggatggccgtaacaggcatcgtcccggctacgacctgaccttttccgctcccaaaagtgtctccatgatggccatgctcgggggggacaaacgtcttattgaagcacataaccaggccgtggattttgctgtccgtcaggtggaggcgctggcctccacacgggtgatgacggacggacagtcagaaacggtgctgaccggtaatctggtgatggcactgtttaaccacgacaccagtcgcgatcaggaaccacagttacacacgcatgcggtggtggctaatgtcacgcagcataacggcgaatggaagacactgagcagtgacaaagtggggaaaacggggttcattgagaatgtgtacgctaatcagattgcctttggcaggctctaccgggaaaaactgaaagagcaggttgaggcgctgggctatgaaactgaagtggtcggtaagcacggtatgtgggaaatgccgggcgtaccggtggaggccttttccggacgctcgcagactatccgggaggccgtcggggaggacgcctcgttgaaatcccgggatgtggcggcactggatacgcgaaaatccaaacagcacgtcgatcctgaagtcagaatggctgaatggatgcagacgctgaaggaaaccgggttcgacatccgggcatatcgtgacgcggcggatcagcgtgcggagacccgcacgcaggcgcccggggctgtttcacaggaggggccggatgtgcagcaggcagtgacacaggcgattgccggattaagtgaacgaaaagtgcagtttacgtacacggacgtgctggccagaacggtcggtatactgccgccggaaaatggtgtgattgaacgggcacgcgccggtatcgatgaggccatcagtcgtgagcagcttatccccctcgaccgtgagaaggggctgttcacatcaggaattcatgtgctcgatgagctgtccgtccgggcactcagtcgtgacatcatgaaacagaaccgggtgaccgtacatccggagaaaagtgtcccccggacggctggttacagcgatgcggtcagtgttctggcacaggaccgtccgtcgctggccattgtgtccgggcagggcggtgcagccgggcagcgtgagcgggtggctgaactggtcatgatggcccgggagcaggggcgggaagtgcagattatcgctgctgaccgtcgctcgcagatgaacctgaagcaggatgaacggctgacggcgcagagtcacagcctgaccctgcgggatgcgcagggtgaaacgcaggtggtgcgtatttcttctctggacagcagctggtcgctgttccggccggaaaaaatgccggtggcagacggcgagcgtctgagggtgacagggaaaattcccggactccgcgtctccggcggtgaccgcctgcaggtggcatccgtcagtgaagatgcgatgacggttgttgtgccggggcgggctgaaccggccaccctgcctgtggctgattcaccgttcacggcactgaagctggagaacggctgggtggaaacgcccgggcattccgtcagcgacagtgcgaaggtttttgcctccgtcacacagatggcaatggacaacgccaccctgaacggtctggcccgcagcggtcgtgatgtccggctgtattcctcactggatgaaacccgtactgcggaaaaacttgcccgccatccctcctttacggtggtttctgagcagataaaggcgcgtgccggtgagacattgctggaaaccgctatcagtctgcagaaagccgggcttcacacgccggcacagcaggctattcatctggcgcttcctgtggtggaaagtaaaaacctggccttcagcatggtggacctgctgacagaggcgaagtcgtttgctgcagaaggaaccagttttactgaactgggaggggaaatcaatgcgcagataaaacgcggtgatttactgtatgtggatgtggtaaaaggctatggcacaggcctgctggtttcccgtgcgtcgtatgaggcagaaaagagcattcttcgccatattctcgaaggtaaggaggcggtcacgccgctgatggagagagtacctggcgaactcatggagaaactgacatcaggacagcgtgccgctacccgcatgatactggaaacgtccgaccgtttcacggtggtgcagggctatgccggtgtgggtaagaccacacagttccgggcggtgatgtcagccgtgaacatgctgccggagagtgaacgtccccgtgtcgtggggctggggcccacgcaccgtgcggtcggtgagatgcgcagcgccggcgtggatgcacagacgctggcgtcctttctgcatgacacgcagctgctgcagcgcagcggagaaacgccgaatttcagcaacacgctgttcctgctcgatgagagctctgtggtgggcaataccgacatggcacgggcatacgccctgattgcggccggtggcggtcgtgccgtggccagtggtgacacggaccagttgcaggccatcgcgcccggtcagcctttccgtctccagcagacgcgcagtgctgccgatgtggccatcatgaaggagattgtgcgccagacgccggagctgcgggaggcggtatacagcctgattaaccgggatgtggaaagggcactgtccgggcttgagagtgtgaaaccgtctcaggtgccacgtcaggagggcgcatgggtaccggagcactccgtgacggagttcagtcacagccaggaagcgaaactggcagaagcgcagcagaaggcgatgctgaaaggtgaggcttttccggatattcccatgacactgtatgaagccattgtccgcgattataccggcaggacgccggaagcacgggagcagacgctgattgtcacgcatctgaatgaggaccggcgcgtactgaacagcatgattcatgatgcacgggaaaaggccggtgagctgggaaaagagcaggtcatggtgcctgtcctgaacacagcgaatatacgcgacggggagttgcgtcgtctctccacctgggagacacatcgggacgcacttgccctggtggataatgtgtatcaccggattgccggtatcagcaaggatgacgggctgataaccctgcaggatgcggaaggtaacacgcggctgatttcgccccgggaggcggtggctgaaggcgtcacactgtacactccggacaccatccgggtgggaaccggtgaccggatgcgcttcacgaagagtgaccgggagcgcggttatgtggccaacagcgtctggacggtgacagcggtttccggtgacagtgtcacgctgtcggacggacagcagacccgggtgattcgccccggtcaggagcgggcagagcaacatattgacctggcctatgccatcaccgcccacggtgcgcagggggcaagtgaaacctttgccattgcgcttgaaggcacggaaggtaaccggaaacagatggccggctttgagtcagcctacgtggccctgtcgcgtatgaagcagcatgtgcaggtgtataccgataaccgtcagggctggacggatgccattaacaatgccgtacagaaaggaactgcccacgatgtgctagagccgaaatcggaccgggaggtcatgaatgcagagcggctgttcagtacggcgcgggagctgcgggaggtggtggccggccgtgccgttctccgtcgggcagggctggtcgggggagacagtcctgcacggtttattgcacccgggcgcaaatatccgcagccgtatgtggcactgccggcttttgaccgtaacggcaagtcagctggtatctggctgaacccgctgaccacggatgacggaaacgggctgcggggcttcagtggtgaaggccgggtgaaaggcagcggggatgcgcagctcgtggccctgcagggcagccgtaacggagagagcctgctggctgataatatgcaggatggtgtccggattgcccgtgataatcctgacagcggtgtggtggtaagaatcgccggtgaaggtcgtccgtggaatcccggtaccatcaccggtggtcgcgtgtggggggatatcccggacaacagcgttcagccgggagccggaaatggcgaaccggtcacggcagaggtactggcacagcggcaggctgaagaggccatccgccgtgaaacggaacgccgtgcggatgaaattgtccgtaaaatggcagagaacaaacctgacctgccggacggcaaaacagagcaggctgtcagggatattgccgggctggagcgtgaccggtctgccatatctgaacgggaagccgcgctgccggagagtgtactgcgtgaaccacaacgggtgcgggaagcggtccgggaggttgcccgggaaaatctgctgcaggagcgactgcagcagatggagcgggatatggttcgtgacctgcagaaagagaaaaccctgggcggagactgacacaggaagataaacgctgatgacaacggataacacgaacacaacacgtaatgattcactggctgcccggaccgatacctggttgcagtcgttgctggtctggtcacccggacagcgggatatcatcaaaacggtggcactggtgctgatggttctggaccatgcaaaccgcattctgcatctggaccagtcgtggatgtttctggtcgggcgtggggcctttccgctgtttgccctggtgtgggggctgaatctgtcccgtcatacgcatatccggcaggaggccattaaccggctgtggggatgggcggtgattgcccagttcgcatattatctggccggctttccctggtatgaggggaatatcctgtttgcctttgcagttgcggcacaggtgctgacatggtgtgaaacgcgcacctggtggcgttccgcagagaccatgttgcttctggcaatgtggttgcctttctccggcaccagttacggcattgccgggctgctgatgctggcagtcagccacaggctgtaccgggcggaagacagaatggaacgtctgacgctggtcgcctgcctgctggctgttattccggcgcttaaccttgccaccagtgatgcagcggcggtggccggccttgtgatgacggtgctgactgttggtctggtgtcctgtacagggaaatcactaccccgtttctggtacggggattttttcccgacgttctatgcctgtcatcttactgtgctgggcgttctggctgtgtgactggtatgatgctggcgctgattctgcttattaataaacaacataacacaggatatttatgaaagttacggatcacaaactccctgaaggtattgccctgacatttcgtgtcccggaaggatatataaaacatcctttgattctcttatgccatggattttgcggtatccggaatgttctgctgccttcctttgcgaatgcgtttacagaagccgggtttgcaacgattacttttgattatcgtggattcggtgagagtgaaggggaaagaggtcgtctggttccggcaatgcagaccgaagatattatttcagttatcaattgggcagaaaagcaggtatgtattgataatcagcgtataggattatggggaacatcgctgggtgggtgtcatgtattcaatgcagctgcgcaggataaaagagtgaaaagtattgtcagccagctggcttttgctgacggtgaggttctggttaccggagaaatgaatgaactggagaaagcttcttttctgtccacgctgaataaaatggcagaaaagaagaaaaataccgggaaagagatgtttgtgggggttacccgggtactgagtgataatgaatcaaaggtattcttcgagaaggtaaaaggtcagtatcctgaaatggatataaaaatacctttccttacggttatggagacgttgcaatataaaccggcagagagcgcagccaaagtgcagtgcccagttttggttgttattgccggccaggatagtgttaatccaccagaacagggaagagccttatatgatgctgttgcttctggtactaaggaattatacgaggaagctgacgcatgccattatgatatttatgaaggcgcgttttttgaacgtgtggcggcagtacagacgcaatggtttaaaaaacatctttaattgtcggtattaatatgtcagaggtcgttgaggtcagcttaatatcatagtgagtagtttcaacgacctggaggacatattttcacaaaggtcagggcaatcatggcagagcagaaacgaccggtactgacactgaaacggaaaacggaaggggaaacaccgacccggagtcggaaaaccatcatcaatgtcaccacgccaccaaaatggaaggtgaaaaagcagaaactggcggagaaggctgcccgggaagcagagctggcggcgaagaaagcacaggccagacaggcgctgtccatttatctgacgctgccctcgctggatgaggcggtgaacactctgaaaccctggtggccgggattgtttgacggtaacacgccccggcttcttgcctgtggtatccgggaagttttactggatgaggtgtctcagcggaatatcccgctctctcataaaaaactgcgcagggcactgaaggccatcacccgttcagaaagctatcttggcgccatgaaagccggtgcctgccgctatgatacagaaggctatgtgacagaacatatcacacaggaagaagaacagtatgcgcaggcgcgcctggaaaaggtgcgcagacagaaccggatcaaggatgagctgcgggcgatcctggcagaataagaaaagcgccctctgtatgacagagggcaacagcgaaaaaaatcgggaaaacagacatccagagttttgatggagaaaaacatccaaccgttcagggatgtttcataatgtttctgacataatccgggtgtcgggtcaagaggagggataaaaaatggctgtatccagtggattatctgaacacagcagtatttatcgctatcagcgcgaggggcgtcatgccgtccgtcaggagattcgtggctttttcagggaagcggcagaggtctggcagaatgcggcccggctggcaccctgtgaagcatggcgggattttgctctgaagagggcatctgcatgtcggtgtaagtgccgataaaaataacccccgtcgcggagctccgggggatcagacttatatggcagatcgttattattattatagtggtgtaagaaggagttgccctgtctttcaaacggacatcacagaattaacatatttcacatcccgggtaagccagcagggataaaaaatgtgatgaatttcaagaagcaggaggtgacagtggcatgcataacagtagggttatccggtgaatctgacagacagccgggctgtattcgcggcaggataaagaaaaaccgggagatgactctcccggtccgtcttatcgctaatcccctgagcagggcatgtatgacttatctatgaccgttatattcagcgccacatccggtagcctgcgatataacacagttatcctgtcagcaagagcaggtatgatgaatacacggagattaaaaatataatctccgtcacatgttacccacggaaaccggtaacgccttcacgggaaatatgtgacagaaaaagcagcctccgttactccaggtatcaggaggctgaataatgcatgagacgttgtttcttatgtgtctggtcaggctggctgaccagcgtttttagtaacacatagccatatgtgtattaagtcacctcatcttattttgttgaattgatcacaactcaacggtttattttttgcgtgatacgtgagccattattcatcccggcatggaattcatacaatcacgaaaagtaatcagtgacggagagtaaaatgaagaaatatataccagtggtattatttgttttttcatgtcaggtattttctgctgatattcatagacggggcgtgcgtgttctggatggcaataccattgacgtcatgttatctcagcatccggtgcgtgtccgtcttgttaatattgatgcacctgaaaagaaacaggaatatggacggtggtctgaaaaaataatgaaatctctggttgcgggaaaaacggttactgtcacatattttcagcgagatcattatggtcgtattctcgggcaggtttatgcaccagacggaatgaatgttaatcagtttatggtccgtgcaggcgattgcatgggtttatgagcagtacaacaccgatcctgttcttcctgtcctgcagggagaagtacgacagcagaaacgtggtctgtgggcagacagcgctcctgttccgccctgggtatgacgctcacggaaataatgatatttctgtggctattgagttctcattgaaatgcgatatttaaaagcatgaagcatattacattattaacttatttctctgttaatgaaaggtgaataaatgaactatcaggcagtatcagaattaatcacatcgtctaatcataatgttcttatagtgggggaatcagcttctgaagttgatagctttttaaataaactgaatatcactgattataagtattatgatttcagccagatttacagttgttctgacagaacattaaatgattatgctgttatttttatcaggaatgcgctgaacgccagtgagcatattattatttttaattgtacaggatggtctgatttgaataatgaatctgccgtcatgcagtttgccagagtggcacgaaaataaggaaaacaactgatagtggcagtaagagaacaggatatgaaaaaaatggaagcagagtttggaaggatcataaaaatccactgacgccttcgcgttgctcagttgtccaaccccggggacgggaaaaagcaagttttccccgcccccggcgtttctgtagtgaaaagcgggaaatggagggaatggtcagtaacagggaatgtggtattatcgcggcgggtgtctgagcctttctggttcaggcaagacgcaggtaccagaaatgcgaagaccccacttgttaatccattaactcgtgaggcctgcatgaagtaccttaacactactgattgtagcctcttccttgcagagaggtcaaagtttatgacgaaatatgcccttatcggggtgctcgccgtgtgcgccacggtgttgtgtttttcactgatattcagggaacggttatgtgagctgaatattcacaggggaaatacagtggtgcaggtaactctggcctacgaagcacggaagtaagctgccgggcggggacggaagtccccgctttccggaagtgtgaggtatttcaggggcagacacccgacatgccagaaacagccggtcccgcccggggccggcacacaggttaaggcatttccatcttttcagtcatttcattatcaaaatcacattaaacggtcgtaatcagacatgatttgtgcgccaacacagatcatcgtcacaactttcaagtcgctgatttcaaaaaactgtagtatcctctgcgaaacgatccctgtttgagaattgaggaggcgagatgtcgcagacagaaaatgcagtgacttcctcatcaggtacaaagcgagcatacagaaaaggtaatcctctgacgcttgcagaacgtcagcaggcatccctggcaagaaaacgagccacacataaagaactcagagtgtttattcctgctgcgttaaaagcgcaattgcaggagatgtgtgaagctgagggtgttactcaggctgagatgattgccgaactgataaagcagaagagtgcttttagctaactgaaatgtagcgacatcacattcttgcctgtttctggtgtgcgtgatagattgctgatcgtttaaggaattttatggctggccacgccataaggtggcagggaactggttctgatgtggatgtacaggagccagaaaagcaaaaaccccgataatcttctttaactttggcgagtacagaaagattaccggggccatctaaaaaccgtatagccaacaattcagctatgcggggagtatagctatatgcccggaaaagttcaagacttctttctgtgctcactccttctgcgcattgtaagtgcaggatggtgtgactgatcttcaacaaacgtattaccgccaggtaaagaacccgaatccggtgtttacaccccgtaaaggtgccggaacgctgaagttctgcgaaaaactgatggaaaaggcggtgggcttcacctcccgttttgatttcgccattcatgtggcgcatgcccgttcgcgtggtctgcgtcggcgcatgccaccggtactgcgtcgccgggccattgatgcgctgctgcaggggctctgttttcactatgatccgctggccaaccgcgtccagtgctccatcaccacgctggccattgagtgcggactggcgacagaatccggtgcaggaaaactctccatcactcgtgccacccgtgccctgacgttcctgtcagagctggggttgattacctaccagacggaatatgacccgcttatcgggtgctacattccgaccgacatcacgttcacaccggcactgtttgccgctctcgatgtgtctgaggtggcggtggcttccgcacgccgcagtcgtgtggaatgggaaaacagacagcgcaagaagcagggactggatgcactgggtatggatgaactgacagcgaaagcctggcgttttgtgcgtgagcgtttccgcagttaccagacagagcttaagtgccgtggaataaaacgtgcccgtgcgcgtcgtgatgcgaacagggaacgtcaggatatcgtcaccctggtgaaacggcagctgacgcgtgaaatctcggaagggcgcttcactgccaatcgtgaggcggtaaaacgcgaagtggaacgtcgtgtgaaggagcgcatgattctgtcacgtaaccgcaattacagccggctggccacagcttccccctgaaagtgacctcctctgaataatccggcccgcaccggagacatctgcacgcctgaagcctgtcggcgaacaaaaaaacagcaccgcatacaaaaaacaacctcatcatccaccttcaggtgcatccggtccctcctgtttttgatacaaaacacgcctcacagacgaggaattttgcttatccacatttaactgcaagggactttgtcaacgccacgatgtttgaccgttatttgccattttcatgcccgctaagatactttcgttactgatgctgtccgcttttcaccatttcatcatcactgattagcgttgtgtttttggtcagcactccagctttacgtttctcttttaaccggtaactctctcctttgatattcagcgtggttgagtgatgtagcaaccgatccagtatcgctgttgccagcacgtgatc

SEQ ID NO: 97 - DNA, 14062 bp, Escherichia coli
  source 1..14062: mol_type = genomic DNA
aaaatatcgagttcgcacatcttgttgtctgattattgatttttcgcgaaaccatttgatcatatgacaagatgtgtatccaccttaacttaatgatttttaccaaaatcattaggggattcatcagagctgggtaaccgctctaacgccagctgcgaagtggagtttcaggatgccattggctggttgttggggcaggaaggggaaggaattcgtctgatcctgaaaatgggtgggatgacgcgttttgattgcgccctgggtagccatgccatgatgcgccgtgcattttcgctggcgatttatcatgcacatcaacgccatgtttttggtaatccattgatccaacagccccttatgcgtcatgtcttaagtcgcatggcacttcagcttgaagggcaaacggcgttgctgtttcgtcttgcgcgagcgtgggaccggcgtgccgatgccaaagaagccctgtgggcgcgtttatttacgcctgcggcaaaatttgtgatctgcaaaagaggtatgccgtttgtggccgaagcgatggaggtgctgggcggcattggttattgcgaggagagcgagctgccgcggctttaccgggagatgccggtaaacagtatttgggaaggttccggcaatattatgtgcctggatgtgctgcgcgttctcaataagcaagcgggcgtatacgacttattgtcggaagcgtttgtggaagtgaaagggcaggatcgctattttgatcgcgcggttcgtcgtttacagcagcagctgcgtaagccagctgaagaactgaggcgagagattactcatcagctattcctgctgggctgcggtgcgcaaatgttgaaatatgcttctccgccaatggcgcaggcgtggtgtcaggtgatgttagatacgcgcggcggcgtacggttgtcagagcagatccagaatgatttattgctgcgggcgacggggggagtgtgtgtgtaagcgtatacgactgatgcgacgctggtttcgattaactaaatgaaatatgtgaaaattgtaggccggacaaggcgctcgcgccgcatccggcattgttcatttgctgtagatgacactcatgcatacagtatcgcctgtacgcgccagttatcaggctgctggtcttcgtacatggtaataatgcggtaccatgacgcaccttgttcatcggcctttaacgccacgatacgttccacgtcctgcggatcccctgaaatattgctaactgagatctgacctatttcattcaggcccgtcacgcagtcagcactggcgaattctgcagactgtgccgtggcgctcgcaggataagtcactaattgcagcgagggtgaggcaagtaattgtttcatcgtcagctccatttttcgtttccccacatgttgcagggcattccatcgcggtaataaacgcccaggcttccagccggtaatttattgtgcacaggtaaacgcatagggacgcaaagcaatgtaaagctgactatgtaagttgtctgatttatttacggtacaaaatggcttgtgaataccactgtcctgtcacgatggtttcgtccaccatgacgacaacgtaataatcagcttttgcagcgacagctttcgctctgatttctgctaatgcgtcatccggagaaccccgaaccatcgtgcttacgctgcctattcgctgtaacccttgcgtctggtcgcggcgaatctcttgcggatggtccgttactggcggtgctggctgtggcgtaccttgcagtgcgctacaggcacttaacatcaacaccaataataaactggcaaaccggtaaataacgctattacgtttcctgctaaccatagtgtagtgccttattaatttaactttgggggaatgttcccgaattgttacctggtacgcgattttcgaatgaaaacgtgacgaaagcgtaacccacatctcaacattatgaactaataccgccagcagaaacttgtgctaaggatttcttcatgtcataccagacaaaaaggagagacagatgattgaaatagaatcacgcgagctggcagatattcccgttcttcatgcttatcctgtcgggcaaaaagataccccgttaccgtgcgtaattttttatcacggctttacttcatccagtctggtgtatagctattttgccgttgcgctggcgcaggctggtttgcgggtgatcatgccggatgcgcccgatcacggtagccgttttagtggtgacgcagcgcggcggttaaatcaattctggcaaatcttgctacaaagtatgcaggaattcactactttacgtgcggcaatagccgaagaaaactggctgcttgatgaccgtctggcagtcggtggcgcgtcgatgggcgcgatgacggcactgggaattaccgctcgccaccccacggtgaaatgtaccgccagcatgatgggatcgggctattttacatcgctcgcccgttcactgtttccaccgctgatacctgaaacggcagcacagcagaatgaattcaataacattgtcgcgccgctggcagagtgggaagcgacaaaccacctggaacaacttggtgacagacctctactgctgtggcatggcctcgacgatgacgttgtgcctgccgatgaatcactacgtttgcagcaggccttaagcgagacgggacgggataaactgctaacctgttcatggcagccaggcgtgcgtcaccgcattacgcctgaggcgttagatgctgccgtgacatttttccgccagcatctttaaactcgcagaatgctgaccccttgcgcttccagttgttgcaggatttccgggttagcatttttgccggtgataagcatatcgatttgatcggcacggctaaaaagcattcccgcgcgttcgccaatcttactgctatcaaccagtaccaccagtttccctaccacgctcagcatcttctgctctgccattgccgtcagcatatcggttttatacaacccttctgcggtcagtcctttgccgctggtaaacatccagtgcccggcatagagactgttttcgctgccctgcgggcttaaagtgatggactgacttttgttgtactgtccgcccataatgatcacgctgtcatgttcttgatcgatcaggtaatttgccagcggtagataattagtgatgatttgcactggcttgccacacatttcccgcccaagcagaaacgcggtggagccgcagttgatgactacgctttcgcccggattaaccagctgcgaggctgctttagcgatacgtactttttcatcgtgattctgcgcctgatgcagattcatcggcgtccagcgcgggcgctgctgggtaatagcttctgcgccattgcgcacctttttcagtttgccgctttcgtcaagtttattgatatcgcgtcgcgcagtggcaggcgaaattcccagacgctcaacgactttctcaacggtcacaaagcccaattgtgcgagcatttccaggaggatttgatgtctttgtgcttcagtcatgagctattccgataaaatttgatttttttagatgatatttgaaatagccaggaaatactacgccggatagcgcgaacttctccacgctatccggtataaacgacagattacaggaatgacttgaacggcagatccggttcaatagtgaagcaatcatcgaaaccgcgcggatagtggtactcgaagttgtctttatccagcggccaggtaaatttgccgccaacctgccagataaacggcttgaagccatacttcagacgatcttttttcatctcccacagcacgcggatctcttgcggatcggcctggaagtttgaccagatgtcgtggtggaacgggataaccactttcgcattcagggcttcacccatacgcagcatatcggcgctggtcattttgtcggtaataccgcgcgggttctcaccatacgatcctaacgccacatcgatctgatgttcgttaccgtgcttcgcataatagttagagtagtgggagtcgccgctgtgatacagggagccgccaggcgttttgaacagatagttcaccgcgcgatcgtccatgccgtccggcagtacgccagccgctttttgatcggcaggcagggtgatcagtgcagtacggtcgaaagcgtcaagcgcatgaatttcaatgtctttcacttttacaacatcgcccggtttgaccacgatgcaacgctctttcggtacgccccagccaatccacaaatcaacgcaggttttcggtccaatgaatggtacgtcatcagcacagttctgcatcacggcagcagcgacgttaacgtcgatatgatcgttgtgatcgtgagtcgccagtaccgcgtcgatctggcgaatcgcaaacggatcaagaacaaacggggtggtgcgtaggtttggctgcagttttttcacgccagccatgcgctgcatctggtgaccctgtttcattaacgggttaccgtgactttgtttgccagtgccgcaccagaaatcaacgcaaacgttggtgccaccttctgatttcaaccagatcccggtgcagcctagccaccacatcgcaaatgtgccaggggcgacctgctcttgttcaatttcttcattcagccagctaccccactccgggaaagtgctcaggatccaggattctcgggtgatacttttcactttactcatcgccatttaccttcatgatagttcaattcgaatcaatatgtgattggttttgattaatcctgacactattttttcaggaaggcaatgaccattttttgactttttgccagggaagtggttgttgattttgagtgtggaaagatttaatggaatgtgtaattcaattaactaaatgaatttaaatgaatagttgtttcgttgtgtgaatcccattctatccatgtggaattatttgcgggtcgcgtcacatttaatcataaataatcttgttgtgattacttttgaaaattagagtgagtgcacaacattccgggtgtgtggaatacccggttacctcttcttcaggagatcgttatggagatcctctacaacatctttaccgtgttttttaaccaggtcatgaccaatgccccgttgttgctgggtattgtgacctgtctgggctacatcctactgcgcaaaagtgtcagcgttattattaaaggcacgattaaaaccataattggtttcatgttgttgcaggcagggtccggcatcctcaccagcaccttcaaaccggtggtggcgaaaatgtccgaagtctacggcattaacggcgcaatttccgatacttacgcgtcgatgatggcaaccatcgaccgcatgggcgatgcctatagctgggtaggttacgcggtgttgttagcgctggcgttgaacatctgttacgtgctgctgcgtcgcattaccggtattcgtaccatcatgctgactggtcatatcatgttccagcaggcggggctgattgccgttacgttgtttattttcggctactccatgtggacgaccattatctgcacggcgattctggtttcgctctactggggcattacctccaacataatgtacaagccgactcaggaagtgacggacggctgcggtttctccatcggtcaccagcaacagtttgcatcatggattgcctataaagttgcgccgttcctcggcaaaaaagaggaaagcgttgaagacctcaaactgccaggctggctgaatattttccacgacaacatcgtctccacggcgattgtgatgaccatcttctttggtgccattctgctctccttcggtatcgacaccgtgcaggcgatggcaggcaaagtgaactggacggtgtacatcctgcaaactggtttctccttcgcggtggcgatcttcatcatcactcagggcgtgcgcatgtttgtggcggaactctctgaagcatttaacggtatctcccagcgcctgatccctggtgcggttctggcgattgactgtgcggctatctatagcttcgcgccgaacgccgtggtttggggctttatgtggggcaccatcggtcagctgattgcggttggcatcctggtcgcctgcggttcctcgatcctgattattccaggctttatcccgatgttcttctccaacgccaccatcggcgtgttcgctaaccacttcggtggctggcgtgcggcgctgaagatttgtctggtgatggggatgatcgaaatctttggttgcgtctgggcggtgaaacttaccggtatgagtgcctggatgggtatggcggactggtcgattctggcaccgccgatgatgcagggcttcttctccatcggtatcgcctttatggccgtcatcattgtaattgcactggcttatatgttcttcgctggccgcgcactgcgcgcagaagaagatgcagaaaaacaactggcagaacagtctgcttaataaggagttttgattatgaccgtacgtattctggctgtgtgtggcaacggacaaggcagttccatgatcatgaagatgaaagtggaccagtttttaacccaatcaaacattgaccacacggtaaacagctgcgcggttggcgaatacaaaagcgagttgagcggcgcggatatcatcatcgcttctacgcacattgcgggcgaaatcaccgtgaccggcaacaaatacgtggttggtgtgcgcaacatgctctctcctgccgactttggcccgaaactgctggaagtgatcaaagaacatttcccgcaggatgtgaagtaaggacgcgccatgaaattacgtgattcgctggctgaaaataaatccatccgcctgcaggccgaagcaaatacctggcaggaagcggtgaaaatcggcgttgacctgctggtagcggcagatgtggtagagccgcgttactaccaggcgattctggatggcgttgaacagtttggtccttatttcgttatcgctccggggctggcaatgccgcacgggcgtccggaagagggcgttaagaaaaccggtttctctctggtaacgctgaaaaagccgctggaatttaaccacgacgacaacgatccggtggatatcctcatcaccatggcggcggttgatgccaacactcaccaggaagtgggcatcatgcagatcgtcaacctgtttgaagatgaagagaatttcgaccgtttacgcgcctgccgtaccgagcaggaagtactggatctcattgaccgcaccaacgcggcagcttaagaaggaattgaacatgtcattaccgatgttgcaagtcgcgctggacaaccagacaatggatagcgcctacgaaaccactcgcctgattgccgaagaagtcgacattatcgaagtgggtaccattctgtgcgtgggcgaaggcgtgcgtgcggttcgcgatctgaaagcgctctacccgcacaaaatcgtactggctgacgccaaaattgccgatgcaggcaaaatcctttcgcgtatgtgcttcgaagccaacgctgactgggtgaccgtgatttgttgtgcggatatcaacaccgccaaaggtgcgctggacgtggcaaaagagtttaacggcgacgtgcagatcgaactgaccggttactggacctgggaacaggcgcaacagtggcgcgatgcaggtattcagcaggtggtttatcaccgcagccgtgacgcgcaggccgctggcgtggcatggggtgaagccgatatcactgcgatcaaacgtctttccgatatgggcttcaaagtcaccgtcaccggtggcctggcgctggaagatctgccgctgttcaaaggcattccaattcatgtgtttatcgccggtcgcagcatccgtgatgccgcttctccggttgaagccgcgcgtcagttcaaacgttccatcgccgaactgtggggctaaggagcggatatgttgtccaaacaaatcccgcttggcatctatgaaaaagcgctccccgccggggagtgctggctggaacgcctgcgactggcaaaaacgttgggcttcgattttgtcgagatgtcggtagatgaaactgacgagcgcctgtcgcacctcgactggagccgcgagcagcgtctggcgctggtgaatgcgattgttgaaaccggcgtgcgtgtgccgtccatgtgcctttctgcccatcgtcgttttccgttgggcagcgaagatgacgcggtgcgggcgcaggggctggagattatgcgtaaagccatccagttcgcccaggacgttggcattcgcgtgatccagctggcgggctatgacgtttactatcaggaagccaataacgaaacgcgtcgtcgtttccgtgacggcctgaaagagagcgttgagatggcaagccgcgcgcaggtgacgctggcgatggagatcatggattatccgttgatgaactccatcagcaaggcgctgggttacgcgcactatctcaacaacccgtggttccagctctacccggatatcggcaacctgtcggcgtgggacaacgatgtgcagatggagttgcaggccggaatcgggcatatcgtcgcggtacatgtgaaagacaccaaacctggcgtcttcaaaaacgtgccgtttggcgaaggtgtagtggatttcgaacgttgtttcgaaacgctcaaacagagtggctattgcgggccgtacctgattgagatgtggagcgaaacggcggaagacccggcggcagaagtggcgaaagcgcgtgattgggtgaaagcgcgcatggcgaaagcgggcatggtggaggcggcataatgcaaaagctaaaacagcaggtatttgaagccaacatggagctgccgcgctacgggctggtgacctttacctggggcaacgtcagcgctatcgaccgcgaacgcgggctggtggtgatcaagcccagcggcgttgcctacgaaaccatgaaagcggccgatatggtggtggttgatatgagcggcaaggtggtggaaggggagtatcgcccatcttccgacactgcgacgcatctcgaactctaccgtcgttacccgtcgcttggcggcattgtccatacccactccactcatgccaccgcatgggcgcaggcggggctggcaattccggcgctaggcaccacgcacgccgactacttctttggcgatatcccgtgcacgcgcggattaagcgaagaagaggtgcagggcgagtatgaactgaacaccggcgaagtgattatcgaaacgctgggtgacgccgagccgctgcatacgccggggattgtggtgtatcagcacgggccgttcgcctgggggaaagatgctcacgatgcggtgcataacgcggtagtgatggaagaagtggcgaaaatggcgtggattgcgcgcagtattaacccacaactgaatcacatcgacagcttcctcatgaataaacacttcatgcgtaagcacggtcctaacgcttattacgggcagaagtaaaacacgcgctgcggaaatttccttcttcgggagataactggtctaattccgcagccgtttttcaaaaaaagccccctgcgaagggggcaaagcaaactatggcaatgtttcgttggttatacctggtgctagcgataaatatccgcgctggcgtgcatattgccgttactccccggttcccgcatcagaattacgtggtagtacgttgcgccctgcgcatctgtttcttcatttaatgcctgacgtgcttcactttcagtggcgaaattatgattgatataaatcacgcctaagctttgcatatcgtccatatttctggcctggtggttattgatttcaatggctgcccatgtatttgcacttagcaaaagcacagccagaagggctaaaactcgactgaacatagatacctcctcgacggctgactttgtgtgctctcctctgtgatgatcttctgatttaattttaatcaatgataaagaagttgatggtgaccatttctgatgcagttgttcaaaaaaacaccatgatgaagtgtgatgaactccaaatcagcggtttagaggttaattgcgaaaggggagatttatttcggctctgcccttgagtttagcggggcatacaagtactataacgcgtcatttttcagccgacctttaacacgttccttgcctccccgggattcggctgacccagacaggaggctgaataatccgtaaggagcaattcgatgcgtcattacgaaatcgtttttatggtccatcctgaccagagcgaacaggttccgggcatgatcgagcgctacactgctgccatcactggtgcagaaggcaagatccaccgtctggaagactggggccgccgtcagctggcttacccgatcaacaaactgcacaaagcacactacgttctgatgaacgttgaagctccgcaggaagtgatcgatgagctggaaactaccttccgcttcaacgatgccgttatccgcagcatggttatgcgtaccaagcacgctgttaccgaagcatctccgatggttaaagcgaaagacgagcgccgtgagcgtcgcgatgatttcgcaaacgaaaccgctgatgatgctgaagctggggattctgaagagtaatttctgatgaccaaccgtctggtgttgtccggcaccgtgtgcaggactccccttcgaaaggtcagtccatcaggaattcctcactgccagttcgtgcttgagcatcgttctgtgcaggaggaagccggctttcaccggcaggcatggtgtcaaatgcccgttattgttagcggacacgaaaaccaggccattactcacagtataacggtcggcagtcgcataaccgttcaggggttcatttcatgccacaaggcaaagaacggactgagcaaaatggttttgcatgccgagcagattgaattgatagattctggagactagccatatggcacgttatttccgtcgtcgcaagttctgccgtttcaccgcggaaggcgttcaagagatcgactataaagatatcgctacgctgaaaaactacatcaccgaaagcggtaagattgtcccaagccgtatcaccggtacccgtgcaaaataccagcgtcagctggctcgcgctatcaaacgcgctcgctacctgtccctgctgccgtacactgatcgccatcagtaatcggtcacggtccattaatacgactttgagaggataaggtaatgcaagttattctgcttgataaagtagcaaacctgggtagcctgggtgatcaggtaaacgttaaagcgggctatgctcgtaacttcctggtaccgcagggtaaagctgttccagctaccaagaaaaacattgaattcttcgaagcacgtcgcgctgaactggaagctaaactggctgaagttctggcagctgctaatgctcgcgctgagaaaatcaatgcactggaaactgttaccatcgcgtctaaagctggcgacgaaggtaaactgttcggttccatcggtactcgcgacatcgctgacgctgtaactgcagctggcgttgaagtggctaagagcgaagttcgtctgccgaacggcgttctgcgtaccactggcgaacacgaagtgagcttccaggttcacagcgaagtattcgcgaaagtgatcgtaaacgtagtagctgaataattcgttattcaacgagacgtaaaaacgccgaccattggtcggcgttttgcttttgtagcgagcacttgcagatatcgataagggccacaataagcagccctacgaagataattacttagctgcctgaatatcagccagcattggggcaagggctgggttgtccttagcgaagtttgcgtacattggctgtactttctcgataaacggagctttatctacctggtagactttcacgcccattttatccagtttcgcaaattcttgtttctcttcctcgctccacaagtctttcatatagctcattgattctttagctgcttttaatataactgcctgattttccgggctaagtttatcaaacgcagcattgctcatcagaaccacatcgggaaccatagtgtgttcgtcaaggctgaaggattttgccacttcaccgtgacgcatggtggtcagcgccatcacgctgttttctgccatatcgaccacaccctgctgtaaggctgtatacaactcgccgtaatccagtggcgtcgggttaccgcccatgactttgatcatttcaactgcgccagggcttggctggacacggactttcatgcctttcagatcgtctggtttcagtactggtttattgccatagaaactgcgggcgcctccatcataaaaagtcagcccgaaataacctttgcttttcgttgagtcgaggatttttctcccgatatcgccctgcatgacctgataataatgatcacgatcgcggaacaaataaggcaggctaaataatttataggaattttcaaatgcttccatttctgccgcattggtttttaccagtggaatagcgccagaacgaatcagctccattgtttctcgttgagtacccaatgttccatttggataaatacgaatagtaatatcaccgttagagtactctttgctctttttcgcaaagaactccatcgctttatgaacaggatgagacttatcctgattatgactcagttttaatgtcactgcccaggactggcttgcggataacataagaacagcaccgataatgccagcggatacttttattttcatagatgttccttttctaataaatatggcggcaggtgccgctagtgaatgcgcatcagtaacccagtgctcttggcaatgccatactgatttgcggaatataggtcaccattgccagcaccaataccatcacggcatagaatggcagcataggtttgataattttattaatcggtaatttagatacactacaaccgacaaataacacactgcctacaggcggagtacaaataccgatacacatgttcagcaccatgacaataccaaagtgaatcgggtccatgcccagttcggtgacaaccggtaaaaatatcggcgtaaaaatcagtaccgccggtgtcatatccataaaagtgccgataatcaacaggataatattgataataagcaggattattattgggttgtcagaaatagtgttaagcaaatcgagaatcaggaagggaacgtcagcgtttgacattgcccatgacattcccatcgaagaaccaattaataacaagacaattgcagtggtaataacggattccagaaatattttaggtaaatctttaactgagatttcacgataaagaaccagtgcaaggaaaagggtataaattaccgcaattgcggaggcttcggttggagtaaaaataccgcttagtacgccacccataattaacacaatcaggaaaatactggggatagccatccatatcgcaacgccagcctggcgcaaagtcggacgttctggttttggataaccgcgacgtacagcgataataccggctattaccatcagtgccagacccagcaaaatccccggaacataacccgccaggaacagtgcggcaatagaagtaccaccactgaccagtgaatagacgattaacgtattacttggtggaataagcaaacccgtcggggcagaggcaacgttaaccgcagtactgaatgccgggtcgtagccctctttaacctgttgcggatgcatgacgccgcccatcgcagccgccgaagccacggctgaaccagaaattgccccgaacagcatattggcgagaatattacagtgggcaagtgagcctggcagacgaccgccgagaatacgggcaaagttgattaatcgtcgcgctattcctccatgattcataatgttgccagacaagataaaaaatgggattgccaacaacgtaaaactatctaacccggaggctaacttttgggaaaccacactcaatgctgatgaatcccctaatgattttggtaaaaatcattaagttaaggtggatacacatcttgtcatatgatcaaatggtttcgcgaaaaatcaataatcagacaacaagatgtgcgaactcgatatttt

SEQ ID NO: 98 - DNA, 12549 bp, Escherichia coli
  source 1..12549: mol_type = genomic DNA
cgcttcaggatgctgtggaactggagcttgcaacggaggaagaaacctcgttgctggaagcctggaagaagtatcgggtgttgctgaaccgtgttgatacatcagtagcaccggatattgtgtggccagatgaaccaggtttcacagaataaaaaagcagagaagctgtaataaatgaagcccgactgttacaacagtcgggctttacaattgtcgtatatttatagcgggtccagcccatatttagcccttgctctgttgcacgcctcattggcttctccgttctcaccagacatggcgaattctctgcatgtggacgaacgattgtcatatattgtgcagcaggcatttttgcccggagtgcctgccagagcgacacagcggggatttttctgattggtaccgctcatacatcggtgaaaaggggatatttgttctgtgagccttgcagggatagtaccgccagcatcatcggcttcggcccagtaaaaagagacgcggaaaaatgcacaacaggcaccacacgtcatgcatggattcagattgctcataattcaccagcacagctacagattgaaaaacatagccgcagtacgtcatatgtaagaacggcggcagttggctagggatctttcgactgtgggggtatttaatgattccagccggaactgattctattggaaagaattcatgggcgcaaattgcagatcacagattgattagttatagatttttactgtggcaaaaatgggacaaaaggccgtaaaaggggcaaaaatggggcaaaaaaagtgtagattattgtgctttattgtagatgttcatcctgtctaacatgttgaaaaaattataaaaacattgttcgtcagatagttgtgatttttacccttacttgttcaggttgtattgttctttcttactaatttcttgattttgcgacatttaaaagcgactcaattcgttatatggcatcagaagagtatgcgtcatgccggaatgcccagcataagaaatctgatataaaaacagtggcgtgtatggtacggattagaggggaaaatgtcagcacatttgcgaaatgaatcaaaaagcccgcagcaatgtgcgggcgttagtgtcagcgcacaaccagcacggagcactctgcgtgacgcactacagctgcggcgttggaaccgagcagataagtggtgatatccggtcgatgggaagcaatgatgatcatatgagcggggatcttcttcgccatttccagaatgcggtctttgggcgagccttcctcaacatggacatgcactctgtcggttggcagtttaaattttttaatgatctcttccagttgcgatttggcttccgctttcaggtcatccattgccggtaattctgcggaatacgctaaacccagagaggcatagtagggcagtgaaggtattaccgtcaggaaatgaacctctgcatcatcaatctttgcctctgcctcaacgtggctaatcacgcgttgagttaattctgaatcggaaatatcgatagggacaagaatcgttctgttcataaaacctcctgttttagtatccgcataaagtgtaacgccagatgacactttttgtgtaatgacggagttcacatttttaatttagatcaaaggaggaagaataagcagaaaaagcccgccataacagcgggcaggaggatttagaactgataaaccagacctaaagcgacaatatcatcggtagagatgccattggcagcgtagaaactgtcatcttcatccaacaggttgattttatagtcaacataagtggacatgtttttattgaaatagtaagtcgcgccaacaccggcgtatttaaccagatctttatcatcaacacctgccgggttgtctgcaccaccggcagcgtgcaggtcacggcctttagacatcaggaaagagactgccggacgcagaccaaaatcaaactggtactgtgcagtgacttcaaagttctgggttttgtttgcaacagcataatcgctgtcgccaaacggggtcatattacgcgtttctgaatacatggttgccaggtaaatattgttagcatcgtattttagcccagcagtccacgcgtctgctttatcaccacccgccgcagtatggttaacctgatcattggtgcggtcagaagaggtgtatgccgcaccagcgctaaagcccatgcctaaatcatatgttgtggaaagaccccagccgtcaccgttttcatggcgaacatcacgtccgttgttggtgccttcctgaccattactggcaccttcgttgttaccttgatactgcaccgcgaagttcagaccatttaccagaccgaagaaatcagtattacgataagtcgcgacgccattggctcgaccagtcataaagttgtctgcattggtataagagtcaccgccaaattcaggcagcatatcggtccagccttcgatgtcgtacattacgccataattacgtccgtaatcgaaagaaccgtaatctgcaaatttcagcccggcaaatgccagacgggtccatgactggttttttgaagattcagtgttgtttgcctgaatattgtattcccattgaccgtagccagtgagttgatcgttaatttgggtttcgcctttaaaacccagacgcgcatagctctggtcgccatctttcgccgaattatcagaaaaataatgcaggccatcaactttgccatacagatctaatttgttgccgtctttattataaacttcggctgcatgtgcagcacctgcggcgagcagggcaggaattaaaagtgccagtactttgcttttcattgaataaatcctttagttattttatttgccttttatccccatttcggggagtgaaaacatcctaaaggagaagttcagttagccgataaatatcatttgttacgccttaagtaaaaccttaatcaaataattcctctgaaatgataataagtctggtgaatgtatcgaagataatacatacaaaataaaaattatacttttaattttctatacgttattctgcgcgggttatatgcctttattgtcacagattttattttctgttgggccattgcattgccactgattttccaacatataaaaagacaagcccgaacagtcgtccgggcttttttttagaattggataatccttatccagagcatttaatcggtgttgcttttttccgcttttccggccatttgtgccaggaagtcatagcgtttttgcaaatcagctgcagcatctttccataactgttctgccacttctggctgctgcgaattcagccgacggaaacgttgctcgtgaagtaacgtttcttccagtgctactgacggcgggcgtgaatccagcgccagcggcagtttgccttcatcggcacgacgcggatcgaagcgatatagcggccagaagccggtagctgtgagttggcgcatctggtcgtggctgagtgccagatcgtaaccatgctcttcacatgggctataagcgatgatcagcgatggccccggatacgcttccgcttcctgaatcgctttcaccgtctggttgagctgcgcgccgagagaaatctgcgccacataaacatgaccgtacatcatcatactgacgccaagatctttacgcgctttacgtttgccgtgctcgccaaatttagttactgcacccagcggtgtcgctttcgacgcctgaccaccggtgttggaatagcattgcgtatccagcaccagaatgttgacgttttccgtcaaactcaatacatgatccagaccgccaaagccgatatcgtaagcccagccatcaccaccaatcagccagattgatttttccaccagtgcatctgcatcacgtagcagttcatgtgcttcggcaacatcgttgagttgctggcgtaaagctgcgacctgttctcgacgaacctctggcgtagcgtctgatttcaacgccgtcagtaattccgccgggattttatcggcaaattgatccagcagacgcagcacgcggacacggtgttgatcgaccgtcaggcggaaaccaaggccaaattcggcattatcttcaaatagagagttcgcccatgccggcccacgaccgttggcatcggtggtatacggtgtagagggcaggttaccgccataaattgaagaacagccggtggcgttagcgatcaacatccggtcgccatagagctgagtcagtaatttaatatacggcgtctcgccacaaccggagcaagcacctgaatattcaaacagcggtgtaatcagctgcgatgtacgaatatcaatacgttccagtttgctacggtcgatttctggcaggttgaggaagaaatcgtaattgattttctcttcttcgacatgttccaggcgcgacatcatattgatggctttaatctctggattctgacggtctttcgccgggcaaacttcgacgcacaggttacaaccggtgcaatcttccggtgccacctgcaagacatatttctgcccgcgcatatcacgcgatttcacatccagcgaatgcaggctggcaggggcgttttccatcgcttcaggcggcaccacttttgcgcgaatagctgagtgtgggcaagcggcaacgcagtggttacattgggtacagagttcctctttccagatggggatctcttcggcgatattgcgtttttcccagcgagtggtgcccatcggccaggtgccgtctggcggcagcgccgaaacggggagggcatcaccaagccctgcgagcatcgctgcggttacggttttcacgaaatcaggggcggcatcggaaaccactggcggtcgattggcgctgtgcggatttaccggttgcaacggaacttcttctacggattcacgcgccagcgccagagcctgccagttgcgttccaccagatcctggcctttgctactgtaacttttggcaatcgcaccctgcaattctgcgagggcgctatcgccaggcagaatttgcgtcagatggaaaaaagccatctgcatgacggtattaatacgggccgccaggccacattcgcgggcgattttcgccgcgttaatcacatagaagcgcgcttttttctgatttagcacggcctgaacttcctgcggcaagcgcgaccacacttcatctgcgctgtacggcgtgttgagcaggaaaatgccgccaggttttaaacgctcagccatctgatatttatcgataaactgcaactggtggcagccaacaaaatcagcctgggaaatgagataagcggaacgaatcggctgttcgctcacgcgaaggtgagaaaccgtcaggccgcccgcctttttggagtcgtaaacaaaatagccctgtgcgtaccacggcgtggaattaccgataatcttgatattgtttttggtcgcggaaacgctgccatcactaccaaggccataaaacaaggcttccagtttcgccgagtttggcagggtgttttccggcaacggcagtgacagattggtcacatcatcgtaaataccaaccgtaaagcgcgctttcggtttagccgcgttgagctcggcaaataccgccagtacacagtccgggccaaattctttggatgaaagaccatagcgcccaccaatgacacggggcagagtttcgcgctcgccattattaaaggcttctgccagtgcggtcattacatccagatagagcggttctgcctgggcaccgggttctttggttctgtccagtaccgccacgctgcgtacggatcccggcagagcttgcagcaagtgtttggcggagaagggacggtacaggcgaactttcagcacgccaactttttcgccacgggttagcaattcatcaaccacttcttcacaggtgccaatggcagagcccatcaggataatcacccgttccgcttgcggatgcccgtaatattcaaacggctgatactgacgacctgtcgcggcagagaaatcattcatcgcctgttcaacatggtcatagaccgcgtcgtaccatgggttggtggcttcgcgagactggaaataagtgtcaggattggcggacgtaccgcggatcaccggatgttccgggttgagcgcccgggcgcgatgagcatcaatttcggcctgcggcatgagatcaagaatagtgtcatcggccagcgggacaattttattgatttcgtgggacgtgcggaaaacatcaaagaaatgaataaatggcacgcggctcttcagcgttgcgatgtgcgaaatgagagcaaaatcttgcgcttcctggacgttagccgcacacaacatcgcgcaacccgtctggcgcaccgccatgacgtcggaatgatcgccaaaaatagaaagtgcatgtgtggcaacggtacgtgccgctacatgcaggacaaatggcgtcagttcgcctgccagtttgtacagcgtcgggatcatcagcagcaaaccctgcgatgacgtaaacgatgttgaaagggcacccgtctgcaaagcgccatgcacggtagcgatagcacccgcttccgactgcatttcaactacgcgtggtgtgtctccccaaacgttctttaagccgtttccggcccaggcatcagcctgttctgccatcgtggaactgggggtaatagggtagatggcgataacttcactggtgcgaaacgccaccgaagcaaccgcgccattaccgtcaatagtaatcatatgacacccttacattgcgcaaatgaggggcgcacgaaattgctgcgcgcccagtagtaatccttcaattttagcaaatggctttcttctgcattttcgcttttgtgtcccccacatcagcgtaatgaatgttttgatcaaacagagggcaaaaaaatagccataaaaaagtaaaaatgcggggcaacgcgcaggacagctctcgacgtcgccctctgtgctgcctattatttatggcggtgtcgtttggcttgaagatcagaggaagaaaagatgcgagcagcgttttgggtagggtgtgccgctttattgttgtcggcgtgtagtagtgaacctgttcagcaggcgactgcggcgcacgtagcgccaggtttaaaagcgtcgatgtccagtagtggagaagcaaattgtgcaatgatcggcggttcgctttctgttgcccgtcaactggatggtacggcgattgggatgtgtgcattacccaacggcaaacgctgtagtgaacagtcacttgccgccgggagctgtggcagctattaattcattaaatccgccagcttataagttaatgtctgtttcgcggtcgccagcgttaactggttcgcggtcagatccacttgtgcaccttctttcagcatttcgctaatggtgttatcgagttcattaagctgcgggttagcgcacatcatacgggtcattgccagccctttggctgtcagttcaccattagacagtttgccttcaccgctaaagcggttacacatgctgccggaaatcatcattttttcaccaaagctgatttctggcggatttttatcgttggtcacgggcttaccgtttacgctttccagcacaaaacgatgatgctgtaactgttctggcgttacagcaattttgtcattacttacacatcccgccatcagcaggcttagcgcaacgagcgcggctactttcttcattgtggttctcaattacagtttctgactcagggctattttaagaatagaggatgaaaggtcattggggattatctgaatcagctcccctggaatgcaggggagcggcaagattaaaccagttcgttcgggcaggtttcgcctttttccagattgcttaagttttgcagcgtagtctgagaaatactggtcagagcttctgctgtcaggaatgcctggtgcccggtaaatagcacgttgtggcaggcagacaggcgacggaatacgtcatcctgaattacgtcgttggatttatcttcaaagaatagatcgcgttcgttctcatacacgtccatacccaacgaaccaattttctgatttttcagcgcttcaattgctgcctgagaatcaatcaatgcaccgcgactggtattgacgatcatcacgccatttttcatctgatcgaaggcggcttcgttcaacagatggtagttttccggtgtcagcgggcagtgcagagagataacgtctgattcagagaacagggttggcagatcgacatactccacaccgagttccagcgccgctgcacttggatacggatcgaacgccagcagacgcataccaaaacctttcagaatgcgcagcatcgccacaccgattttaccggtaccgataacgcctgccgttttgccatacatagtaaagccggtcagaccttccagagagaagttagcgtcacgggtacgctgatacgcgcggtgaatacggcggttcagcgtcatcatcataccgatggcgtgttcagcaacggcctctggatcataggctggaacacggactactttcagccccagttcttttgccgcgtcaaggtcgacgttattgaaaccggcacagcgcagggcgatatatttaacgccgtgctttttcagctcttccagcaccgggcggctgccgtcatcgtttacgaaaatacataccgcttcgcagccattggcagttttagcggttttttccgtcagcagaaagtcaaaaaattccagctcaaagccaaaggactcgttcacctgttgcaggtacttcttgtcgtactgttttgtgctataaacggcgagtttcataagactttctccagtgatgttgaatcacatttaagctactaaaaatattttacaaaatttcaaatataattgaaagctatggcgatattgaaaaattcatcaacaactatgcttagtgtaggcgcaaccttcaactgaacggttaaacatgccacaatacccgtattgaatgcttaatttttcgctaaatcaggatattaactacccatgctgggtaaatataaagccgttctcgcgctgttattactgattattcttgtgccgttgacgctgctgatgacgctcgggctgtgggttcccacgctggcgggcatctggctaccgctcgggacacgtattgcattagatgaaagcccacgcattacgcgtaaaggtttaatcattcccgatctccgttatctggtgggagattgtcagcttgcgcatatcaccaacgccagcctttcacatcccagccgctggttattgaacgtcggcacggtagaacttgattctgcttgtctggcgaaattgccgcagacggagcaatcgccagctgctccaaaaaccctcgcgcagtggcagtccatgctgcctaacacctggatcaatatcgataaactgattttttctccctggcaggaatggcagggaaaactctctctcgcattaacctctgatatccagcaactgcgttatcagggcgaaaaagttaaatttcaaggccagctgaaagggcaacaacttacagtcagcgaactggatgtcgtcgcgtttgaaaatcagccgccggttaaactggtgggggaatttactatgccgctcgtgccggatggacttcctgtaagtgggcatgctactgcgacgttaaacttgccgcaggaaccgtcactggtggatgcagagctggactggcaggaaaatagcgggcaattgattgtgctggcacgggataacggcgatccgttgctcgatttgccgtggcaaattactcgtcaacaattgaccgtaagcgatggtcgctggagttggccgtatgcaggttttcctttgagtggccgactgggtgtcaaagtcgacaactggcaggcagggcttgagaacgctctgatcagcggacgactgagtgtgctgacccaggggcaagcgggtaaaggcaacgcggtgctaaattttggcccaggaaaattaagcatggataacagtcagctgcctctgcagctgaccggtgaagcgaaacaggcggacctcattttatatgcccgtttacctgcgcagctaagtggaagtctgtctgacccaacgctgacctttgagccaggcgcgttacttcgttcaaagggaagagtcatcgattcgctggacatcgatgaaatccgctggcctttagcgggtgtaaaagtcacccaacgtggtgttgacggacgtttgcaggccattttgcaggcgcatgaaaatgaactgggcgatttcgtgctgcatatggatgggctggcgaatgattttctccctgacgcgggccgctggcagtggcgctactggggaaaaggcagttttacaccgatgaatgccacctgggatgtcgcaggaaaaggtgaatggcatgacagcacgattacgctgaccgacctctccaccggtttcgaccagttacaatacggtacgatgacggtagaaaagccgcgattaattctcgacaagcccgtcgtctgggtacgtgacgcacagcatccctccttcagcggcgcgctgtcactggacgccgggcaaacgctgttcactggcggcagtgtgttaccgccatcaaccttaaaatttagcgtcgatgggcgcgatccgacgtatttcctctttaaaggcgatttacatgctggtgagattggcccggttcgggtaaatggtcgctgggacggtattcgtctgcgcggtaacgcctggtggccaaaacaatcactgactgtattccagccgctggtgccacccgactggaagatgaacttacgcgatggtgaactgtatgctcaggttgcattttctgctgcgcctgaacaaggattccgcgcgggaggacacggcgtgttgaaaggcggtagtgcctggatgccagataatcaggttaacggtgtcgattttgtcctgcctttccgttttgccgatggagcctggcatctggggactcgcggccccgttacgttgcgaattgccgaagtgattaatctggtgacagcgaaaaatattacggctgatttgcaagggcgttatccgtggactgaagaagaacccttgctgttgactgatgttagcgtcgatgtgttaggcggtaacgtactgatgaaacaattacgtatgccgcaacatgacccggcgctgttgcggctgaataatctctcatccagcgaactggttagcgccgtcaatccgaaacaattcgccatgtccggggcatttagtggtgcattgccgttatggctaaacaacgaaaaatggatagtgaaagatggttggctggcaaatagcgggccaatgaccttgcggctggataaagacaccgcagatgcggtggtgaaagacaatatgactgcgggttcagcaattaactggttgcgctatatggaaattagccggtcatcgacaaaaattaacttagataatctcggtttattaaccatgcaggccaacattacaggtaccagtcgcgttgatggtaaaagcggtacggtaaaccttaattactatcatgaagagaatatttttacgctgtggcgcagtttacgctttggcgataatctccaggcatggttggagcagaacgcacgtctgccgggaaatgactgtccgcaaggaaaagagtgtgaggaaaaacaatgaaaattttactggctgcgttgacgtcatcttttatgctggctgcctgtacgccgcgtattgaagtcgctgcgcccaaggaaccgatcactatcaatatgaacgttaaaattgagcatgagatcatcatcaaggcagacaaagatgtcgaagagctgcttgaaactcgtagcgatcttttctgaggcgatgatgaagaaaacattacttctttgtgcgtttcttgttgggctggtaagcagcaatgtaatggcattgactctggatgaagccagaactcaggggcgggtaggtgaaacattttatggttatctggttgcgctgaaaacggatgctgaaacagagaaattagtaaccgacattaatgccgaacgtaaagcgagttaccaacaactggcaaagcaaaataatgtgtctgtagatgatatcgcgaaactcgccgggcaaaagctcgtagctcgggccaaaccgggggaatatgtacaagggataaacggtaaatgggtgcgaaaattttaatagcaaaaccgcaatatcgggataacgctacaggagaaagcgattgatctattttcctgaaacaaggtgaatattcaaaaactcctgtcaaattgcctttcgccctgaaaaatgcatagtcaaatatctgttttaactaattggcgttgcagtacacacaacgccaattagttagcggaatttacgtcgatactcgcctggcgctgagagatcccctcataatttccccaaagcgtaaccatgtgtgaataaattttgagctagtagggttgcagccacgagtaagtcttcccttgttattgtgtagccagaatgccgcaaaacttccatgcctaagcgaactgttgagagtacgtttcgatttctgactgtgttagcctggaagtgcttgtcccaaccttgtttctgagc

SEQ ID NO: 99 - DNA, 11793 bp, Escherichia coli
  source 1..11793: mol_type = genomic DNA
aatcgtaacgggataccaaatcaagggcctgtccaatgtgcataaaaaaatccggaaacgagtgagcgtttccggattcttacacagccactggatcggtcaactgatccttaactgatcggcattactgccgaccggtggcccttttttataactgacatcaataaattcatctatctttctatataaatatattctgaattatcattaatgtctgataacaaacttgattttttactgtttaaataatatttaaacaataaatttatattttatttttgcgtaattaatattatttttagataaagccgtctctttggtgtactattcctttgaatcaaaaatacacttattaatataagtgatgattcatggtaaaggatatattatatcaatggagtttttatgaagcgtaatattataggcggtgcattcactctggcatctctaatgctggccgggcatgcactggcagaagatggtgttgttcacttcgtcggtgaaattgtcgacactacttgtgaagttacctccgatacagccgatcaaattgtcccactgggtaaagtcagtaaaaatgcattttcaggtgtaggtagtctggcgtcgccacagaagttcagtattaaacttgaaaattgcccggcaacgtacactcaagcagccgttcgttttgatggtacagaagcgcctggcggcgacggcgacctgaaagtgggtacgccgcttacagcaggcaaccctggtgattttaccggtacaggacaagcgattgcggcaaccggcgttggtattcgtatttttaaccagtccgataattcgcaggttaaactttataacgactctgcttataccgctatcgatgctgaaggcaaggctgaaatgaagtttattgcacgctatgtggcaaccaatgcgaccgtaacggctggtacggcgaacgcggattcacaatttactgtcgaatataagaaataatttatcaagggcctttttattcagttggctttggccagggagtcgttatgtccagaaaaagttgtttaatcaggctctttaaaacaacagtttcatgtaagttatttaccgcgattatactcagcgtttttttaggccaaccagcattaacttatgcaggcgttgtcattggtggtacgcgggtggtttacttaagtaataatgctgataaatctatttctgtatttagcaaagaagaaaaaataccttatctcatccaggcttgggtagatccatttaataaagaggataaaagcaaagcgccgtttaccgttattccgccagtatcacgattagaaccttcgcaagaaaaaatattacgcattattcacaccaaaggtgtgtcattgcctgatgatcgcgagtcagtcttctggctgaatattaaaaatattccgccatcagcgagcaacaaagcgacgaactcgctggaaatagcagtaaaaacgcgtatcaagctgttctggcgaccagcaaatatccgccttattcccgaagatgctgcgccgaaagtgaaatggcgccgggaagggcgaaatctgatagcagagaatcccaacccaattcatatcagtgtgatggatgtcatcgttgatggccatgatgtgcccctcaatatgatccgtccttttgaaacgctcacgttacctttacctgctaattctgcgggaggccaaatgacctggcgatttattaatgattacggcgcagtcagtgacccgataaaaatgacgctgtaagcaagggataaggataggcgtattatgatgacgaccagaatagtggttggcctcacggcagggacgtgtctgattttctcgcaaaacctgatggccgaggtcagtgtattcaatccggcgcttctggaaatcgaccatcaatccggagtcgatattcgccagtttaatcgggcaaacctgatgcccccaggtgtttatagcgttgatatttttatcaacggtaaaatgtttgaacgtcaggatgtgacatttgttcaggataatccagatgctgatctgcacgcatgctttattgccattaaaaaaacactgtcctcctttggcataaaagttgatgcgctcaaatcgttcaatgatgtggatgagacggtttgcctcgatcctgctccacgtattgaaggctcatcctggcagtttgacagtgataaattgcagctgaatatatccattccccaaatctacatggacgcgatggcttatgattacatcagccccacgcgttgggatgaggggattaacgcgctcaccatcaactacgatttttctggttcacatacactacgttcagattatggttcacaagagacagataccagttatctcaatctgcgcaatggactgaatattggaccgtggcggctacgtaattacagtactttaaacaccagcgatggccgtgcggaatacaactccattagtacctggatacagcgcgatattgccgcgttaagaagccagattatgattggtgatacgtggacggcgagcgatattttcgacagtacgcaaattcgcggcgcgcgtttgtatactgataacgatatgctacccgccagccagaatggctttgctcctgtggttcgtgggattgcaaagtccaacgccaccgtcatcattcggcagaatggctacgtgatttatcagtctgccgttccacaaggtgcttttgagatcaccgatctcaacaccgccagtacaggtggcgatttggacgtaaccatcaaagaagaagacggtagcgaacaacgattcacccaaccttatgcttcattggcgattcttaaacgtgaaggtcagacagatgttgatgtcagcgtgggtgaattgcgcgatgaagacggatttacaccggacgtccttcaggcgcaaatacttcatggtttttcccacgggatcactttatatggaggtatgcaggctgctgaaaattatggttctgcagctctgggtgtcggtaaagatcttggcgctttgggcgcaatttctttcgatgtgacacatgctcgtgcgaattttagccatgatgatacagaaacgggtcagtcatatcgctttctctattcaaaacgatttgacgacacagacactagcttgcgcctggttggctatcgttactccaccgagggctactataccctcaatgagtgggcatcgcggcgcaacagccctgaagacttttgggaaacaggtaaccgacgtagtcgcgtggagggaacgctaacgcagtcgttggggagagattatggcaatttatacctgacattaagccggcaacaatactggcataccgatgatgtcgaacgattaatgcaatttggctacagcagtagctggaagcgtctctcgtggaacgtctcctggagttattccaatactgccagacaggggacggggaacaaccatgccagtgataacaccagtgagcagatctacatgctctctttatctgttcctttatcgggctggtggggtaatagttacgccacctattctgtttcgcaaaacgataattccggtagctcacatcaactcggactcagcggtacggcgctggaaagaaataacctttcatggaatttaatgcagtcctataacagtcatgatgatgaggttggcggtaatatgtccctgacctatgatggctcttatggcacggtgaacggcagctataactacagccaaaattcccagaggctgaattatggtatcagagggggaattctggcacacagcgaaggggtaacgttaagtcaggagttaggtgaaactattgctcttgttaaagcacctggggccgccgggttagaaatagataatatgcgcggtgctgcgacggactggcgcggctatacggtcaagacacagctaaacccttatgatgaaaatcgggtagcaatcagcgataactatttctcgaagtcgaatatagaacttgataataccgtcgttacgatggttcccacgcgtggtgcagtggttaaagcggagtttgtgactcatgtgggttatcgcgttctcttcagagtgttaaatgcaaatggtaaaccggtaccttttggagccattgctgcgatacaagatgcaagtttggcagattcaggaattgtcggtgaccgtggcgaactttatctttctggtctaccagaaaaaggacaggttacgttatcctggggagaaaacgcctcaacaaaatgcatcttcaattattcactttcgacaccagaaagtgagagcggattaattgaacagggtgtgacatgtcattaaaaggatttttatgaacaagtatatcaaacagtggtgctttgctgtgtttatgctctcgttaagtagtgtagcacttgcagctcctaaaggtatctgtacccctgataatggcgtatttcacagtacgcttgatttctcgggatatcttattaccgcgaacgaaaataaggttggaacgacatttaacaccactgtaactaatggatcctcatatcctggacgctgtcattgtgatactggtaacgtaggagaattcccctatatctattatacgtcaaaaataaaccaggcattaacttatgctggggttcactctaatattaattattatgatcttaatccgaaccttgatgttgggattgctatagatattcttggggttgggtatgtgaatgcaccttttgaatatcatgctaacaacccgtctggtaatacaaagtacaattgcaaccgcattgaacctttaagtatatctagtggggctaaagcgatagtatatttttatatcaagaagacatttgcaggaaaattgattattcctgaaacaaagatagtgacattgtatggaacaattagccgtgacaccccggtggattactcacagccgatggctgatgtttatattcggggcgatattacagctccgcaaagttgcgaaataaataatttacagccagtttattttgattttaaagaaataccagctgcagatttttcatctgttgttgggagtgcggtaacaacacataaaattactaaaacagtcactattgagtgtgaaaacctggggatactgaataccgatgatatcagtacgtctttttatgctaccgaacccaatacggacaattcaatggtcgtaacttcaaactctaacgtggggataaaaatttacgacaaaaataataaggaaatcaaagtgaacggtggtgagttgccaacagacatgggtaaatcaacagtgtatggtgaaaaatcaggtagtgtaactttttcagctgctcctgcgagccttactggagctcgcccagccccggggcaatttactgcaacagcgacgataactgttgagattgtgcgctaataggtctgacaacgattgttcatcacatcgttgtcatctcacccatttctttatcacttttaaatgcatcatgacaaaaagatgacatgtgggattttcatattcacatttaaaatcagtaagttatttggtaattcctttctgtcataaaaatgtcatattccttacatataactgtcacctgtttgtcctattttgcttctcgtagccaacaaacaatgctttatgaatcctcccaggagacattatgaaagttatgcgtaccaccgtcgcaactgttgtcgccgcgaccttatcgatgagcgctttctctgtgtttgcagaagcaagcctgacaggtgcaggtgcaaccttccctgcgccggtgtatgccaaatgggctgacacttaccagaaagaaaccggtaataaagttaactaccagggtatcggttcttccggtggcgtaaaacagattatcgctaataccgttgattttggtgcctctgacgcgccgctgtctgacgaaaaactggctcaggaaggtctgttccagttcccgaccgtgattggcggcgtggtgctggcggttaacattccagggctgaagtctggcgaactggtgctggatggtaaaaccctcggcgacatctacctgggcaaaatcaagaagtgggatgatgaagccatcgccaaactgaatccgggtctgaaactgccttcacaaaacattgctgtagtacgccgcgcagatggctccgggacttccttcgtcttcaccagctacctggcgaaagtgaacgaagagtggaaaaacaacgttggtactggctctaccgtaaaatggccgatcggtctgggcggtaaaggtaacgacggtatcgccgcgttcgttcagcgtctgccgggtgcaattggttatgttgaatatgcttacgcgaagcagaacaacctggcgtacaccaaactgatctccgctgatggtaaaccggttagtccgaccgaagaaaacttcgctaatgcagcaaaaggtgcagactggagcaaaaccttcgctcaggatctgaccaaccagaaaggcgaagatgcatggcctattacctctaccacgttcattctgatccacaaagatcagaagaaaccagaacaaggcacagaagtgctgaaattcttcgactgggcgtacaaaaccggggctaaacaggcgaacgacctggattacgccagcctgccggatagtgtagttgaacaggttcgcgctgcgtggaagaccaatattaaagacagtagcggtaagccgctgtactaataaaactccaggccgggtacggtgttttacgccgcatccggcattacaaaatgactttgtaaacgcgtttaactgaagagtaacttatggctgcaaccaagcctgcttttaacccaccgggtaaaaagggcgacataattttcagcgtgctggtaaaactggcggcgctgattgtgctattgatgttgggtggcattattgtctctctgatcatctcctcctggccgagcattcagaaatttggtctggctttcctatggaccaaagagtgggatgcaccgaacgatatctacggggcgctggtgccgatctacggtacgttggtgacttcgtttatcgcgctgctgatcgccgtcccggtgagtttcggtatcgccctgttcctgactgagcttgcgcctggctggctgaaacgcccgctgggtatcgccattgagctgctggcagccattccaagtatcgtttacggcatgtggggcctgtttatctttgcgccgctgttcgccgtttactttcaggagccggtcggcaatatcatgtcgaatatcccgattgttggcgcgctgttctctggccccgcatttggtatcggtatcctcgcggcaggcgtgatcctcgccatcatgattattccgtacattgcggcggtaatgcgtgatgtgttcgaacaaaccccggtgatgatgaaagagtcggcctacggtattggctgcaccacctgggaagttatctggcgtatcgttcttccgttcaccaaaaatggtgttatcggcggcatcatgctggggctgggccgcgcgctcggtgaaaccatggcggtgacctttatcatcggtaacacctaccagctcgacagcgcctcgctgtatatgccgggcaacagtatcacctctgcgctggcgaacgaatttgcggaagcggaatccggtctgcacgttgccgcactgatggaactgggcctgatcctgtttgtgattaccttcatcgtcctcgccgcatcgaagtttatgattatgcgcctggctaagaatgagggggcacgctaatggctatggttgaaatgcaaaccactgcggcgctggctgaatctcgccgcaaaatgcaggcgcgtcgccgcctcaaaaaccgtattgcgctgacgctctcgatggcgacgatggccttcggcctgttctggctgatctggattttaatgtccaccatcactcgcggtatcgacggtatgtcgctggcgctgttcactgaaatgacgccgccgcccaatacggaaggtggtggtctggcgaacgccctggcgggtagcgggctgttaattttgtgggccacggtattcggtacgccgctgggcattatggcggggatttatctggcggaatatggtcgtaaatcctggctggcagaagtgattcgcttcattaacgacattctgctctccgcgccgtcgattgtggttggtctgtttgtttacaccatcgtggtggcgcagatggagcacttctctggctgggcgggtgtaattgcgctggcgctgttgcaggtgccgattgttatccgcaccaccgagaacatgctgaaactggtgccggacagcctgcgtgaagcggcttatgcgctgggtacaccgaagtggaaaatgatctccgcgattacgctgaaagcgtcggtgtccgggatcatgaccggtatcctgctggcgattgcccgtattgccggtgaaaccgcgccgctgctgtttaccgcgctctccaaccagttctggagcacggacatgatgcagccgatcgccaacctgccggtgacgatctttaagtttgcgatgagcccgtttgcagaatggcagcaactggcctgggccggggtgttgattattaccctgtgcgtactgctgctgaacattctggcgcgcgttgtttttgcgaagaataaacacggttaacactttgccggatgcggcgtgaacgccttatccggcctacggtaagcctgattcgcgaagtgcatcaggcacgatgaggaaaagattgcaatgagtatggttgaaactgccccgagtaaaattcaggttcgtaatttgaacttctactacggcaaattccatgccctgaaaaacatcaacctggatatcgctaaaaaccaggttacggcgtttatcgggccgtccggctgcggtaaatcgacgctgctgcgtaccttcaacaaaatgtttgaactgtacccggagcagcgtgcggaaggtgaaattctgcttgatggcgacaacatcctgaccaactctcaggatatcgccctgctgcgtgcgaaagtgggcatggtgttccagaaaccgacgccgttcccgatgtccatctacgacaacatcgcctttggcgttcgtctgtttgagaagctctcccgtgccgacatggatgagcgcgtgcagtgggcattgaccaaagccgcattgtggaacgaaaccaaagataaattgcaccagagcggttactctctctctggtggtcagcaacagcgtctgtgtattgcgcgtggtatcgccattcgcccggaagtgctgctgctcgacgaaccgtgttcggcgctcgaccccatctctaccgggcgtattgaagagctgatcaccgaactgaagcaggattacaccgtggtgatcgtcacccacaacatgcagcaggctgcgcgttgttccgaccacacggcgtttatgtacctgggcgaattgattgagttcagcaacacggacgatctgttcaccaagccagcgaagaaacaaacagaagactacatcaccggtcgttacggttgattcaggagtgcgttatggacagtctcaatcttaataaacatatttccggccagttcaacgccgaactggaaagtatccgcacgcaggtgatgaccatgggcggcatggtggagcagcagctttctgatgcaatcaccgcgatgcataaccaggacagcgatctggcgaagcgcgtgatcgaaggcgacaagaacgtcaacatgatggaagtggcgatcgatgaagcctgcgtgcgcattattgccaaacgtcagccgacggcgagcgacctgcgtctggttatggtgatcagtaaaaccattgccgagctggagcgtattggtgacgtggcggacaaaatctgccgtactgcgctggagaaattctcccagcagcatcagccgttgctggtaagtctggagtcgctgggccgtcataccatccagatgctgcacgacgtgctggacgcgttcgcgcggatggacattgacgaagcggtacgtatttatcgtgaagataaaaaagtcgatcaggaatacgaaggtattgttcgtcaactgatgacctacatgatggaagattcgcgtaccattccgagcgtacttactgcgctgttctgcgcgcgttctatcgaacgtattggcgaccgctgccagaatatttgtgagtttatcttctactacgtgaaggggcaggatttccgtcatgtaggcggtgatgagctggataaactgctggcgggaaaagatagcgacaaataattcaccagacaaatcccaataacttaattattgggatttgttatatataactttataaattcctaaaattacacaaagttaataactgcgagcatggtcatatttttatcaatagcgcattgctattttctctgcacgcaattaaattaatttccgaacctggatgttcgttataaaaaccattaataaatgactggattgttactgcattcgcaggcaaaacctgacataaccagagaatactggtgaagtcgggtttttttgtttataaaaaaggtccttgctatgaacatgcaaatcaccaaaattctcaacaataatgttgtggtggttattgatgatcaacagcgggaaaaagtcgtcatggggcgaggaattggctttcaaaaacgcgctggcgaaagaattaactcaagtggaatagaaaaagagtatgccttgagcagtcatgaactgaacgggcgattaagcgaactcttaagtcatattcctcttgaggtgatggcaacctgtgatcgtattatctctttagcgcaggagcgcttgggaaaattacaggacagtatttatatctcgctaactgaccattgccagtttgcgattaaacgctttcagcaaaacgtgttgctgcccaacccgttgctgtgggatatccagcggctttacccgaaagagttccagctaggggaagaagcgttaaccattattgataaacggttgggcgtgcagttaccgaaagatgaagtgggctttattgccatgcatctggtcagtgcccaaatgagcggaaatatggaggatgttgcaggtgtcacgcagttaatgcgcgaaatgctgcaattaataaaatttcagttcagccttaattaccaggaagaaagcttaagttatcagcgactggttacacatctgaagtttttatcctggcgtattcttgaacatgcttcaattaacgatagtgatgaatcattacaacaagcagtaaaacaaaattacccgcaagcatggcaatgtgcggaacggatcgccatttttattggtttgcagtatcaacgtaaaatttcacccgcagagattatgtttttagccataaatatagagcgcgtgcgcaaagaacactgaaatattattactgagtaaaggattgttaccgcactaagcgggcaaaacctgaaaaaaattgcttgattcacgtcaggccgtttttttcaggtttttttttggagttttgccgcaaagcggtagagggcaagttatgacggagttagccagaaaaatagtcgcaggagtcgggggcgcagataacattgtgagtctgatgcattgcgcaacgcgattacgttttaagttaaaggatgaaagcaaagcgctgagagatcccctcataatttccccaaagcgtaaccatgtgtgaataaattttgagctagtagggttgcagccacgagtaagtcttcccttgttattgtgtagccagaatgccgcaaaacttccatgcctaagcgaactgttgagagtacgtttcgatttctgactgtgttagcctggaagtgcttgtcccaaccttgtttctgagc

SEQ ID NO: 100 - DNA, 11438 bp, Escherichia coli
  source 1..11438: mol_type = genomic DNA
tctgaggcagcacctggcacggctgggacggaagtcgctgtcgttctcaaaatcggtggagctgcatgacaaagtcatcgggcattatctgaacataaaacactatcaataagttggagtcattaccacaaaagtaatccttgctatgggtggttaatcatgcgttaatggtgttctggtttgttacaaatttatctgaagcagtcattgttataattttattatttgtacctcttgagatttccttgttggtttttctctctgatatttttttttcggaccattctgcccaagggctaatttcttcaaaaggtaataattatgtctaacaaaatgactggtttagtgaaatggtttaaccctgaaaaaggttttggtttcatcacgccgaaagatggcagcaaagatgtgtttgtccatttctcagcaattcagagcaacgatttcaaaacattaactgagaatcaggaagttgaatttggtattgagaacggacctaaaggtcctgccgctgttcatgtagtggcgctttgaggtagacaatattacaaaccatattcactttagatgcccgtgttgtcatggttcccagtatagaacatcatcttttgatgtttctgacatgaatcctttcggggcaaaatgtatcttttgtaaatcaatgatgattacatttgataatatttcacaatacttaaatgccagccgtctgtcgttggatttaataaagtgaaaatgaaggctccttcgggagcttttttgcttggtgtctattcgatggatactcacatactacggtaacatcatgaaaaaaatcatagttttttttaactctgaaccagcagtggtagtgccagcgatgactggagttaacaccatcatgcgtgaatatccaaatggcgaaaaaacacaccttactgtaatggccgcagggtttccatctctgaccggagatcataaagtcatttatgtagccgcggatcgacatgttacttcagaagaaattctggaagcagcaataaggctcttgagttgatttgatgctattgcattgataattcaggaaaattctctttgtctgtttgtgtaaaatttagactatcgtatgttgattattgcgatgtttcatcttatcttttacacgtttgcaccatataatcgacttactgtgtaactggaaagtcataacagactaaaagaggaaatgatgaatattgaaaacttaaaaacaaaagcagaagcagatatttctgaatatataacaaaaaaaattattgaacttaagaaaaagaccgggaaagaagttaccagtattcagtttaccgcacgggaaaaaatgacgggtcttgaaagctatgatgtcaagattaatttaatctgatgtattcaataataaaatttatccataaacctcgtttttacggggttttgttatatttgaatggttccgaatatctaaatcacaattgttgatggtttttattaaaccaatgcagtccggctcaggagtgagagaagccggacgttatggtttagcgtggtaagatctgtgtagttttctggatgctttcagtaaatagtaatgaattatcaaaggtatagtaatatcttttttgttcgtggatatttgtaacccaccgaaaaactcctgctttagcaaggtttcttctgtattcctgaaatgtgatctctctggatttcagcttattagaggtcgtttctataagatgcctatcctttgaaaatttgacagacacaatgttttttaggccctttaataacactgtattatcattttttaatacaatatgaacattctctgtggctaaatagtaaatgtaatgtgagacattgtgacgttttagctcagaataaaaccattgatagtttaaatcgtttcgaactttatcaaatatttgtttaaaaatgactacctgatccatagataaaccttccatgtgatatgagggggcgtagtctgcacgattatctaaattgcttcaatctggtctgacctgttttctgagcaattcagtaatgtcactcttttctttgtttgcttcaggagaaactcttttttctgagcacagtctccggcggcaggcttcaatgacccaggctgagaaattcccggaccctttttgatcaagagcgatgttaatttgttcaatcatttgtttaggaaagcggatgttgcgggttgttgttctgcgggttctgttcttcgttgacatgaggttgtcccgtattcagtgtcgctgatttgtattgtctgaagttgtttttacgttaagttgatgcagatcaattaatacgatacctgcgtcataattgattatttgacgtggtttgatggcgtagatgcacgttgtgacatgtagatgataattattatcatttttcgggtcctttccggcgatccgacaggttacggggcggcgacctcgcgggttttcgctatttatgaaaattttccggtttaaggcgtttccgttcttcttcgtcgtaacttaatgtttttatttaaaataccccctgaaaagaaaggaaacgacaggtgctgaaagcgagctttttggcctctgtcgtttcctttctctgtttttgtccgtggaatgaacaatggaagtcaacaaaaagcagctggctgacattttcggtgcgagtatccgtaccattcagaactggcaggaacagggaatgcccgttctgcgaggcggtggcaagggtaatgaggtgctttatgactctgccgccgttataaaatggtatgccgaaagggatgctgaaattgagaacgaaaagctgcgccgggaggttgaagaactgcgccaggccagcgaggcagatctccagccagggactattgcgtacgaacgccatcgacttacgcgtgcgcaggccgacgcacaggaactgaagaatgccagagactcagctgaagtggtggaaaccgcattctgtactttcgtgctgtcgcggatcgcaggtgaaattgccagtattctcgacgggatccccctgtcggtgcagcggcgttttccggaactggaaaaccgacatgttgatttcctgaaacgggatatcatcaaagccatgaacaaagcagccgcgctggatgaactgataccggggttgctgagtgaatatatcgaacagtcaggttaacaggctgcggcattttgtccgcgccgggcttcgctcactgttcaggccggagccacagaccgccgttgaatgggcggatgccaattactatctcccgaaagaatccgcataccaggaagggcgctgggaaacactgccctttcagcgggccatcatgaatgcgatgggcagcgactacatccgtgaggtgaatgtggtgaagtctgcccgtgtcggttattccaaaatgctgttgggtgtttatgcctacttcatagagcataagcagcgcaacacccttatctggttgccgacggatggtgatgccgagaactttatgaaaacccacgttgagccgactattcgtgatattccgtcgctgctggcgctggccccgtggtatggcaaaaagcaccgggataacacgctcaccatgaagcgtttcactaatgggcgtggcttctggtgcctgggcggtaaagcggcaaaaaactaccgtgaaaagtcggtggatgtggcgggttatgatgaacttgctgcttttgatgatgatattgaacaggaaggctctccgacgttcctgggtgacaagcgtattgaaggctcggtctggccaaagtccatccgtggctccacgcccaaagtgagaggcacctgtcagattgagcgtgcagccaatgaatccccgcattttatgcgttttcatgttgcctgcccgcactgcgggaaggagcagtaccttaaatttggcgacaaagagacgccgtttggcctcaaatggatgccggatgatccctccagcgtgttttatctctgtgagcataatgcctgcgtcatccgtcagcaggagctggactttactgatgcccgttatatctgcgaaaagaccgggatctggacccgtgatggcattctctggttttcgtcatccggtgaagagattgaaccgcctgacagtgtgacctttcacatctggacggcgtacagcccgttcaccacctgggtgcagattgtcaaagactggatgaagacgaaaggggatacgggaaaacgtaaaaccttcgtgaacaccacgctcggtgagacgtgggaagcgaaaatcggcgaacgtccggatgctgaagtgatggcagagcggaaagagtattattcagcgcccgttcctgatcgtgtggcttacctgaccgccggtatcgactcccagctggaccgctacgaaatgcgcgtatggggatgggggccgggtgaggaaagctggctgattgaccggcagattattatgggccgccacgacgatgaacagacgctgctgcgtgtggatgaggccatcaataaaacctatacccgccggaatggtgcagaaatgtcggtatcccgtatctgctgggatactggcgggattgacccgaccattgtgtatgaacgctcgaaaaaacatgggctgttccgggtgatccccattaaaggggcatccgtctacggaaagccggtggccagcatgccacgtaagcgaaacaaaaacggggtttaccttaccgaaattggtacggataccgcgaaagagcagatttataaccgcttcacactgacgccggaaggggatgaaccgcttcccggtgccgttcacttcccgaataacccggatatttttgatctgaccgaagcgcagcagctgactgctgaagagcaggtcgaaaaatgggtggatggcaggaaaaaaatactgtgggacagcaaaaagcgacgcaatgaggcgctcgactgcttcgtttatgcgctggcggcgctgcgcatcagtatttcccgctggcagctggatctcagtgcactgctggcgagcctgcaggaagaggatggtgcagcaaccaacaagaaaacactggcagattacgcccgtgccttatccggagaggatgaatgacgcgacaggaagaacttgccgctgcccgtgcggcactgcatgacctgatgacaggaaaacgggtggcaacggtacagaaagacggacggagagtggagtttacggccacttccgtgtctgacctgaaaaaatacattgcggagctggaagtgcagaccggcatgacacagcgacgcaggggacctgcaggattttatgtatgaaaacgtccaccattcccacccttctggggccggacggcatgacatcgctgcgtgaatatgccggttatcacggcggtggcagcggatttggtgggcagttgcgggcgtggaacccacctagtgaaagtgtggatgcagccctgctgcccaactttacccgtggcaatgcccgcgcagacgatctggtacgcaataacggctatgctgccaacgccatccagctgcatcaggatcatatcgtcgggtcttttttccggctcagtcatcgcccaagctggcgctatctgggcatcggggaggaagacgcccgtgccttttcccgcgaggttgaagcggcatggaaagagtttgccgaggatgactgctgctgcattgacgttgagcgaaaacgcacgtttaccatgatgattcgggaaggtgtggccatgcacgcctttaacggtgaactgttcgttcaggccacctgggataccagtccgtcgcggcttttccggacacagttccggatggtaagcccgaagcgcatcagcaacccgaacaataccggcgacagccggaactgccgtgccggtgtgcagattaatgacagcggtgcggcgctgggatattacgtcagcgaggacggctatcctggctggatgccgcagaaatggacatggataccccgtgagttacccggcgggcgcgcctcgttcattcacgtttttgaacccgtggaggacgggcagacccgcggtgcaaatgtgttttacagcgtgatggagcagatgaagatgctcgacacgctgcagaacacgcagctgcagagcgctattgtgaaggcgatgtatgccgccaccattgagagtgagctggatacgcagtcagcgatggattttattctgggcgcgaacagtaaggagcagcgggacaagctgaccggctggattggtgaaattgccgcgtattacgccgcagcaccggtccgtctgggaggcgcaaaagtgccgcacctgatgccgggggactcactgaacctgcagacggctcaggacacggataacggctactccgtgtttgagcagtcactgttgcggtatatcgctgccgggctgggtgtctcgtatgagcagctttcccggaattacgcccagatgagctactccacggcacgggccagtgcgaacgagtcgtgggcgtactttatggggcggcgaaaattcgtcgcatcccgtcaggcgagccagatgtttctgtgctggctggaagaggccatcgctcgccgcgtggtgacgttaccttcaaaagcgcgcttcagttttcaggaagcccgaagtgcctgggggaactgcgactggataggctccggtcgtatggccatcgatggtctgaaagaagtacaggaagcggtgatgctgatagaagccggactgagtacctacgagaaagagtgcgcaaaacgcggtgacgactatcaggaaatttttgcccagcaggtccgtgaaacgatggagcgccgtgcagccggtcttaaaccgcccgcctgggcggctgcggcatttgaatccgggctgcgacaatcaacagaggaggagaagagtgacagcagagctgcgtaatctcccgcatattgccagcatggcttttaatgagccgctgatgcttgaacccgcctatgcgcgggttttcttttgtgcgcttgcaggccagcttgggatcagtcgcctgacggatgcggtgtccggcgacagcctgactgccggagaggcacccgcggcgctggcgttatccggtgatgatgacggaccacgacaggcccgcagttatcaggtcatgaacggcatcgccgtgctgccggtgtccggtacgctggtcagccggacgcgggcgctgcagccgtattcgggaatgaccggttacaacggcattatcgcccgtctgcaacaggctgccagcgatccgatggtggacggcattctgctcgatatggacacaccgggcgggatggtggcgggagcatttgactgtgctgacatcatcgcccgtgtgcgagacataaaaccggtatgggcgctggccaacgacatgaactgcagtgcaggtcagctgcttgccagcgccgcctcccggcgtctggtcacgcagaccgcccggacaggctccatcggcgtcatgatggctcacagtaattacggtgctgcgctggagaaacagggcgtggaaatcacgctgatttacagcggcagccataaggtggatggcaacccctacagccatcttccggatgacgtccgggagacactgcagtcccggatggatgcaacccgccggatgtttgcgcagaaggtgtcggcatataccggcctgtccgtgcaggctgtgctggataccgaggctgcagtgtacagcggtcaggaggccattgatgccggactggctgatgaacttgtcaacagcaccgatgcgatcaccgttatgcgtgatgcactggatgcacgtaaatcccgtctctcaggagggcgaatgaccaaagagactcaatcaacaactgtttcagccactgcttcgcaggctgacgttactgacgtggtgccagcgacggagggcgaaaacgccagcgcggcgcagccggacgtgaacgcgcagatcaccgctgcggttgcggcagaaaacagccgcattatggggatcctcaactgtgaggaggctcacggacgcgaagaacaggcccgcgtgctggcagaaacccccggtatgaccgtggaaacggcccgccgcattctggccgcagcaccacagagtgcacaggcgcgcagtgacactgcgctggatcgtctgatgcagggggcaccggcaccgctggttgcaggtaacccggcatctgatgccgttaacgatttgctgaacacaccagtgtaagggatgtttatgacgagcaaagaaacctttacccattaccagccgcagggcaacagtgacccggctcataccgcaaccgcgcccggcggattgagtgcgaaagcgcctgcaatgaccccgctgatgctggacacctccacccgtaagctggttgcgtgggatggcaccaccgacggtgctgccgttggcattcttgcagttgctgctgaccagaccagcaccacactgacgttctacaagtccggcacgttccgttatgaggatgtgctctggccggaggctgccagcgacgagacgaaaaaacggaccgcgtttgccggaacggcaatcagcatcgtttaactttacccttcatcactaaaggccgcctgtgcggctttttttacgggatttttttatgtcgatgtacacaaccgcccagctgctggcggcaaatgagcagaaatttaagtttgatccgctgtttctgcgtctctttttccgtgagagctatcccttcaccacggagaaagtctatctctcacaaattccgggactggtaaacatggcgctgtacgtttcgccgattgtttccggtgaggttatccgctcccgtggcggctccacctctgaatttacaccgggatatgtcaagccgaagcacttagcatggctttctgaggctttcgtgtagttgctggtttttacacttaatcttttgataataaagaataagtttatctggcgctttcactgaattttcctcgttatctgtgtgttgcaatcatctctgtattgcagcttgtattgctttttggggctaaaaatggctggcgagaacaaactgagcgacaaagcgcttaaaggatatctggggaaacccagagaaaagcagatcaccattgctgatggaaaggggctttctattcgtgtgagtactaaaggggctgtgagctttgttttcttctacaggttagcaggtggccgggctgctccggtctggctaacgttgggtaaatatcctgatatgtcactcaaacaggcaagggaaaagcgcgacgagtgccgtggttggttggctgacaaacgtgatccgcgtatccagattaagattcaggctgaagaacgcttaaagccggtcacagtggaggatgcactaaattactggtatgaaaattactgtaaggtgcgtcgtaaaactcatgctgtaacgcttggcagatttcgaaagcatatctttccctatatcggtcatttgcccgtaaatgacactcacctatatgaatggctggactgttttgaccgaattaaacgtaatgcaccagttatggcggcgtatgttttttctgacactaaattagctcttcgtttttgtcgggtacgccagtacgcgacgtgtgatgctttaaaggatttgcgcatgagtgatgtggggcagattgcaggtaagcgggatcgggttctggatgaagccgaactcggccagctctggaaggcaatttttgtcgagcctgatttaaaactaatgtctgaatacacgcgaaaaatgtttgtgctttgtacagtatttggatgtcgaatgagtgaagcccgattatcagaatggagcgaatgggatctcgaaagttgggtttggactgtaccaaaagatcactcaaaaactggtgttgaaatcgtcagaccagtacctgaaattctacgacagtgggtaacggatgttcacgaagagacaaaacatactggttatgtgctgggaagtctgcgaattagagaaagcgtaagcaagattggggggaaaatcggtaaacgtttgggccatgaaaaacaatggtcactacacgaccttagaagaacgctatctactcatctaagtgatctcggtgttgaattttatgtagtagaacaactgttaggccatgcgctacctggcgtggcaggtgtttacaatcggagtaagtttatggctaaaaaactggatgctctggaactctggactacatatctcaatagcatcgcaggtgctgattcaaaagtgacaatcctcaaacaaaaggctggttaacatgaaaaaaatggcaattgttgataaaaagggtctggagtacattcctaacattgatcgtatgatccgtgagaaagaatgtcgggagctaaccactcttgcgaacagcacacgctggaagctggagaaggaaggaaaatttcctaagcggatcaagattggcgctactgcggtagcttaccgtctctccgaagttcaggcatggattaagggagaatggagtaattaaataataaggtatttcgatatgacaatgtgtgttatttggaagtcagttgatggaactatttatgccgccacagattctcgactgagctttgaagaaaaaaagttagatcgttgcgttaaaatatcccgaatcacatgtcttttacatgagcctagtgatgcagtagatacaagtaagatacttgttgataagcgtgagattgctacattattctgtggaggctttacaaatgcctatatcatcaaggagagccttactgagattttaaataaaatagttctcatgagggaatactccggcgtgcccttttcggaaattatagatatagcgttttccatttatgaagatacatcaagagatatgtttgcatcattaatggaccaacgatttggatgtgttttttacatgataagttactgccctgtatataaggaaatgcaagcatttaaatttgaattcaaaataaatgaaaacggtattaactattataaatctaaactttttgaagatcgtaactatgaggttaatggaagtggggtgaggtacttggaacaaaatcatcgtattgaagatctagttaaagaagcttatcagaagaataaatacacaccacttctagatatacttgagtccgtaattaatgatgacgactgtgactctgttggaggtgcaatgcaatacatttcatgtaataaagatagactaaaattgtgttgtcatatgttatttgaagaaaataatcataagtatatgaaagctggggtggacttaaatgaactcaatgagaagtttataccttctggtttgttttttgagacagatgcaatcatcaaaagataaacgataaccgactttgattgtgataattttattgagctggccccctgaaataccagacagtagatgtatcttaaaataagagataggcttggatatatgtctaacactagttctaattttgagatggctggcgttttgttaggaaaagaggtgcgtaaa

SEQ ID NO: 101 - DNA, 11311 bp, Escherichia coli
  source 1..11311: mol_type = genomic DNA
atatcgagttcgcacatcttgttgtctgattattgatttttcgcgaaaccatttgatcatatgacaagatgtgtatccaccttaacttaatgatttttaccaaaatcattaggggattcatcagtgccagatatcctttggggtgcaccagaactaccgttttatatctatataactgaaacgtccctcgccatccttcatattttgatgtagtaacaccattcactttcatctaccccccgttttattaacatatagtaaaaatcacctcgccgcattttattcttttgaagtaaaatcatttaccagttcacttaaagctctcttttgttcatcatcatacagagattgaatccggaatttaatctcttctgcaaccagtcttgcatcgggctcataaaatatttttgttattcgctgtttctgatgttcaggctggtcttccatatttcgtaaaaccagatgaaataatatatcataaagtgcgcaatgccatgaataaccatcattggttaaaataagctcccaaacccgctcctgctcggcaataagctgcagaacaaaggactcaacctgttctgtttgttcgggggcaacacggtatagcggagcaatcacagcaaaagatagttcatttaaccaggattccgcttccttctcgctcctgaacggtggacagttttgtattcttcgttcgtattcacgggtaatctgctccagaatatcctccggcggtgtcagccacttattcctgagcaatacactggttgatggatgacagctggctatttcagcaataatttcacgtaatgtctccgggctgaacttcttcagctgattgtagtgctcccgggtaaaaccatgttcatcgcataaaagttgccatgtcattgatatactgtttgccattccttgcttcatcattaatacctgttacctgaatatcaacagaccggtgtaccttttctgaatacctccccggacggagtggcaatccccattcgcctcagcgtggcatctgcagctttcgccacctcgctgatatccagcgtttcaggtagcggcggggacgatatctgcgccagacaataattccggcgcaacaacaaccactcccgttgtgcttctgtacattcaacatttcccataacaaaaagccagcggtcagaagctctgcgccagcaaccagcagcctccagtttctgcgcaaccatgtcttccacaacttccggggtactctttttcctgctcaaaacattaactcactgaaataatatacatatctgacggtctcagcgaaccgtccatgccgggctgaaatcctcttcctgaaacagctccgtcagcccgctaatctgtttcaatctgagaacttcatcctggtccatacccagctccgtaccaatgcgttcattcgtccagcccaggcgcgacaggtccctgacaatatcagacattgaggttatctgatgtttgcccctggcccggttatgtcggatggtcgcagcaatacgtgaggcctgtccctttctctccggattaatacagaccaccggcagccagcccttcagacgttttcccgtacctgcttccctgcccagcacctggcgatgaaaaccatccaccaccaggtaatggttcttttcctcagacaccaccaccggttgtgtgaaaccatctttctccagtgactgcttcagcagtttcttctcacccggcgccatgacattaggattgtaatcattggccaccacctcatctgcttttacccacagcacacagtccactggctcatgtgcaaaaggactgacttcatgaagcactctgcgcaggtgattaagggcctgtatggtctcttcttctggtcgttcctggctgaagtactgacgaatcatgttgccaattatctccggtgtcacagaatcccccattccttcctcctttctttcatacgctgcagataacgttcatagtgccggggtttgttcggactgaaggagagggtccggtaccagaaatcattctttataagtgtcttacagatacgccgccaggacggaatatcccggctccccaggtcattctcctgttcatccgggatgtcatccgggaagccccgcgtctgataccagcgcaggtagacagcaattttattacggtaatgttctgccgttctttccggcatcacatccagcaggaacatcgcatagctgcgccaggtatgatgggctggttttgatatacgtttacgcagggcaaaataggcaccgctttcattggcataaagcgccccgctggcagcgcctgacacccgctcacacatcctggcccaggtttccggctccagaacatggtaaagccacagccccttacgttgttcaggaccaaaaggttcacagacacgcatgttgcgtaacggcacgtcggcacggtacatcaggtcatacagaggattgtaaatggcacaagctctggcgttatatatccagatatcgcgggctttccagtcatacaacggatacatggtgtaataaaacccttcaggcgatgccgtggtccagggcttatcatcggcatatctcagtttgcgctgagacaccagccccataaagcgattgagggattcatccgcacgaacaccggtcagcactgccactccacaccggttaccggcaaaccaggaagaaaatgccggaacaaattcttcaaacgtcatggcataccggaaaaagggaaaatatgtcatatccgtaatggcctcttccggtggctggcgaacccaggtcactcctggctcccagcatatccactccggctgaaactgcgagacgccgtttaccgtggtcaggggaagtgccacccagtaaaaggtttccgtcacatcatggtacatttcccgcatcttctgaatatgttcaatggtgcaccgatactgggcctcccagtcaatgaacagaacagagaaatgacgttttctcctgcgggccacctctgccacaagatggaaaagcacggtggaatcctttccacctgaaaaagacagacataccgacggaaatgtttcaaaaatccactcaatgcgggcgattgcagcacgcaaaacattttctccggtaaggattttttcggttaaaagcgtatcactcattttcctggctttatgtcgaataattctgtttatacattcaggcaaacttcattaataactcaccgctttggggataaataataacaacaaaaatcttcagatattaacctggttgttggatttgttatcacatcctttatccacctgcttcttactggtaacacacctggaaaatccatgcattttcaacatatactatcctttcaacttgtaaataagaaaatatgatgcagatggtgaacaattcaaatatcattttgcaggaagtattcactgtaatagaattaccccctgataaagtttattcactaaggaattattcaacagaaacattccctgttagctttgagcaatagcacttatttttatatgtatcaggaatacgtacgttgatgtaaccaaaacaaagaagcctgtgtccatggggttcgtacaattgtgtgtggcacatgaccaaatcaggtttgagacctcccgctgcaatattttttattcagattttagcctgtcaggcctgacagaaacgctcccaacttcccttctatatcactgtctatagtacgtaatcttagcaatggcaggccgcatttcttcagtatactgtttttaagttcatcacgttcagcctgaacactggtcagatgataacctccatccacttcaataacccctaatggagtcttcccgaccttatagtaaacaacaaagtcacaactggcccggttacgcatgaataactgttcacggtgtgtaaaatccccccgctccagcgacaccaactgattcagcgctatttgtgaatgaaacatcatactccgataactatcctgcgacaggatatcccgcaacaggcaggccacaatctgttctgacttaaagtgtgaatcatttgaattcaatctactattcagtcgttccagtgatttgtcatactcactgtacagcaaatcaaatgctgatatgaccgggctctcgaaaatctctccgtcatcagcgtagtatttgatgtaacgaatcagcgccgcaatatgtccagcgtggcgttcaaatacatcattaccagtcaccagcgtaaatttatttcgggcccttgaaacagcgacattcaccagttcaggattatcaacaaacgcgatgttccgactgtgctggctgctgcgcttcttatccagcacagtggaaaacacaatttcatcgcactcccgtccctgaaatttatgcaccgtcgatttcacaaaatcagcaggcagcactttttcagccagattaacctgtgcattatatggggcaatgtatcccctgctactttcttcatcccagtaatgaccttccagagattcaagctccctgagatttgaaaaattacgggtatggtttccttttgccgtgatgaccagagataatgaggcttcaccggaatcaaccgttaacggtatcagagcattatcataaaactgcttattacaaaattgaatgattttaggatgacaacgataatgctctttaagaagggttactggcaccatgttcctgaacaacatacaaaccgaatcaagtagactatatttctcacaattatagtattctgccggtggagatgggctgttcgggagtaatacaggaacatgtggaagttgcttacgatcccctacaacgattacattacgggcacatcccagtcccagaatgcccggaacaatatcctgctgcgaggcttcatcaataataacataatcaagaagggcccccttgccgatagagttaataatcgaatgcgtactgctaccaataatcggaaaacgctttataaaacggtcaaattcatccctgtatgtctctgccgagaatgaacttcttgttgaaacatttcttcgcagatgttgctttaaataaagcatagaccatgatgtcaggcgccccagtaaaattttaaaatcagattttttaaatacttcctcatattcattcagagaaatttgtttttcccggatatttttttcataataagaaagctgaagagaagtaaatagcgccagccttctctccggaatcatcaatggtttgactttcagtatcatgaagtttaacaacaaatcaattctgtttctgaatccaatccgcctgtcagaaaggtaatgaatataagccatcaggtcggttgttttttgtgaggaaaatcggtatttgtgagaaaaaagctcctccggtcgaagattctgactctgccattgctgcaggtatttatactcaatattcagctcattaatttctgcttttaacgaagcgacctggttaatggcattcaggtgttttttcacttgttgaagtacatcatcaatcgcatttgcagacggtgagtcaggtaagacttcctcagaacgcgaaatcgacgttgaaaaaaactgttgcctgttctccgtactccccagtcgtgccatcacatatcccagttgctgtttgtccatcttttcataaacattactgacagctgagttattattggacaaaattgccactgttttattctgaattaatatattagcaacaatattgagtatagtctgtgttttacctgttccaggtggtccttcaataactgaaatctgtgaggaaaatgcccgttcgacagccagcaactgactttcattaagaccaaacggaaaaatcaaaccccatggcgaatcacgttttttactctgtcctgaacagtatgcatgcaaggcggtatccggatgaggaactattttctttatctgcctaaggatattctcatcgatatttctgttattaccacgggcataaaaaatacgttcattagccaccctacacaagtaattaaacacggcatgctctgtaaatgctgaacactgttgaaagtcaaggccggtcgttttcatgatgtagggtcgttcaccctcgcggtaataaacagcagcatatttatcaccatatataataaccagttcagcccgggatgttacagcgttccctttcctttcgaggaaaacatttcgcaaatttacagttggcgttatctgacatacagaaagcggacgagtatattttctcccgctgcgaaaatgacaggtcagcataacctctctgtcgtcatttccagcccacagcgtccagtcggtaattttatgagtcttattttcaccgtcaacacaaatcgtgaccatattcttactcagaaattatcatttaacttacggaaaattgttaaggcactcccgatattagctccggaggattttccacaactccgggactgttaacatatttctgcctgccatatatacattgaatttagtcataacagtcaataccagaattacaggaatgcgatgccgatacgctggttattgaatactggtagcccctgagcactaattcatcacgatactctgtatttactgttttcactgctttttacaaccattcccccaggtaaaatgctgctcctccggtgatggctgtgtcagaaactgccatcccggaatagccacgctgaccgccagcaatgccgcacagacaccagccacaaacggtttcagaaacgtgggcggggatttctgaagggagggtgactgctccgcctgcactttccccttgcgattatcaaggctcagtgcatccagacgcaccgcgccatttgccgcaagcagcccttcccggttatccacgcttcccggcagactcagcgaaaaatcccctgttcccgtctgaatcagactgcctttacgatttgacaggctttgtgccgatatctgcagtgtgtcggcatttatcgtaccgccattactgctgaactgcccggcagtccgggcggaaagcgtatcggcactcagttgcgcattctgtgtagacagatttccactggttgcattcagctcagtatgttgtccctgtatccggctgttacctaaatccagcccctgctcaatgtcccgtaaatccagcagagaaccttcgtgtgccgggaatgaggaatacaactgaatatagtcatcactgtccggtgtcagacgcacatgtcgcacaacaccgggaataataaccagccggaggataccgctttttaaatcctgcgaaggtgccagaacacgggtggtgacataaccatgatcgaccagacggttctgcaatgtactcatcagcagattaattcctttcgcccccaggcaatgcccgaccgccccgttggcgattttttgtaaaggcagccagtgtggtaacgcatcagcccccttcagttccgtctgtttaatctgaaaacagggcgtttcaacaggaaaattaatcttatgggcaaaagagccaggtgcagaaaggcgaacatcaggggctgaaggcgtcagttgttgctcaagggcttcctgacgctgctgctgaatgataaatgcttcatctccgctacgccggacatccgctgcctgaagagataaaggcgataataaagcagacatcagtgtcagtgacagcaaggacggacagcgccggaataagctttgttcctcagtcctctcgttcctgcaacataattttccagtcaaacgaaaaaccttttattcatgtcataccaacaatcaccagcctcctgacgatacctcccaccatgttttgcgatggcacgctaccgcccttccggtatttacccgcatcaaccggtaccagaatgctgagtaacaaaccagctagaattgacttaattttgatcattatagaataatgatctgaactacagcaacatgacagatttatcgatcgatataacacaaatgaacagttctttattctgacaaatatcgcaaaaacagcacattacaaaatttataaccataattactggaaaagtgcagaaaattattccactgaatgcttttaatacagttggttagcttaaaaaatagcaatttttgatttcagtcattgaaagttgcaatgtttgacgattcaacagcatttaagtgagtttcaggatatgggaaggacatgaaaggaggagcgcaataaaatacacaggaagaaggggaaaatgtttcgtaaaaacagaaaattaacagcgcacatcaggaaacgcagtctcctgattcagtgctaccacatgaaaatttagttaactgttaccgtactaaaatttatgtcagaagatgttccattaccgaaagtcaatcagcgatacaaagacgatcatggtgcgcttgtcaccctgaccagtgttgaggaaacccgggtggtgtttatgcaggacggctatccgcatccctgcatgcgaccgatgtacaactttctgggaaaattcaaacccgaaccccgggaagaaacagaataaaacgaaatccctgccggcaatcacactacctgatagcagcataatccacttattaattctcatccccggagacaagcccagaaaaccactccgggtgttcactgtatgccgtgttcagcgcatccctggaaacgtttatataaaagctgtcctgcaatttgcgggtaacaacttctgccaggcgattccggttatccaccagtccggcataacctctctctgccagccactcattcagttcatgttccagagacagattgataatatcataatcggaccttgccattcccgtttccttagcacatgttttcaggcacggggataaagtataaagaatgtcatactgctgctgccagagcaatattccccctgatggttgtatcagagatggtatgccggtactttgcgggttgttcccgtcaggttatcgtgcacctccacggtcgtggtcaccaccggcattccggcctttctcagcctcagaacatcagccgcaatacgctgactgccaaaccagaacaggccgtccagtgcagtcaccagtaaacccgcctccagtgcatacttcagccgttcacggggcgctttcacttcccgggcaacctgctgatatggcaatgatgtgttttcattcccaaccacgcgacgaatacggtgagacagatgataccggtatgtatccggcacaccagaaaggctggccttcaggctgtacacgcagccaaaccgtttatcgttaaacaccacatttttctggctgatgccccattcttcacgcagcgcggcaatcaattgcggtgtacgggtaagcagcaagcgaaaaggcagttcaaaactggtgacgtaatccacattcagcagtgcaatacgcaaccgttcttctggcccggcctctgtctgccggcactcctccagaacatcctgccactgccggcgaagacggggggattcgttccgttctgtaaaacagtatttatccgccagatagtcaattcgtgtacgcatactgaaaggaattccgtataaagattcagcagacaaaactttatcagccagtaaaaattaacggaagcattgatattcctcccgacaatcaccggatgattgttgcaataacctgcgacataaaggactgaacagccgtttttaacgccacgtattgccctgatgaaccaggccgggccacccgaaaacatctttccacccggcattgtccgccagcacttatcaccgaccaggtctgttgcagtaaatccaccagttgcgcacattcttcatcagccatgacgccgactcgcggatggcaaatactcgtctggctgagcagcaacagacatcgtatctgtgctccttcatgttgttcccgcaaccagcgtaataccaccggcgctgatgggctgaccgtgtgattatgctccgtaatacgttcgtgtacccgtcggtgaaaggaactacaaaatgtctgaatctgttgaccatagattccttctgccgaatagagcgtgaagtgaaatgccaacagatttggccagtggtccaccgcctgctgaacaaaacgccggatttcccccggctctgaaattaaggcttcggttatttgcacgaaatgttccttttcaacccctgttgaattttgtcaagccggtgcagacacagtaaagcgcgcatcaacacctgaaaggtacgatacaaacacaagttacaaacaataagaacggaaggacaattaatcagtgaggaataataactaaattaaccaaaagaatgttactgacaatactaccaatacttaaatagcaatatattaattaatgtaagaacagatgcccggtaggacatatacacaatacatccacaaacacactcttttcattaaatcaatcacctgattaaaccatgaaagtgtgatgtaagtcaaaattactgatactatcaattgataatgattatctctatcattatcgtgaaattcgagaatgaaaggagaagtagtcattataagccttttataaatcgtcatcatcatagtaaagtagaacactttttatatgagttactatatgaaaatatactggacaagaaaacgtattcctgaactttcagcacttccaccttcattaagaaagaaaaattttactgacgcatataatgcagcatcttctcatatcgaatactggataggtgctggcgtctcatttatctcgatgatgattttatccagagtatatgactttcttttacccgcccaagatactttcccgggtgatatcatcagaagtttatgtgttgtgtgtccatccatattaatctggtttcagttttcggtatatgtcatgaggaaatattacagacatattctggtgcgaggaaaagaaaccgaaaccatttcagaaaggttgatacgtgaggctgatacacgagaatatgaactatggcgtccggtccgtcgctttttctccattgttttcctcattgttctattaggttgcattcattcactgataacaactataaaataaaagttatggctgttctgatacaggaaaataaacgttcattctatggttacctcttcctgttatatagaagaattttaaacgacaagtaagggaatataaatgaaaataacaaaaaataaaaatgcaactataaaaaacagtcatcagtcggctgcttttcaatgtttaccttatcattttctggtaatgctgccaacttactgatttagtgtatgatggtgattttaaggtgcttgcgtggcttccatttccatcagatgtccttcctgctccgctactgaaggcgtggtgcgtaacggcaaaagcact

SEQ ID NO: 102 - DNA, 10722 bp, Escherichia coli
  source 1..10722: mol_type = genomic DNA
aaaatatcgagttcgcacatcttgttgtctgattattgatttttcgcgaaaccatttgatcatatgacaagatgtgtatccaccttaacttaatgatttttaccaaaatcattaggggattcatcagagcctggcttcttttgcctgtgttagctttggctttccagtaattcttgtcggaggagcaattttactgacagggatagtgtgtacagttgttttaaatgaaatcgatgctcaatgccatttatcagaaaaattaaaatatgcaattagagatggactaaaacggcaacaggaacttgataaatggaaaagggaaaacatgactccatttatgtatgttcttaacactccacccgtgatatgaggattaaccatgcgtttacatgttaaattaaaagagtttctttcgatgttttttatggccatattatttttccctgcattcaatgcttctttgttttttaccggagttaaacctctatattcaataataaaatgctccacggaaatattttatgattggagaatgttgattctgtgctttggtttcatgtcgttttcctttttaaatgttcatgtaattttacttacgataataaaatcattcttaatcaaaaaaacgaaggtagtcaatttcgccacagacataacaatacagctaactcttatatttttactaatagctatcgtaatagcacctttaatagctccttttgtcacaggatatgtcaatgctaattatcacccctgcggtaataatacggggattttcccaggagcaatctatattaaaaatggcatgaaatgtaataatgaatatatttctcgcaaggaagattcagcagttaaataattaaatattctaaaacaaacagtttttaactccggattccatgtcctttcttgcactgtctttgtcaagaaaaatttcttatgcaaagaattttgtattattgccgccagaaattcctggcggcagatataatttattattgatagcggttaaccaaatcttttaccatcgctttataggtcttttgcttaagttgcatgatttgctgctctgtcatatcagtcgtactggcttcattcttgtcgggcaatggtggaagcactttatattcataattcaccggcgaccaggtagcccactcacctgttgccacatccaccagcgtgaaacgtaccaggtagcgcagggagatagcgtcggtgagtttttcatttttatagtcggaccatactgttgatttcagcgcagagtcatattttcctgtctgcaatgtatcctggtaaacaataatcgctttctgatatccttttgcagccacaaaacgcagtgcctgcatccagttcatattctcagcactggcaacatcctcgttctcatttttatctttgtttttgttacaagtcagaggcttttgcctgtccgggataccagagaatgtggaaacagtataatattttcgcatctcctcctgcataatggtttccggtgcgcggttgccggattgaacaagtattacaggagaattaaggggaacgcggaactcatctccatcaagcgcagcttgaatatcctcttcggatacggccagagtggtttcattaccgaataaatctttgtctgtcagttgctggggagtgtttttattaatattactttgtgtgacttgagcttttttcttcttttcatcaatagaagattcagaggcacatcctgcaagcagcgagaataacacacatatgcaacaaagcttttttgaattcataattggacactccctcgcctgtcataatcatggtaatgtttagctaacgatttttaattatatactccacttgaatcagaacaaacaaaaataacagtatatataaattcattaaatcaatagaaaaatgaaaatcataacattcaaatatatttaaattgaatgattcgatagtatgattaaatattaatgatatggtctaccatatgtgattaacacatttacagcataacaaaaccatagaccgaagaaatagcgggatttaaatgcaaaaaaaccgcaaaattaaaaatcttgcggttctctgaactcattttcatgagtgaatttggcggaacggacgggactcgaacccgcgaccccctgcgtgacaggcaggtattctaaccgactgaactaccgctccgcgttgtgttccgttgggaacgaggcgaatattacggattgcctcacccttcgtcaacggtttttctcatcttttgaatcgtttgctgcaaaaatcgcccaagccgctattttcagcgccttttacaggtatttatgcccgccagaggcagcttccgcccttcttctccaccagatcaagacgggcttcatgagctgcaagctcttcatctgtcgcaaaaacaacgcgtaacttacttgcctgacgtacaatgcgctgaattgttgcttcaccttgttgctgctgtgtctctccttccatcgcaaaagccatcgacgtttgaccaccggtcatcgccagataaacttccgcaaggatctgtgcatcgagtaatgccccgtgtagcgttcgtttactgttatctatttcgtagcgggcacataacgcatcgaggctgttgcgcttaccaggaaacattttcctcgccaccgcaaggctatcggtgaccttacagaaggtattggtcttcggaatatcgcgcttaagcaacgaaaactcgtagtccataaagccgatatcgaacgctgcgttatggatcaccaactccgcgccgcggatatagtccatgaactcatcggctacttcggcaaacgtgggcttatcgagcaaaaattcatcggcaataccatgtacgccaaaggcttccggatccaccagccgatcgggtttgagataaacatggaagttattgcccgtcaggcgacggttcaccacttcaacggcaccaatctcaatgatcttgtggccttcatagtgcgcaccaatctggttcataccggtggtttcggtatcgagaacgatctggcgtgtaattgcagtgctcatagcggtcatttatgtcagacttgtcgttttacagttcgattcaattacaggaagtctaccagagatgcttaaacaggtagaaattttcaccgatggttcgtgtctgggtaatcctggacctgggggttacggcgctattttacgctatcgcggacgcgagaaaacctttagcgcaggctacacccgcaccaccaacaaccgtatggagttgatggccgctattgtcgcgctggaggcgttaaaagaacattgcgaagtcattttgagtaccgacagccagtatgtccgccaaggtatcacccagtggatccataactggaaaaaacgtggctggaaaacagcagacaaaaaaccagtaaaaaatgtcgatctctggcaacgtcttgatgctgcattggggcagcatcaaatcaaatgggaatgggttaaaggccatgccggacacccggaaaacgaacgctgtgatgaactggcccgtgctgcggcaatgaatcccacactggaagatacaggctatcaagtcgaagtttaagcctgtggtttacgatattgccgggtggctccaaccgcctggcgaattcgtggcttgtttttactctgtttcatcggatttagcgttaaaggaatagtccgtttccgggcaacaataagttgtaagcaaccaagcgcaggaatatgtgcattcaatagttttccaccgtgtttgttccacgggagaacgtggaaacggctggcgtgcagcacttcaaaattcaacaaagagagccagtccagttgccgcatcagagtaaacatccggctgttatagggcgaggtttttcgcaataccggcacaagtttgcgtaatcccattaaactaatgggattgaagccactaatcaccagccagccatcatcaatcaatacccgatcggtttcacgcaataaacgatgcggatcggtgcaccacggcaatgtatgtgccagtagacaaacatcaacggatttatcggcaaaaggaagatgaagtggatccgcctgcacctggacgggcattccttgcgcagaaacattcacttgatgagaaaccgcgcacgcttcgcaattgatttctgcgcttaaattgccaatcttaagcagatgaaaaccatacattttagtgaaccacgggttgagctggcgctccagcgccttgcgataaagctctccccagggcaaatcgccccagcgatcaggagccacgacagtttgagggactcttgccggtttcatcacaaccttccgtttcacactaagaggtaatctatgaatcttaacagtattcccgcctttgatgacaattacatctgggttttgaatgatgaagcaggtcgctgcctgattgtcgatcccggagacgcagagccagtattaaacgccattgccgccaataactggcaaccggaggccatatttctcacccaccatcatcacgatcacgttggcggcgtaaaagaactggtggaaaagtttccgcaaattgtggtgtatggtccacaagagacacaagataagggaacaacacaggtagtcaaagatggcgaaactgccttcgttttggggcatgaatttagtgtaattgccacaccgggtcacactttaggacatatctgttacttcagtaaaccttatctattttgcggcgacacgctgttttctggtgggtgtggtaggttgtttgaagggacagcatcacaaatgtatcaatcacttaataagttaagtgcgttacctgacgatacattggtatgttgtgctcatgaatatacgttatcaaatatgaagtttgctttgagtattcttccgcacgatttgtccataaatgattattatcgtaaagttaaggagttacgggcaaaaaatcaaataacactacccgtaattctgaaaaatgagcggcaaattaatgtttttttaagaacggaagatattgatttaattaatgtaattaatgaagaaacattattgcaacaacctgaagagcgttttgcatggttaaggtcaaagaaagataggttctgataaaactttcttgtcatcggctccgttcgccgttatgatcggtcgtcttttaagcaactattgacacacacatgaaggcaaaagcgatattactcgcctctgtcctgctcgtgggttgccagagtaccggcaacgttcaacagcacgcacagagcctttctgcagctggtcaaggggaagcagcaaagtttacaagtcaggcacgatggatggacgatgggacgtctatcgcgccagatggtgacttgtgggctttcattggcgacgagctaaagatgggaattccggaaaatgaccggattcgcgaacagaaacagaaatatttacgcaataagagctatctccacgatgtaactttacgggcagagccgtatatgtactggatagcagggcaagttaaaaaacgtaacatgcctatggaactggtactactacccatagtggagagcgcttttgatcctcacgcaacgtctggcgccaatgccgcaggcatctggcagatcattccgagcacggggcgcaattatggtttgaaacagacccgcaattatgacgcgcgtcgcgatgttgttgcttcaacaactgccgcgctgaatatgatgcagcgtctgaacaaaatgtttgacggcgactggcttctgaccgtagcggcttataacagcggcgaaggtcgggtcatgaaggcaattaaaacgaacaaagcgcgtgggaaatccacggacttctggtcgttaccgttgccgcaggaaacgaagcagtacgtgcctaaaatgctggcattgagtgatattctcaaaaacagcaagcgttatggcgtacgtctgccaacgaccgatgaaagccgtgctctggcgcgtgtgcacctgagtagcccggttgaaatggcgaaggttgcagatatggcggggatttccgtcagcaagctgaagacattcaacgctggcgtgaaaggctccacgctgggcgcaagtgggccgcagtacgtgatggtgccaaagaagcatgcagatcaactgcgtgaatctctcgcttcaggcgaaattgctgctgtacagtcgacgctggttgccgacaatacgccgcttaacagccgtgtttacaccgtacgctctggcgacacgctttcaagcatcgcttcacgtctcggcgtaagcaccaaagatttgcagcagtggaacaaactgcgcggatctaagctgaagccaggccaaagtttgacgattggtgcaggcagtagcgcacagcggttggcaaacaacagcgatagcattacgtatcgtgtgcgcaaaggcgattcgctttcaagcattgctaaacgccacggcgtgaacatcaaagatgtgatgcgctggaacagcgacactgcgaatctgcaaccaggcgacaagctgacgttgtttgtgaaaaacaacaacatgccagattcctgacaaaccagataataaaaaggcaccgattcccccggtgccttttttatttatgccgctttatgtgcttctaccatgatgatatcactggtgaaagagccatcagtctgcaaggaaaaatacgttctcacctctgtcgatgcgctctgttggtaaatgcgaatagcgtctactaacgcttctggcgtacgcattctcacgacccatgaagaaaattccagcggtaacttatctgtaattaaattatcaactatcagattggcttcattgattaacgtcaaccactcaccgctggcgtagtttcgtacgtgagaggtatcgcgtaatgcttctaccgtctgtaaccagatgtcgcgcactgggtggcccggagacattacgtccatcacaatcagcctaccgccaggtttcaatatccggttcacttcacgcagtgctgcaccaacatcatgccagtgatgggcagaataacggctgataacaatatcaaatgcgttatcggcaaatggcagactttcggcataaccctggcgggtggtgatatttttcagttgccggacttcggcagcttgtgccacgacatccagcatgtgggcagataagtcatacgccaccaccgtgctcacgttttgcgcagcgacaaagctggcatgccctgctccgcagcccatatcaagtacacttgcaccaggataatcagccagacgcaccgccaggcgctgtaaatctcgtccggatgcatgtacggtactggtcagatattcgcaggcttgagagctaaactgcttttctacgtggtcatggtgggattgtgttgtcattgcgctgtccttttgttgtttgagtataaaaggacagcgccaaacgttggtctgccctgtggcagacctgacataccttatttatcaggcttgccgggactgaattcaacgagtagcggattgtgatcggaagcgcgcgtaaccaatacagaagcttcgctgacgttcagaccacggtagaaaacaaaatcgagcgggcggccaaacgcccgacggcgctgatcatcggtaaaacgcacctggcgcagcgacatttcccgcgcaaagcgatataacgcgttcatccttctacggctccaggcattgaaatctcccgccataatgaccgggccgctgtggtgagctatctgatcaccaataggaagtaactgcttactatagacatccacgcccagactgaagttgacggcgtgtatattaaccaccatcaacaggcgggtgtcaggtaatggatagaccgtcaccagtgccgacttcgccagacgcaaaatgggttctcgttcacgtaacgggcagcaatacactggatgcgccgccgaaagggtcattacaccggaaggatgttgtggcagcacgaaagcgggcacctgatcggcggcaagatagttagcggtcgcaaactgtactaactctggcgttgtctgcgcttcctgcaataacaccagatgtgcatctttgccgtagttctttaataccgacaaccattcagcgcgttgctgtttgtatatgttccacaccaggatccgaatacgctcttcggtacttaacggttctccaggtggtaatgcctggccgatgctcgcaaaagaccccggcggtaagatcctttccgcaggttgtccggcaacatagcgcatggcataggtgttttttcgcacttttgactttgaaacctctattacgtcaacccttccgcactcgggagggttctactgttatagggattttagctcactctttcaacgagcaattgtatattgttatgtaagcaagtgcttacacaggtcagaattttgctcattattgagaacattaaatcggatgacatatcacgcatcctgatggtttaatgacaaataaattcaaaatatctcttctattttgcaacaggagcaaaaatgaaagccacgtcggaagaactcgccatttttgtttcggtcgtagaaagcggcagctttagccgggcagcggaacaattagggcaagcaaactcagcggtaagccgggcagtgaaaaagctggagatgaaacttggcgttagcctgcttaatcggaccacgcgacaacttagcctgacggaagaaggccagcgttattttcgtcgcgtacagtcaattttgcaggagatggcagcggcagaatcagaaattatggagacgcgtaatacaccgcgtggactgttgcgcatcgatgccgcaactccagtggtgctgcactttctgatgccgttgattaagcctttccgtgaacgctatccggaagtcactttatcgctagtctcctccgaaacgattattaatttgatcgaaagaaaagtggatgtcgcgatacgcgctggtacgttaacggattccagcttacgtgccaggccgttatttaacagttatcgaaaaattatcgcctcccccgattatatttcccgctacgggaagccagaaacgatcgacgatttaaagcaacatatttgcctgggattcactgaacccgcttccctcaatacctggccgatagcccgtagcgatggacaattacatgaggtgaagtacggtttgtcatccaatagtggggaaacactgaaacagctttgcctgagtggcaacgggattgcgtgtttgtccgactacatgatcgacaaagaaatcgctcgcggagaattggtggagttaatggcagataaagtgttgccagtggaaatgccattcagtgccgtctattacagcgaccgtgcggtaagtacgcgcatccgggcttttatcgatttccttagcgagcatgtaaaaacagctcccggaggagctgtcagagaggcttaatcccattcaggagccagaccttccgggctaaccaggcggtcgttgcaatccagtgcggcgatcgcttttttatcttcggcatcaagctgtaaattttgtgccttaagattactttccaggtttttacgtttagtagaagaaggaattactgagtaaccttcccccatagcccacgccagaatcacttgtgccggagtcgcattgtgtttagctgcgatacgagcaataacctcatctttcagggccttaccatacgccagcgtcatataggaagtaatatggatgccgtgctgtttagcccaggcaaccactttacggttttgcagataaggagagagttcaatctggttagtagcgatgttttcagcaccaacagcagcaatcgctttttccatcaacgggatcgtgaagttggaaataccgatctcacgcgtcagcccttgttttttggcttccagcagcgcctgcataaactcttcaacagagacttcatcgtttggtgacggccagtggattagcgtcagatcaacataatcggtacgcaatttttgcaggctctctttcagacttgggatcaatttgtctttgctgagattttcaatccagattttagtggtgatgtagagttcatgacgtggcacgccactttctgcaatcgcctgacctactgcggcttcgttatcatagatttgtgcggtatcaattgcgcgataaccaagttcaagcgccgttatcacagatgaaataacaacgtcgtctttcagacggaaagtacctaaaccaaatgcagggatagccataatatgcctcttttaatgctattttcgttaactgaggtgattatgggcttcagactgttgaggaaaaagagcgtaaaatgcagaggatttttgcgattctggcaataatagatatacagacgaaaaaaaacctcgagcgttaactcgaggcttcttaataagtggcggaacggacgggactcgaacccgcgaccccctgcgtgacaggcaggtattctaaccgactgaactaccgctccaccgaattcttttacaaccaccggttttatgaccggcttactgcttaatttgatgcctggcagtttatgaatcacttcgtgattcacccttcgggccgttgcttcgcaacgttcaaaagctttcgcttttgtcctactctcttatcgagtagtgaactgcctcaaaggtcagtgccattcttcgtaatttgatgcctggcagttccctactctcgcatggggagaccccacactaccatcggcgctacggcgtttcacttctgagttcggcatggggtcaggtgggaccaccgcgctaaggccgccaggca

SEQ ID NO: 103 - DNA, 10531 bp, Escherichia coli
  source 1..10531: mol_type = genomic DNA
ggaattctcaggagaaccccgctgacccggcggcgtgtttgccgttgttccgtgtcagtggtggcgcattatagggagttattccggcctgacaagaggaaatttaaaataattttctgaccgcgcattttttcagcaaaagccccgttaatgtgccataaaacaagcaatttgccgtttttgcaaccgtaatcacacttcctggtggcatactaaggaggaataaaaagaaaaaggaagattagtaatgcctttaagcgcacaacagttagctgcacagaaaaacctttcgtatgttctggctgagaagctggcgcaacgcatcttaaaaggtgaatatgaacccggcaccattttgcctggtgagattgagctgggcgagcaatttggagtgagtcgtacagcggtacgcgaagcggtcaaaacgttaacggcaaaagggatggttttaccgcgaccgcgaattggtacccgggtcatgccacaatcaaactggaattttcttgatcaggaattgcttacctggtggatgacagaagagaactttcatcaggtcatcgatcactttctggttatgcgtatctgtctggagccgcaagcttgcctactggctgcaacggttggcaccgcggaacagaaggcgcatctcaatacgttaatggccgaaatggcggcattaaaagagaactttcgccgtgaacgctggatcgaagtcgatatggcctggcatgagcatatctatgaaatgagcgccaatccgtttttgacctcattcgcctcgctattccattcggtttatcacacttacttcacgtcaattaccagcgacacagtgataaagctggatctgcaccaggcgattgtcgatgcgattgtccaaagcgatggcgacgcggcatttaaagcttgtcaggcgctgctacgctcacctgataagtgacaacccgataacaggacattgaatgagcgataaaaagaagcgcagtatggcgggtttgccgtggatcgcggcgatggccttcttcatgcaggcacttgatgccactattctgaataccgccttacccgcaatcgctcatagccttaatcgttctcctctcgcgatgcaatcagccatcatcagttatacgctgacggtggcgatgcttattccggtaagcggatggctagccgatcgcttcggtacgcgtcgcatttttacccttgccgtgagtctgttcacattgggttctctggcctgcgcactttctaattcgctaccacagctggttgtcttccgggttattcaggggataggcggcgcaatgatgatgcctgttgctcggctggccttactgcgcgcttatcctcgtaatgaacttcttccagtattgaattttgtcgccatgccgggtctggtggggccaattttaggccccgttcttggcggcgtgctggtcacctgggcaacctggcactggatatttttaatcaatatccccataggtattgcgggccttctttacgcgcgcaaacatatgcccaatttcaccaccgcacgacgcagattcgatatcactggctttttgctgtttggcctcagccttgttctcttctcaagcggaatagagctattcggggaaaagattgtcgccagctggattgccttgacggtaattgtcaccagcatcgggttactgcttctctatattctccatgcgcgacacacgccaaacccattaatttcattagatttatttaaaacccgcactttctcgatcggtatcgtaggcaatattgcaacccgtctggggaccggttgtgtaccgttccttatgccattgatgttacaggtaggatttggttatcaggcgtttattgccggctgtatgatggcaccgacagcgttaggttccattattgcaaaatcgatggttacccaagtcttacgtcgtctgggctatcgccatacgttagtggggatcacggtgattattgggctaatgatcgctcagttctctttgcaatcaccggcaatggcgatatggatgctgatcttgccgttgtttatattagggatggctatgtcgacgcaatttaccgcgatgaataccatcacacttgccgatctgaccgatgacaacgccagcagcggtaacagtgttctggcggtcacgcagcaactgtcgattagtttaggcgttgctgtaagtgcggccgtccttcgcgtttatgaagggatggaaggcacaacgactgtcgaacaattccactatacgtttatcacgatgggcattattactgttgcttcagcagcaatgttcatgcttctgaaaacaaccgatggtaataatttgatcaaaagacagcgtaaatctaagccgaaccgcgttccatcagaatcggagtaagttgtaatcgttgttgctgaagggtcggctgggttatccgatggatgagtacatcaatcgccagctcccccagttcatctttcggttggtggatagtggttaatggtggcgtcataaagcttgccagttcgatatcgtcatagccaatcaccgcgatatcctgcggaacctgtaactctgcctgatataacgcctggtaaacgccaacagccatagcgtcatttccggtaaagacggcctgaggacgcagcggatgtgataacagttggcgcatggcgtcaaacccgccgttaaattcaaaatcaccagtgacttcatagccatcaggaatgctgagacccgcacgtttcatcgccgcccgataaccttccaaccgcaggcgcgccggagttttatccagcggaccggtaatacaggcgatacgggtatgacctttatcgatcagatattgcgttgctaagtctccgcccagcaacgagttatcctgaataagatcgctgtcgccatcgaacggagcccagtccatcatcacagtaggcactgtcggataacgttgcatgatttcacgcgaaggttgatgcgtttcggtgcacagtaacagcaagccatcaacgcgtttttgcatcagcgtttccagattgcgattcatccgctgttcatcgccttcggtattgcaaaggacgagactataaccgcgttcgaagcagctgcgttcaacgccacgcaccagttctgaatagaaaggattggtactggcagtgatcaacatgccaatggtatgtgtttgattgagtttgaggctacgcgccagggctgatggcgcgtaattgagttctttaatcgccgcttcaactttggcggtaatcgcttcactgacgaagcgatctttattgataacgtgagaaactgttgaggtagaaacgcccgccaggcgggcaacatctttcattgtagccaagcgtcacctctgcctgtctaaaaatgcgtcgatctcttcacgccacggtacggaaggttgtgcgcctttacgtgttacggcaatcgcagcggcagcatgggcaaaccgaatcgcctctggcaatggtttttcttccagcaacgccgtgattaacgcgccgttaaaggtatctccggcagcaatggtatcgacagcctgcacccggaatccaggaacgcgctgaccttcaccattcacgctagcccatacaccacgacttcctaaagtaatcagtacagtacggatacctttttcatgcagtacctgcgccgccttcgctgcatcttcatcattttcaacacgaataccggtgagcttttctgcttccgtttcgtttggcgtaataatgtccaccagcgccagcagttcgtcaggaagttcgcgagccggagccgggttaagcgcaacgatagtcttattttgatgggcgattttcgccgctgccatcacactttcgagtggtgattccagctgcattaataatgctgacgcgttggcaatacgctcacgttgcgcttccaccagcgccggggaaagggcagcattagcgccggcatgaataccgatgacattctcaccttcgccattaacaaaaatcagcgccacacctgttgattcgcctttgatcacgctgaccggagtaatatcaatgttatcagtggcgagctgctggcgaacgctctcaccaatgctgtcatcacccgtacaggcaataaacgcgatattcgcaccgctacgcccagcagccacagcctgattcgcgcctttgccgccaaatgcaacctgatagtggttaccggttacggtttcgcctggagtaggaaaagattgaagattaagaatgtggtcagcattaatgctgccaagaacaacgaggctgcctgcgttttgcatattcgggatgtccataaaatgcgccaccgtgttagggtggcgcgtgccctgcttttctttatattacacgttcatctgtcgatgacgtatttatgtcaccatcaggtcatacaacctgattaaaactactgcttaacaaccagtttcagatcaaccggatacttagcctgaactttctcgcctttcagcactttatctgcggtttcgacgcctttcgcgccaatctgatcgggtagctgagcgatagtcgctgctagtttgccatcattcaccgctttttcgccatccggtgtaccgtcaaatccgacgaccatcacatccgatttaccggcagtttgcagtgcgcgcagcgcgcccagcgccatttcatcattctgcgcgaatacagcctgaacatccggatgagcggtcaacaggttctgcattacgttcaaacctttagtgcgatcaaaatctgctggctggctggcaagaacattaaacttgtgagcagcaacggcctgctggaagccttcgccacgttcacgggctgcggatgtaccagcaatgccttgcagctcgataactttggcaccttcacccgctttcttcgcgatgtaatcaccggcgattttgccacccagtacgttatcagaagcaatgtggctcaccacttcacctttcgttgcctggcggtcaagagtgataaccgggatgttcgcctggttagccatcttcacagcattacctactgcgtcggagtcggtcgggttaatcagcagaattttggtgccgcgaacggttaagtcctgcacgttcgccagctctttcgccgggttgttctgggagtccagcaccaccaggttatagccaagcttatccgcctctttctgcgcgccatctttcagcgatacaaagaacgggttgttaagcgtggagaccaccagcgcgatggtgtcttttgccatcgcattcgcactgacggtggcgcttagcgcaacagcggaaaccagggtagccagttttttcatgttcatattcaagatgtcctgtagtcgttattactgctttttgttgtctaccagcaccgccagcaaaatcaccaccgctttgacgatcatctggtaataggaggaaacacctaacaaattcaatccattattaaggaagccaagaattaatgcgccgatcaacgtcccaacaatgcgaccttttccgcccgccagactcgtaccgcccagaaccaccgcagcaatagcatccagctcatagccagtccccgccgtgggttgtgcggaggagagacgcgccacttcaatgatcccggccagcgatgccagcagaccacaaagagaatagacgatgattttgattttattgacgttgataccagaaagacgcgttgccgcttcgttgccgcccagcgcgtagatgtaacgccccagacgcgtgtgatgcagcatgtaccaggccgcgaggaagacaatccccatgatccagactggcgtcggtacgcccagcggacgaccaataccaaaccagccaaacagatcggcgttctcagtaaagccggtattcactgggctaccgttggtataaaccatggtcacgccgcgcagtaaaagcatcataaccagcgtagcgataaacgcctgaacgcgacctttcgctacaatcaccccggttaccgcaccaattgcggcacctaacgcgagagcggcagcgacagccaccagcgcattgacttcaatgccgacgatagatgcagcaactgcgccggttagcgccaacagagaacctacagacaagtcgatgcccgacgtcaggatcaccagcgtcatcccgaccgccataatggcgttcaccgaggtttgctggagaatattgaataagttattgatggtgaaaaagttcgggcttaacgtcgagacaatcgcgatcagcaccagcagagcgataagcgatttctgctccatcagccacgctttcgtgaaataacggcgaccagagacagtctgggttgtcatttttttactcctgattcacgcgattaagcttgcccacagcggcagccattaacacttcctgggtggcctgctcacgagtaaattccccgctgagatgcccttcatgcatgacgatgatgcgatcgctcatgcctaatacttctggcatctccgatgacaccagaatgatgctcaagccatcggctttgaactggttaatcagttgatagatctcttttttcgcgccgacatctacgccacgggtaggttcatcaaggatcaacactttggggcgtgtcatcagaccgcgggcaatcgccactttttgctgattgccaccggaaagcagaccaattgcctgttccatcgacggtgttttcacattaaacagacgaatgaaatcactcacagcctgctgttcatcggcatgcttcaaactgccgccagcgcggctgaagtagcgcagcgctgtcagcgacatgttctcttttactgacatgcccaacactaaaccgtcacgtttacggtcttcggagatatacacaatgccgcttgccaggccatcctgcggtgaacgggtaacgacttcatgcccatccagggtgacgtaaccgctggtgcgcggtagtgcgccgtagagcactttcatcagttcggtacgacctgcgcccatcaaaccagagacgccaagaatttcgcctttgcgtaaagtaaaagagacatcgttaacgccaggtccgcagagattatcgactttcaggcggatatctcccggcgctttgtccaggtgtggatattgatcttctagcttgcggcccaccatcatctcaatcagcgaatcttcggtcagtgatgccacttcgcgctcagcaataaattgcccgtcacgaaaaacggtaacgtcatcgcaaatctcgaagatttctttcatgcggtgggagatatagacaataccgcggccttgcgatttcagctcgcgtatgacgcggaacagggattcggtttcggtatcggtcagcgcatcggtcggttcatccataatgatgactttcgactcaaagctcagcactttggcgatttcaaccatttgctggtcaccgatggaaagatcgcccaccagcttgtcgcttttaaagcgcaggttaagtttagccagcaatttatccgcttcggcatacatggttttccagtcaattttgccaaagcgattaacaaactcacgaccgaggaaaatgttttcggcaatggtcaactgcgggatcaggttcagttcctgatggataatcccaatcccggcttcctgggaagatttcggcccggtaaatgtcgtttctttccccagccataaaagcgtgccggcatcgcgagcatagataccagtaagcactttcatcatggtggatttacccgcgccgttttcgcccaccagcgccatcacgcggcccggatagacatttaacgctgcgcccgagagggcttttacgcccgggaaggctttatcgatgcctttaagctgaagtaatgcttccatgacggcctcagaacgtcacgccagcacagagaatgatattcgcatacggagaacattctccgctgcgaattaccgcctgactttctgcggtttgttgtttgaattgttcatgcgtggtgtaacgaatttcaatggtatttccctggtgtttttgcagctgctcaaggtgagtgagcaacgtttcgtggagttgcggattatgttgtttgatctcttccgcgataatggcagcctcgacctgcatttcatttgtgacgacgcccagcacctgcataaaagaaggtacaccctgggttaatgccatatcgatacgcgttgtacttttggggatgggtaaaccagcatcacacaccaccagcgtatcggtatgtcccagacgggagatcatcgatgaaatatcagaattaagaacggtgccttttttcatttttttctccatcagcgaaacgtttcgctgacccgcagtttaatcctgactgagttgggaaaaccatcgtgacgttacggaaatgtgatcaacctcgaaacgttttacatggtgattaaccatgaaaacaaaaacgcccccttatggagaaaggaggcgtctggcgttagatttcgacctgagtacccagttcgataaccctgtttggcggaatttcaaattgatctggtgcacgcagcgcattacgttgcagcagcaagtacagcttgccgcgcagacgcaaataccacgggcgtttgccgaggatcaacgactcatgcgacataaagaaggaggtttccatcatccggcaacttaatccttccagaccgcagcggtggaaaacttcttccacgtttggcgtttctcgccaaccataacttgccaccacgcgccagaaagtgggcgacagttgttctatctgtacccgacggacgttatggacatatggcgcgtcttcggtgcgcagagttaacagaatcacccgctcatgcaataccttgttatgtttaaggttatgcatcagcgcaaagggaatgacgttgattgcacgcgacatatacaccgcggtcccgggcacgcgaacaggcggtgatttctccagcgaagcaatcatcgcttccagagagttaccatgttcatgcatccgccgcagcaagcggaaacgctcgctcttccaggtggtcatcacgataaacatcacagtaccgaggctcaatggcaaccagccgccggagagcagtttatcgaggttagcggtgaacaatggaatatcgacacaaaggaaagcaatcaggatcagcgcaacaaaatacttattccagtgccagttctgacgtgccacagtagtcgagagaatagacgtcagcaccatggttccggtcaccgcaatcccgtacgccgccgccaggttgctggagtgctcaaagctgacaatcacaatcacgaccgcgacatagagcatccagttcacaaacggaatatagatttgccctgactccatttcggaggtgtgaataatgcgcatcggcgacaaatatcccagacgtaccgcctgacgcgtcaatgagaagacgccagagatgacagcctgcgaggcgattaccgtcgccagtgcggcgatgatcagcagcgggatcagcgcccagtccggtgccaacaggaagaacgggttcttaatcgcttccgggttctttaacaacagcgctccctgaccgaagtaattaagggtcaaggaaggtaatacgacggtgaaccacgccaggcgaatagggaacttaccaaagtgccccatatcagcatacagcgcctcgacccccgtaatcgacaacaccactgcccctaatgcaataaaagaaaccgttttgtattcaaggaagaaatgcaccgcccacattggattcagcgcatgcagcacttccgggttagcaataatgctacgtaaccccagtcctgccagaatcaaaaaccaggtcagcatgatcggcgcaaacagcttaccgaccatagccgtgccatgtttttgaatcataaataataaagtgagaacgataattgagaggggaactatccaggtatccagctgcggggcgacgatttccagaccttcaatggctgacatcaccgaaatagcgggtgttatgacgacttcaccatagaaaaagctgccgccgattagccccataatcaccagcattgatgtggttcgcgccgacgtattacgcccggcaagcgacatcaacgtcaggatccccccctcaccggcgttatctgcccgcatcacgaaggtgagatatttaatggaaaccacaaagattagcagccagaagatcagcgataaaaagccaaacacggcatcgcgttcaacgccaaaaccaaactggccggacaaacattcacgaagtgtatataacgggctggtaccaatatcgccgtagacaactccaatcgccgcgagggtaatcgcgggcaatgattgcttattatcagtgctcatagactagtctttcgttgaaatatgaaatgtgtgcttagtcccttggcccacaaaaaagcgcacagtatgcacgattaacggcaaaatcgtactcctaaatgcggccacattaacctggctcaaagaaaaataccccccctttgagtaatgccgatcagttaaggatcagttgaccgatccagtggctgtgtaagaatccggaaacgctcactcgtttccggatttttttatgcacattggacaggcccttgatttggtatcccgttacgatt

SEQ ID NO: 104 - DNA, 9878 bp, Escherichia coli
  source 1..9878: mol_type = genomic DNA
ggtgcttttgccgttacgcaccaccccgtcagtagctgaacaggagggacagctgatagaaacagaagccactggagcacctcaaaaacaccatcatacactaaatcagtaagttggcagcatcacctgccctgcgttatgaagtggcggaggagctggggaatcaaatcaataccgagaaacgctttaccgcagaactgcgctcgcaactcggcgtgctccccagctacacccaactgggaatggcggcgttgctgcctcatgaacaactttgttatcaaccgggtaacggtgacattgtttatgctgatgggctgtcgacctcgggtattcctaaccgcgataccattctgaagaactataagggaatggcgataaaatcgaaggaccttctggagttaaaaaatcaggaagggcgagaccttattcgcgattacgaagtggtgtatatctggcataacacgattgatgccactggcgacacggcatccacggaagataaaaccttcgaagcgtgccgcacggcggtgactgaactgaaagatttagtcaccaaagtaatcaaccgtctccacggcactcgcatttttgttacggcggatcacggtttcctgttccagcaacaggcgctttcggttcaggataaaaccactctgcaaattaagccggaaaacactatcaagaaccacaaacgctttattatcggccatcagcttcccgccgatgatttttgctggaaaggtaaagtggcagataccgcaggtgtgagcgacaacagcgagttcctgattccgaaagggatccagcgcttccatttctctggcggcgcgcgttttgttcatggcggtaccatgttgcaggaggtttgcgttccggtattgcagataaaagccctgcaaaaaaccgccgcagaaaaacagccgcagcgccgccaggtggatattgtcgcttaccatcccatgattaagctggtgaacaatatcgataaagtgagcctgttgcagacgcatccagtgggcgaactttatgaaccgcgtatcctgaacatttacattgtcgataacgctaataatgtggtgtcgggcaaagagcgtatcagctttgacagcgataacagcaccatggaaaaacgcgtgcgcgaagttaccctgaagctaattggcgctaacttcaaccgtcgcaatgagtactggttgatactggaagacgcacaaacggaaacggggtatcagaagtacccggtcattatcgatctggcgttccaggatgatttcttctaagtgaggcgatatgcaaacccatcatgatttacctgtttcaggcgtatccgtaggggaaattgcctccgagggttacgatctggacgccctgctgaaccagcattttgctggtcgcgtggtgcgtaaagatctcaccaagcaactcaaggaaggggcaaacgtcccggtgtatgtgctggagtatctgctcggcatgtactgcgcctctgacgatgacgacgtggtcgagcaagggttgcaaaacgttaagcgtattctggctgataactatgtgcgcccggatgaagcagagaaagtgaagtcgctgatccgcgagcgtggttcgtacaaaatcatcgataaagtgtcggtgaaactgaaccagaaaaaagacgtttacgaagcccagctttctaacctcggcatcaaagacgcgctggtgccctcgcagatggttaaagacaacgagaagctactaacgggcggtatctggtgcatgattaccgtcaactatttctttgaagaagggcagaagacttcgcccttctcattgatgacgcttaagcctatccagatgccgaatatggatatggaagaagtgttcgatgcgcgtaaacactttaaccgtgatcagtggatcgatgtgctgctgcgctcagtgggtatggagcccgccaatattgagcaacgcaccaaatggcaccttatcacccgtatgatcccgttcgtggagaacaactataacgtttgcgaactggggccgcgtggcaccggtaaaagccatgtgtataaagagtgttctcctaactccctgttagtatcaggcgggcaaacgacagttgccaacttgttctacaacatggccagtcgccagatcggcctggttggtatgtgggatgtggtagcgttcgacgaagtcgcggggatcactttcaaagataaagacggcgtgcaaatcatgaaagattacatggcgtcaggatctttctctcgcggcagagattcgattgaaggtaaagcgtcgatggttttcgtcggcaacatcaatcaaagcgtagagacactcgttaaaaccagccatttgctggcaccgtttccggctgcgatgattgatactgcctttttcgaccgctttcatgcctatattcccggttgggaaatccccaaaatgcgcccggaattctttaccaaccgttacgggctgattacggattatctcgctgaatatatgcgcgaaatgcgcaaacgcagtttctctgatgcgattgataaattctttaagctgggtaataaccttaaccagcgtgacgtcattgctgttcgacgtaccgtgtcgggattgttaaaactcatgcatcccgatggcgcgtacagcaaagaagatgtgcgagtctgcctgacctatgcgatggaagttcgtcgccgggtgaaagagcaacttaaaaaactgggcggtctggagttcttcgatgtgaactttagctacatcgataacgaaacgctggaagagttttttgtgagcgtaccggaacagggcggcagcgaacttattcctgccggaatgccaaagccgggcgttgtgcatctggtcactcaggcagaaagcggcatgaccgggttgtatcgttttgaaacacagatgactgccggtaatggtaagcatagtgtatcgggtctgggttcaaatacctccgcgaaagaagctatccgcgtcggtttcgattacttcaaaggcaacttaaatcgggtaagcgtggccgcgaaattctccgatcatgaatatcaccttcatgtcgttgaactgcataatactggcccaagcaccgcaaccagtcttgctgcgcttatcgctttatgttcgatattgctggcaaaaccagtacaggaacagatggtggtgttgggcagtatgacccttggtggagtaattaacccggtgcaggatcttgccgccagtttgcagctcgccttcgatagcggcgcaaaacgggttctgttgccgatgtcctcggctatggatattccaacagttccggcagagttatttaccaagtttcaggtgagtttttactcagacccggttgatgcggtttataaggcgctgggagtgaattaacatatatcgagggatggatcacattcctcggtatatttgtcccaggattattcttatttgatataatatcagttctaattaacttactatcaatggaatatttctcggctaaataacaatgaaacttatcgctaacggattaaataaacaattttttagttcatttttaccacctcctgatacagaaattgatggtgttgtcgctgccattgcttatggcgatgataaaacctcgcttttggatcactgcataaaaaaccatcaccggctcgatatttggatgcgatatgatcatactgttccggtatcgcccgcattcttatcaaaacttctcgccaatgttaaaaacaatatattttgtaaactcgtaccagactgcctgcactgcaaaataatttggtggaaaggatatggtgcttatattggctctgctaatttaactgggcgcgcttggtattcgaacattgaagctggtgtattttatgatgaaaatgatctgtataacacaggattaatagaacaacttgaagagtttttcgataacttatctgaccttgactcttgtatcgaacttactaaagagataattcaagaacaacagcagttacaaaaattaaaacttgaacaagagaaaaaagaacaagcaatcataaaaaaacgacttatacccgaatgggctggtgtaagtaactatgataagattaaatcaagtgataaacgcaaagatgctttccgtaaagaatgggagagtacactttcgacaatacgaaatatatccagccagataaacgatttcaggcctgcatggatatcagaagataccccagcattctggcagacagatcagtttttacatgcgtattattataatcaggttcgtaggaatgataagacattcccttatgaagaggattatcagaacaacaggaaaaacccacaagcggcactgatgaatatgctgtcatggtggaaaagtctctctgagccaccttcccatgaagatatcaatcttggtataaatgctaactatattcgtgagcacttagcaaagaataagattaataccttatccgaggaagagttacataaaatattttcgtatacacatgcaacaatggaccatgtgataaaaatgagcgtagatacctttggattaacgagtcgtatatccctagataaagaaaaacgggcgattttgtttactcagtggataatgaaacaaactaataaaaacggtatgacgattgcagaattactgaactatgtactttatgatggaaagcaagagctcatgtgggaaagaatatatctggcaggaaaagatgataactataagtttcagcattacggaatcaactcaatatccgaagttgtcggctgggcgcgtcctgaagtgacaccgcccagaaatgggagaactaataaggcgttaagagctttaggttaccctgttaaaatttatatctaaaaacactatataacttaacttgtaacacctgctttgttaaaacaggtgttacagagaagcaaagatcaaataagatatttatcttcgagatgcttcattttgtgatttattactttaggaggaatggtatataaaccgtatataacaacgaatgcccaaattaaaactaactcggccagccaaataaagcacgtgaccacaaatcaattaacactgccagatacagccagccttcatctgtgcgtaagtaagtgaagtcctccgcccacttctggttcgggccactgacgtaaaaatcatgctctagacacaggcagttcgtgtgcgcggtacctgacagggctgaaattccggcaggcttttgcgctctgctcctgacggcgcaggcttgtagccacggtttttacattgaagtggtattttgagcacgcagttaatcagtcaagggggcaccataacgctgttttaaccatgtaaaagcttcgtggacaacgttatgctacgacagacaccatacattgactttttattcactaaatagtttactttttttattatagttacactctgagtgaatctatggcatcaaaattaaactggctgttgcaaaacacctctccgggaagcctggtgttacaatcgtggctgacccggaacaacatatcaccttctctggcttttaaatacgcgcaaaatggctggttaataaaactgcgggctggcgtttatgcgcgcgcaggacgagaaccagactggagtgatgcgctatggtgcctacaaaaccaacttgaagcgccggtgcatctggccggactgagtagtctctcctggcagggccgttcccattacctacaacttaagcagaaccaatgctggcttagcgttgaaaacaaagcgatattgccaaaatggtttaaagaatttcccgccgttgagtggttgatggtatcggccctgaagctccctgacctggatgaaaaataccgaactgagcttgaggttaaagggaaaagaattaccgccagcacgccagaactggctgcctatgagctgttaagcgcagtccctcaggaaatctcatttgagcacgctgccgagctttttcagggactagtcaatctcaacccacgtaaagtggagaagctgcttacactcagtcagtccgtacaaaccaagcgcctgtatctgttttttgccagtttctatgaacatgcatggttcaaacgcatagataccagcaaaatcaacctgggatcgggcaaccgacaaatcgttgttaatggcaagctgaacacgcaataccagataactgtgcccgaaaattttactaagaagggaataagccatggataaaacctccccctactaccgccaggtcgctctgttggtgcgagcattaccctgggtcgctaacgagtcctgttttgcgctgaaaggcggaacggcgatcaacttattcatccatgattttccccgattgtccgttgatatcgatctggcctggataccgctggaaagcagagaggtcgcgctgcccaacgtgcgggaggcgctcacccgtatcgccgcagaactgaaagcgcaaaccgggatccgtgcagtgctgcaaacccataatcccgatgagatgcgcatcattgtcaccactgacgatgcgcaaattaaaattgaagtctcgccagttgcccgggggacactatatcctccgcaagaacgcgatatcgtcggagccgtggaggaagaatttggctttgccgcgctcccggtggtctcactgcccgatttatacggtggcaagctatgtgctgcgttagatcgccagcaccccagagatttttacgacgtcaaaatgctccttgatacacaaggaattgatcgctcgatattcaatggttttatcgtgtacttgctcagccataaccgcccattatccgaagtgcttaacccacgttggaaggatattactgaaccctttcaaaatgaattcagcggtatgacttttgaggaagtatcactggaagagctaaaagaggtcccggaaagaatgctcagcacgttgaaaacgcatttcactcaacaggatttcgacttcctgatgtcatttaaacgcggcgagccagactggaatttagcgccagagccccacattcagaatttgccagccgttcaatggaagctgcgcaatattggacagatgtcggaggaaaagcgcgcgcagtcactggagaaactagaaaaggtcatgacagaatggctacgttagtttaataaattaagtatagttgcaccaatagtgaaactatatcattttttataaattaacaaaaccgtctcgggatccattgcctttcagcacttaaaaccaggattgctattgttcaactctctcgcattgcttctgggcgtactgtctggcttgttcctcggcatatagatgctggcaggctctgctggtgcactaatgtggttaatagaacatctggcgcttatcagcagtaaattgtagcaagggatcacgatgctgatttcctcatccaatagtcagaataaattgttttggacggaggcttcaccaccgtaatccaccgtgcgttgctgcctgtgggcaatgttaccctcacctttctgatgcgcctggcgattctgttacaggcgatgtcgatttttcatgtaccagagtatgttttgataccaggaactattctgattgggatggcgatatagttgtcgagtagggcttccaaaaagtatttatgttcgccccctcatcaatgaatcattcggatgaattattatactgggtctgtagtagattatttaataaattacattcttcaggtcggggaatcaacctcgcaaaagcaataaagaacaggaacaaaattgcagcaacaaagtataatactaagtgcccccaaacaggaatttgctcatgcctgtatatagataaaaccaaagacaaaacagcaagtaataaaaattgcaatgaaaaccagccataaatgatgttctcaacccaaaaagaaaatcctttcttaaatataagagttccattttcaatcatcaaaaaagatttgaatttcttgaagaagtcaaccggtattgaatctctattttttattaataacggcaaaataattttttgtctgctaacatccgcaatacccgtcattcgatacccgattatccttgtaatttcatcttctacacaaatattgacctcatcggatagtttgtgactatccagtagatgctgcaattcatttaatttagagttcctgacctcattaacaaaatttataatttctcgtattttccagataacaagagccaatggtcctgcaataaaaataaagagaagaatttgttttatctgcaatacctcacttgctacagcagcagtgatccatccattcacgatatcaagtattttatccataacctatcccccaaaattgaaactgtatatgaggataaaacagcataacataaacgtggtaatcgtattttcaatttcaggctgcaatcgctttaactccagcgccggacgatgctgtcgattactggaagcaaccgcccccgccatctcttgcgccggattgtaatcaattaacccgctttgcactgcataacgcatgatggccgtggtgcgctgttgaaggcgggaagccacttcaagacgtccggatttctccacggccttaataggaattaacagatcgcgggtgcctagttcagcaatgttgcgagcaccaattgccgggaagatattgtcctccaggctcttttttacacgattagcatgatcttccgaccatttttggttggttacgagccactctctggcaaccttctcgaaagtaataatctctttcgcctgctcttctttcacagcacgcttatgttcacgaggatcgataccagcagctaccagctttctggcctcttcccttttcttccgcgcatccgccagcgaaacatccgggtaaacaccgaacgccatcaaatgttgtttaccgccaaaacggaaacgaaatcgccaatactttgaaccgccaggttttacaagtaaggacatgccgtcgccgtcaacaagtgaatactctttctcctcagatttcgcagagcgaactttagtatccgttagggccataatggtcttccttccattggtatctcgtgagtatacaagcaatatcgaatcggcaaatatactcataagtatactcacaagcctgttgatgtgggttgattcaggttgacttcagttgaggagaaaagctggaaaagccttgtgtagcgcggatttcaggcataaaaaaagacctcagttgaggtctatttacatacttttggtgcgaaggccggactcaaatatcaaaataagttaatgataaaaaacaaataataaaacacaacaatgaaatatgcccccttttgtgcccccactgtttttctgaccaatctattttcagcccatcaataaatcggaaagttaaataatttttaatcagtaagtttggatccgtagcccggatccaaaccagtgcatcttttatccacataaaaaattttttttcgaaagaactgttcacactgttcacctttcttttttctccttttatttcagtatgataggtggtgaataatgggtgaagggtgaacattcgattcttcacctccggcattctgccggtgtgactcataccggtgattaatcccccgcactgaaaatcacacagggagaaaaaagttttttttgatttgattgttcacactgttcacctttcatttttctcttttaatttcagtgtgataacgggtgaatatacggtgaagggtgaacagtggattgttcaccttcgggggaggtcgggataaaaaaagaccggcagatgccggtcaggtgggtcaggttgttgcagggtcgtcacattttggcagccagtcgccgtagctttcctctttcagtgtcaggttggtctgtatcccctgtttggtatggcgcttctcgtaattcagtccgtattccttc

SEQ ID NO: 105 - DNA, 9304 bp, Escherichia coli
  source 1..9304: mol_type = genomic DNA
ggtgcttttgccgttacgcaccaccccgtcagtagctgaacaggagggacagctgatagaaacagaagccactggagcacctcaaaaacaccatcatacactaaatcagtaagttggcagcatcaccaatcgcgccttacacgggcaactgctctgactgtccagcgtccccgccatcagcctgccgtgaatatctgtttcaggaacgccgcccacaataataaacattcccggatatctgccgcaggtgacccggtccatatcccgtgcctgtgggatacccatgatcgtatggtcgtccgcgccttcaataattttgccgccgcaggtggtcttatcgcccctgaccagaaagtagcctgttcccattgccatcagtccttatgttgcgtatcacacaataccgctgcccgtaccggatcgattgtcaccagcgttcccagcaggatttccatttttcggttcagcagggctttatccgcatagcggtgcgcccgcaggcgcagcagtttcagttgtcgggcttttacctcaaacagcaggtccggctcccactgcgtcagcgtcagcccctgtgcggcggtatccagttcttccagcagcaggagcgccatttcgtttttaccgtactgttccgccacccgcgccatcagcagtcgcaataacaggcgctggcgtgccgtggtgatgcccggacgggtctgtatccagcccagagccgcttccacgccctgactgtctgccatctccagtgcttccggctccagcgccagtacgtcatttgtggcgtcgtctgtcggcacagcggctttccccgcaagccatgcgccgtcttcccgcatcatgacctgctgcgctatccagttgcgcgtcacctcgtcggcgaacggtgtgccgtcgttccatgccagattttccagccctggcaggcgttccagcagtaacgccaggtcctgacggataacggctgtccacctgtcccacggtacgcccgccttagtcagcgcctgatgcagataccattgaatgtccagccagaaatggctgacgccggtgctgaacatcagatcggcctgctccagcagttccgtccagttctgctgcgcatacagccgcttaagctggttgcgtgactcggtgcgcggcggggccagccgggttttgccgtccacgtccggcggcagttcatgcaccgtgtcccagcgcagggttttcatcagccggtgtgccgaaagccagccctgcggctgttcgttcagataacgggccagcactttcgcctggtcgagcaggtcacgcccggaggtgatggtctgtacctgtggcgcatccaccggggatgacgctgcaggtatgctgctgctgttttgcggcaccaccgcgttcatcccgcccgactgcgccagacgcgattccagcgcgttaatcagcggcatcagggagggagactgttgttcttcgggccatgcggcgaaggaaaccgtcagttgattaagagcggcaacaatgttcgcaaaatcctcttttgccacttccgggtagcgggcaaggctgtcgagcatcttttcccctgccagccactccagcgccattttccggctggccggtcgcgagggcagcagttgcgtaccgaagcgttccaccagtccggccagcagcgccagcccctcagccagtccgcgctcaccgtcgcggtgcagtcgcgcccagatgtagtaagtggcgatgcgcacgtcttttgcctgcgtcagcagcagggattcggcaagctggcagatgaggtccgtatccgcgccggaaagtttgttcatctcgtcgcggatacgcaggaaatcgtcgtggtagccggggtcttccccgaccggcgtatttgccgtcaccggcagcagccatgtctgccacagcgctgcctgtgttcgcgccacatccagtgcatcccggtcgacaaaacagctacgggtcagcttttgcaacagttcactcatcggcgtcttccccgtattcttccgcatctttcatactcctgccggtcagaaatacctgtcccggcaggcggaagtttttcagttccagcagcgccagcggccctttaccctgttcaacccgcagcaggtaattcagcggcaggccgtcctgcgctttccacaccactttaaaggtgctgctgtccaccggtgtcacctgcgcctgttccagcaggcgaataaggctccagctcccccggtaatccgccagtatgcgttccatcgcctgcgtactggtccagctcagcgatgcgccgggttgccactgttcatccggccagttgaaacgctgccagcgttctttctggttgaaatactccagttcctgcccgtcaatcaccagatgtgtcttcatcacgtctcgggccggttttgcccgcagttcaaaatgtattccggcatctccgctggcaaaggcggtgtcagccacgtcgcgcaggcggttcagggcgcggataaagtccgggttgaccgtcagcccctgcgtgttcatggcgtccgccacccagtagcggccttcacgtttcagaacgccggaaaggttggcggcaataaactggttgatgcgcccgtcatcgcgcagatactgcgccagcagggggagggaggcatcgttctgtgaggctttgaacgggtagcgaccagcgaagtcctgattccagtggctgacaatcgcccgctgccactggcggttcaggctgtccgccgcaggcgtcagcacctgccgccacgactgctccaccgggcggacgaacagcgcctgaccgaagccactccattcctcgcccagactggcggcgattaaccgtccgtagtcgcgggtgtcggtgaggtcaacggttttgccctgcagtaccgtctgtgccagctgttgcgtcatttcctgcgggtcgggggcgttggtcacctgttgcagtttgagacgcacacgggtaacgcgggtgaggtaggtctgcagactcagctggctgtcgccgcctccggctttatcgcccagcaaccgcagcagcggagcgaaggttttatccagcggcccgacaggcacgtcgccttcacgggattgttgcggcgttttctccttgccgttaaacagttcctgtgccgatttcgccagcgagtctgacaggccacggttttccctgcctgccgccgcctgccacgcgagggtatcggtcagcgcaatcagtggcgactgacgggcatcggccatcagtgtcagctggtcgagaatgccggagagcgagtcttcctttttccagcgaatgctgttgagaaacgccagccagcttccggcaaagtcggtaaagtagcgtgaggtgagacggttacgcagcgtatccggcgagatatccgcagaggtatcctgctggcggtcgctgagtacccagtcgatttcctcgcgccgcgccgtcaccacctgctcgatggcttccctgacctgtccttcccacgcctgacgggtgaacatccccggcaccgtctgttccgtactgaaaagagattcggtgagggtatccccggtcatgtccgccagcgtcatatcggcgtagttgcgggacacctgttgcagcacgttctggtagagggtgttttcggcattacgcacaccaatctggcgcagcaggattttacgcaccgcgccggtcagttccggtggcggcgaggttttccattgcgggtgttccggcaggttcgccatccggaaggtcagcagcgagggcaacacgctctgccgcacaccttccgggatattctcgtagcgcaggccgtccgccatcagcgtggtactgaaaaaggcagcgtcggccttttccggacgggaagtcatcagcaatgccttaagctgcttatagcgttgttcaccggtggcggtacgcagaggactgttgggcggcagcgcgacaaaggcgttcagttgctgttgcagatggtcaacggccacgtcgcgcaccagccggtttgccgcctgcgcatagccgggaaaagcggcggcgagcagttgttggttacgttcaaggccaaaacgctgataccacggcgcaccttcgcggatacgatattgcaggcgctccagttcgccctgcagggtatgcagcgccaccagttgttcagacagcggcagccgggtatcaagcgctcgtgcagtctggatgctggtttcctgaacaagcgcgcggttggcgaagaacgaggtcgtcattccggccccccatatcgccagcacgcagacagtagtcatcagcgcgatacgcagccacggaaagcccactgcacgcccccgtgcgttatcgccggtgacgcccgcccagaccggtgacgacagccacgcatgaggtgcggcctccggtacggcggtaagcggcgggctgaacatcaggccgcgcaggcgcagggaagagaatgcgccgcctgccagcagcggtttcaggacgctttgccagtgagcgataccccgttctgcaagggtatgggccagacgcagcagaaaatcatggcggttatcagtaagtagctgcgacatgccctgttccgtcagcggcagggtttgtgcttccagcattgcagccagttgttccggggtacagccttccggcagcaggcagccgacgctttgcaggacgcgcccggactgataatcaccgttgtcacagacctgccacaaatagagtggggcctgaaaaccgagtcgcttactgccgttaaccagctcgcgccagcctttgtcgaattgcgctgtctggcggctctgttcttctgtcagcggccagatgatgccgtccagcggacggctgcggcgcagtttttttaaggcggtcagcagtgtgacatcaggctccgctgttggcctgccgccatatatcagcaccgtgtggtcgccttccagccagtgttgcccggtcagccccggcgcgatggcttctgcctgttcaggctcgccggtcaccagcagcaggcggacgttacgccgccagaacgggccgtagcggtcgcgcaggaaggcggcgagttccaccattgccggatgacggctgtcggctttctttgtcgtcaccgcacgatagtcatctccggcggcaagttgtctgcggagttcaaagttctgtacggcagcgtggcggttcagcagatgataaacccccatgataatcaaaaagaccacgcctgcggcaatcacgccagccatccagtacatttgctgtgagctacccggttcaacgcccagcaatgccggtttacggtgaataaacgtgcaaagcgcaaccacaacagccacggtcatgacgatggcaggccctgaaacagaacggggccggagacggtttaatcccggaaccactatgatgcctcctgtggggaaacgaatgacgacaccacggtcgcccatgaataatgcccgccctgaacgccgctgagcgtcagttgggggtgttgtgattgtattgccgccagcgttgccgcagcgacggacagccacggcgcagccggtccggagcgccccagaaaggcatccagctcgtacatcagggcttcctgagcaaacggctggttcaggcttaacaacgcggtacgctgttccctgtccagttcggcagtccatatgccggatatggcatctggctgcaccggcatccagtccagcgcctgtgcaatgcctgacgccatcatctctgtatcagtgatacgttcaggacgatgcagcagggccagcggcgtaagcgcggtttgcgtcagtcggtttgccagcaacagcgcggtggcggattctgccgtccgttccgggttcttcggttcaagtcgtacggaaatcaccagcagtacggccttttcctgaataaagttgtccagccagtcgtccacggcggccagccccggctccggggcagaaaacagacgggcttcggggaggctggctttttgccattcgtcctgccagatagccataaccgttgactcagaaagcgacgtactggtttctaaaagcacgttgatatgaaaatcatcgggtagcagcgtcagttgcagcctgatatcgctgaacagacgggaaaaaacttcggatagacgtccggtaaccggtttattggttaatacgggaatgacactgcgacgcacggtatcttctccgcgcaaatcaacgtaagtattcaacacctgctgacgcgccagaaacgccgctgtggtttctgcgacggaatcaccattcagcgcggtttgtacggaaaaactaagtatctgcaacgcccgtcgtccccgtcgcgtttcctgcaaaatcacctcttcccggcgcttattccaggcatcagcccgaatgtactgcgtgataaaaaacaaccagcgaactgaagcaaccagcgaccagataaaggcaggcacaccgcaggccagcccccagaaatgcgggccgttttttgccagttcatcgctggcgaataatgaggttattgccacaccaacagacagcatcagtaataaggctgacagccatttaatgcgggctggcggtgcgggataggattctgcgtcgggaatggtattaagtcggacaggcatcagtacatccctttattttgcattatcggccagaagttaataaccaagtgaaatttaaagttatctatagagtcattttatttatttaatgcaaaaattatgtaaccatcttttgatggtagattatctgatgagtatgctctttctcctgactttttcgcattatcatagataatatatttccctttccatgtcccaacatccatttggtttcggatgataattaaaatattgttttttccaaaccataccgcttcgggaatatttctctctgcgaaacaaaagccttcaggagagttcttacctttaaacccattttcccaaccagttaccagacaaccttttatatatggagaaccatattccagcgcaaagataagagaaccatttatgcactgagaaagaaccacatctccaaaaaaatcataacttttagttggagtatctaaaaaggccccggtgataacatttctgaattttagatataatgtatcaccgtcaatggttctaagggaaagcaactgcacactttcattttttttcagttgacaggttttcacgattttaatcttatcgcctgaaaaacaggggaaagaaaaaaaacaaagtaatattaacataatgcgcatactatcttcctattccctccattagtatttgtatgttatcaggatctttagccagtttttcagcgcaaggttttataacagaatagtatgcttcatctgttccacgatatgcccgatatgcctcctcaattgttgcttctttatctatccagtattgcaaatactctgtgccaatcttaatattttctttttcatcaaatattttatcagatttataaaatgtatcagcattagcgaaagcttcatttgtctctttatcagtcgtcattcttccttttattttttgttgtcgatatttaaaaacctgcctcactgcatttcgttgcatttgcattaagcctttcgcattatgtttattcttacctgcaaattgcttaaatctagattctttatagatttgacaaataatataatcctctcccatgatggatttattattattacggacaagttgacgaatttgtttcaatcttatagctggatctacattcacttgttttggtgcggtgtcttttgctggagttaatttttcgctcttcttcgttagtgttttttttgctgatttatttgtggtttcttttttcttttcggatttatctgccatgttatattctcgctatatgtcttaattaatgtcatcgtctaaaaactcatcgggttcaaacacactaatattaacgacctcctccttatcagaggatattagttctgtatttccattttcatcagtaatcccactcatttttagcccactttccagttctagttcatagggccaattaataagtggttgcccagtattttcatccagcaaaataaagctctgattaaaatcctcagacttaatcaccggaaatgccatcagctccggcgtcagcttcgcctttggtttacgcccgtaatatccggccttaacgttatattctcccggcgttcccgcttctatcccgcaggcatccagccggatgtagctgccaccgccgttaagggtgattttcttcttcgcggtgatcttgatctcatcttccgtactggtgatctctatcgatttctgtgccaacagttccatcagatcgttctgtgcctgtaccgagaccgcccctttattggcaaacagcttgatgcccgctttacgcacaaacacgctcagcgcctgacccacaccgataaacatattttttactacgccgatatctgcgttgttgcctgcgttcgctatcacattcttcgacgccgccagttgcaggtgctcgccgctggcgatcgccacgcccttgggtgcacttagcaggatcacggcctgcgtcagatcttttacactttgctgcaacagcgctatctgcgatgacagatctgccggatcggcattcgtcgtctgcgcatcagtggacagcgactgcatctgtgactgtgcgccatccagtattgccatcgccggagccatttcgcgcacctgcccctgcgccttatcctgcgcatcggcgctgataaaaatccctttcttcgcccgcaccgcgccccacatatcggtacgcagttcaaagccttccccgcgctgttgttttccggcatccaccagatgacccagattcaactggctcttgccgccgtactcggtactgaccttgatatgctctttgccgcgctcatcatcgaggcggattttgttgttcgccggggtacgcagcacgttgcgcttgtagttctggatggtcacatggtcggtgtgcgccgagtcgtgttttacgcctgcgatataaggtcggtccgggttgccttcctcaaacgcgatgctgacttccgttcccgccagcagcggcagatgcaggccgtaggtgtctcccgcatacgggcgcgactggcgtacccacaggctctcataacccggtttccacgtatcgcggtcaaaatcgaggttgacccggtagcgcccgtctttgtctatatgggcataaatatcgtttttcaccgtgctggtgacccgcgccgggagtgttccggccattacggggcgggggataagcgccgggcgatagccgtagcgttctgagtagggtatcgccgtgaacgtcagttcatagctgcggtcacgggccgcgc

SEQ ID NO: 106 - DNA, 8869 bp, Escherichia coli
  source 1..8869: mol_type = genomic DNA
tcctctcgttgtatgccaaagggatgaccacccgtgagatagccgctgcgttcaaagaactgtatgacgcagatgtttcaccggcactgatatcaaaggttaccgatgccgtgatggagcaggttgttgtagtggtcaagtaatactggccacggttttacagtaaaaatggtatctgttctctgactcttccggcgtcagccctccgttataatggtgaggcctgacgctattgtaataattcagaatataactgctgatttgctgccgggccacgtctttgcctgtgtagccatcggttggcacccattctgtttttagactgcggaagaagcgttccattggactgttatcccagcagtttccccgtcggctgacactttgctttatcctgtaacgccagagaagttgttgatatttcagtcctgtatattgacttccctggtcgctatggaacatgacgtcccgcggctgaccacgcacctcatacgccatccgcagggcactgcttatcagggcagtatcggcattcgctgacaggctccagccgataaccctgcgggcaaaaagatccatgacgaccgccagatagcaccagcgatttcctgcccagatatacgtaatatctccgcaccataccctatctggctcgggcacagcgaactggcgctcaagcagattcggcagacaggtatgttcctgacgagcatttttgtactgatgttttccgggctgacaactgctcaggttcagatatttcatcagacgcccggcacggtaacggctcatcgggacgccgttttgggtcagcatttcagccagcgtgcgcgcccccgcagagcccctactttggttccacgcccggcgtatttcgctgcacaacctgactcgcgccggattaaccgtatcgcgtcgttttcgccagtaccggtaactgctgcggtgtatttccagagcagaacagaggctgacaactgagtggctgtcactcagtctggcaactatcgtgaaccgttcagcgagtcggacatcaagagcgcggtagccgtttttaatatcgtattttgttcctccaggcggcgaacctgcttttccagttcgcggatacgttgctggtctggagtaataggtgtggcagagggcgcaatcccctgacgctctcgcctgagctggcgcacccaactctcaagcgtggtagaaccgacattcatcgcttcactggcttgtcgatatgagtagcccttatcaacaattagctgtgcacattccagcctgaattcaggggtgaaagtacgtttggttttcttgttcattaagtcacctgttttgtgttgtggtgaggatatcacctttaatcaggtggccaaatttactgtgccactacacttctctggcataacttccccggtcgtcgctcgttatcatgccgatattaaacggggtgagcagagccagcagctcacgacagatttcatccgttcgtggaccgaacgtataagcaagaacaccacctgttttggtgttgtaggcataccagagccagtgctgtcgggccttgctgccgacaaagctccactgttcatcgggctcgcagatgagcgcgacatctgcatgagcgaccggagaggacgttattctctttggcgcgagttttttaaagtgcggatgacggtatttattccaattttgagtgtccttgcggtatcgcggccccctgctccgttgaacgccatttcggtgatttgctctttgacgccgggcttacgggcttcataggtgtaggtgagcagaaatacacgatggcagtcacggcagcgaaaccgggcacggcctttagggttatgaccatggcggtaaacctgagcagactgacaacggggacaatggacagtaacgatggccatgagaaaacctcaaaagcgagcattatacttcaattcaaccaattagaggcatcaccaagtggagaaccactacaggcttccattgcaattactgagtagtgaagagcaatttggtgattatctcgtcccgattattgaatttgagaaatcccgacaaaatgaccagttacaactggccgagcagactgattgtcatgaatatcttcaggctcgtatgacgcttcttacatcgcgtctggaagaagttaacgcaatgacttttaccgctgatctgccggacgttgatatttcagatagaggagtgaaaatcactccgctggagaacggtgtttctgaaaactttttgcgggatcgcataacattaccgacctatacatcaatgtacaagttgttaagcactcccaattaggtgctatttcattcaatatattacaaaagtgaaaagtctattcttgagattacaatgcccaatcacaaatgagctaaaaacgaaagaaaaaagaccaaaaattaaattttttgctgctaaagagtttataatgagataagtccaacatgaacaatatcaattctttaaatgcatgaaatatacattacaaacaatacattatcaaaataaacgcatacaaaaaaacattatcgggcattatttattacagcatcttgcactgtaataattgatattaaaaactaaagcccattgttttttatttctttatttaacaaatgttgcgggtggagttattgaataccaactgcactccagcctgcctttcgcttttgcaatcatattaatcagtggagtattcattgcactgcacaataaggaaaaccataagacagaaaaattagatttattaatgaattttatacacagcagttctatattcaatcataggtacctaaacatgagcaatagtgttttttttaaagacaaagaattcaagctttctggcaaatttccgcatccagggaaagaaattaacgcatttaatcttatagatactgatttatcagtaaagtccattgaagattttccgcaaggtaaaaaaatcatttatatcttccccagcattgatacaccggtatgtgcgacatcaataaaaaaacttgatacaatcgcaagtgtacaaaaagaaattgctattttatgtatatctgctgacctaccatttgcccaagccagatttattaaagaagagaaaatcagtaaacttaaatttctatcatcatatcaaagcagtaagtttgggattgataacggagtattaatcagcgaagggcctttaaaaggcttattaacacgtagcatcatattattagattctgaaaataacatcctgcacagccaattagtaactgatataacagaagaacctgattatgatagtcttattgataaattagaattttaatcgtattagccacaatcatttttatggctgtggctaagtttaaaacttatactcaagaatgtgatatcattaaaaacaattgacacatgtcaataaacaagaaattttaacatcttactttcatacaactaatgaaaccacaaaatcccaaccgaagatttaatataacaaaatcagccattaatatgaattaaaagggcattttaagaaaaaggggttagctcaaaaaaaaacaaacaaataaaatataaatactgttaattgcaccaccgttatcagaatgaacatgaacgaaacattaacaacaatatcaaacaccgttagtagtaaaaacatcactaatttttacatcgcaaactcaatccttgttaatattaaagaaggaagtgtgagaattaaaaaccataaaaaccaagatgagtacatcttaactaaaggtctttattttatcaagaaggatatttttgtaggaatagttggtctgcagcataatattgatttatctttcgatataattgacattcctgcagatgtgttagcaaagttctgtcgagaaaatcatgaagttgctgaaaatagaaatgagtggattaaaaagtccagggggataccatattgcaatgaattaattagaacaattgaaaatacaatgagaaaacaaaatgagaaaacaaactccctttctgcaaaaaataaagaaatcacctcaataaactgcggtgataaaaacacagactatttaattcgttacatactatccagtttcattgtagatgggaagttgccatatatattatttagctcctcagaattcacactatctgagaaagtatatgatattatatactcagaaacagaaaaaaactggtctctggacgatatggccaaaaaactatatttaagtcaatcaaccctgaaaagaaaattacacagtgaaggcacatcattttcagctatttctattttatcaaaaatgaataaagcagcgagaatgttaagaacagatgatagaaaaattcaatcgatagcagaaatatgtggattcaataactcatctcacttcaccacatcttttaaaaaaatatttaatatcccacccaagaaatacagaaatatgtttagaaaacacattttagattaaattaataaaagtgctgtcatgtacacccatcctcttaataaacaaactgaataactaaacagatagagaaactggtttttgacttatttgtataatgaaccatgtcataataaaatatcaaaaatatattttactaaaaattgttattaagttgttgcacatgcgtcatctttttaacaaaaatcatggtgaattaataataaatataactcaaacacctaatcagaaccacccgcatagcgggtggttctgatttaacgacaaatttcagacaagaaaaaaacaccgcctttatctttctcattgcctaaatcatattgaaaactacattgtttttgctttgatgatttgattgtaaccgtccctttttcgcgcaaaccggcaaaatatatttcaccatctggaccaactactgttgctttagaatctcctatacttgcaatagatccaaatggaatgaaatcccccttattatccttaactgtaaataatacctttttacccgactcaacatcaaatgatgtcttcaccacagcaccatcagttggcactacaaattttgtggtctgaaaaacctcaatatcatttggaaatgttaattggtttagagatatctgatttcttttatatggcatcaagcctgaaactagtgctttaccattttgatcactataaacaccgggtatcatattaacattgataccactagcatctttggtatctatgattgccatcgtttcatttcgttggccggatagtataacaccttcatcatagagaatcacacttccattaagagaatagttcagattatctcctgaatgatatgatgtatatccaccatagatattaccgtatctgctattgtagccagtataagctgttaattgctcattgtatttgtttcttttatttattactttttttacaccccagtttaagttattgttttcaagggcatttccataaacacctaaagagtaactggcattactacctgagttatcaacaccaaactgagaatatgtattatcacctaaaggtattgacattgataaactgaaaaaatcttgctctaaagaatttgaattgccaattttttgcctagaaacattagccaaaacgttagctctcccaatttgaagattataaccgccaccaaatgaaattagatcattatctccataataatcctcctttataaaatttaaatagaaagcaccaaaatttgaacttaattgttgattaatggaagcatcaatacgtgttttttgatttcctgttaaccatggattattaacttgtcgattatcataaatatcagcgaatgtcatgtagtttttagattgatacttataaccagccactgcgactgttgtttctgttgtttcaaatgttttactatatctcatacgcagtgcagagccggttaatttattacctttcataccatgctctgcattcgaagtcgttatatctacagaagcagcacctaatgaagttaggccaccaatacctgcggctattgaccgataccgatttgataattgaataccaccatagatagtaaaaacatcagataaaccataagctacgcctaattgagcgaattcactatctttaataatggatgtatcataaacatacttacctaacacagcatcatattttagccgtccctttctctggagtatgggaacgctggagtatgggacgataaaattttgttctgaaccatcagactctttcactgtaacataaaggtctccattattttttgatggaataatatcactcagatcaaattgtcctggaggcacacttgttgcgtatattatgttaccttgctgctttacaataacttgtgcattacttttcgcgactcctatgaccctaggcgcaaaagattgttggctataaggatacatattttcagctgtttctaatttaacaccacgaaaagtaaaagcatcaaatataaaagaagaggttgtagcgtcccctaaagtaagctcactgcgtatttcaggtaaagctcgttgtatatacgtactattattagtatagtgtccaccaccactcactgttttttgccaaacaccattatttctaacgcgccaccttcctatatttagtcctggtgataaggtcgcaaaataactatcattataattagaatggttatttacccatgatgaaccagtgaagttataattcattaaaaatgctggtataccaaagtcccataaattaattggaatctcgtcattaggatttttcctcatatatttttggggcattgatattcgtaactcttgacgtgcaaagctaaaatccacctttgaaccttcgtatgattttaagtctacacactcgttattattagtactcgtagaagatacaccataactttccagcatttcatttgaaatgcaaggtgttaaatttccatcctcatctgaaaacctgatatatctcatatcaactaaattatcatttaaatatatatctatataataattaccaggaagctgaccacctggctttgaaaaaactgacaaatcaatatctttatatgtgccgttctcatctcccagcaatgaactatcaaattcctcagctactgcgttaaaagataacaattgaaacattaataatattagaagctttttttctattttcacatcatgtttcatatctatcaagtttactctctaatgttttacctatttcaccaaaatcatctatataattccacattactgtttttgcatcttcttgagatactttccctaaacttttagtcttatgtggtggaatgtaagttacgggtaaatttttaccagcataaatcaccttatttaaattcaggtaattcgacgtctcattagtaatataaagctctttattaacaattttccattttatattttttaaaaagttatcactcgttggtctagacacattactgggacgatatataagcttaatacagttatttatcaccacatcaactattttatcattagctttgctattctttggaggtataggttttacacatattaactccatgctttcttcattatcgggttcccctccgattttcactacctttatgcttgtttgctctttttcatcaagtctaaataatggaggcgtagtaatgtacgttttgctcttttctccatctaaggttgttacttttgtctgtacaagatatggattctcactttggttagaaagagagaattgcactccatgcgtatccgactcatggaatataaccctggattgactgaatgtaatgcttgatattcttacatctggcttatctgcattagagtaaaacggtaacattgccagtatcggaattaattttaaatatttcattttcatattaaatacaaagcgtgggataccccacgcttatattaaaattagttataagtgataactaatggcaaagtacctgcccagctaccagcccccatttcctgattagcgatcacgctcagcgtaaatgatgtttgatctgcaccagctaggctattggaagaagagctgatacctacattatttttctttatactgtaactaacataatcagtactgctgccatctttataaaaacgaggcagtccgttacctttagtaaaggcagtcatagtgccaccagtaatactcaccgtaacactaccaacttcattacccgcagctaccgctgcccccggatttgagtctgtccattttgcagtaatattagcaggtgcatttactgtatgagtcatatttactgtttggttgcttgtagctgcatatgcacctacggacactgccattgcaacagcagagataatacctaatgcaatttttttcatattcaactccatattagatgataaagaaagccccacactttcttaaattaaaacctaacactggaaaatcacttacacaacgcttccaccaccgcttgagccaatcacaaaacaaaacaagccacacaacaaaaaaaacaagcaactattagtttaatgaaaggttttacattactgttattagcataaaacataaccaaaacacttatgttttttctctgaatttagaactgtatcttcataagatagataatctcacggctacaaagcacacaaaaaagtgttaaaatgacacattctacagagaggaaaacatacgagtcttgtatttaattgccgtgagattctacttcccccccccaaaaaaaacaaataaagggcgcagatatttaaaaggttactgagctggccccctgaaataccagacagtagatgtatcttaaaataagagataggcttggatatatgtctaacactagttctaattttgagatggctggcgttttgttaggaaaagaggtgcgtaaa

SEQ ID NO: 107 - DNA, 8835 bp, Escherichia coli
  source 1..8835: mol_type = genomic DNA
caggagttggtagtggcctgaaaggaagttcttccctaagtctaggtagctcaacaactagcccggcctgtagtggtgcgttattcatgccatgaacgccggggggggggagcaggtaccggcatccacgttacagacggtcccggcaaaagtgcctgacctgacccctattagcggttaccagcgccccaccagacccggtgacatcaccccccggatcatggacgactgggggcagtaatcatgccgggtctggctggctaaccccccattataaggggtacgaataaagtaacggggggagggattgcatacttcaccagttacagagttatgaagtcagacataaaatcccagcactcgcaacctgcagacccccacacattgtaacgatcaatcagactatcatgctgatcgttgataaagcgacacttaagtcgagcttccttgcaaaatacctagcactcatcttcggaatatcccgttcttcctcagtacgtctaagttgtgctttcagtctgagaatatctgttctgacatctagtaaatctggtaccagcagtccagaactatcgggcttaacagctcgaagtgatttataaaggccgtgcgccgagtgctcagatacttctgcgatagaatagccccgctacagttacttggcgaacaaccccttccttaaattcagggggaaaatgtggcgtgaccatagacaaccctccgatgctcaaactatagggaagatttgtctacgggctcgagagcgcatccaacatttcccgtaggatgtcggcgcaaattacaactaatgaacacctgcgttaccaacttttgtacatcctgcaactgtatgtggtctacttattacgcgatgtaattttattttagaattactgtatctcgaaaacaatgggcaccgacaatgtaacattgcctggttttgcgttaattcctttgaagttgagcatactggattttactactgtcattgttatgctcttagacaaatcataccacgagcctgttgcatcgggctgcacataaagagcagttgttttggattggatcggccctatggtaagtttgacattagatgaaggcatatcattttggttggggatccctgtaatagtatttgaaacgctaggtgctgaaaatgtgtaataaacaggcgtagcttggttttgttttaaattcacggtatctggtagtgttattgacgtgtctagtctataagattttgcaatcgcaggaacatagattgaagcagaccagttgacctccttgttggttaaggaaaaacttccttttagatcaccggaagaaaggggatacatctgagcattaggaggaatacgtaaagagatctcaaaaccagtaaatcgacattttttagttccacatgctgtaccgaatcctacttgtgactgttgcccccactgagattcattaatggagccagaactatggtgaatgctcacacgacactcgagcgcatattgggtttcgcgcccatctctccataccaaaatagttccagcctggcatgtcaaagttcctgatgaactaggaatgaaattaacattgtagatttgatgctgccacgtatacagagccggcatttgggtagtgtttgttttccctgtgccaagaagtgttcctgtgatttgagcactactcgtactagaattgatccagtcgtacgaaacagacttgtctacttgtagagtagacgcaaacacagacaaagaaatcaagagtaacggaatgatcaagatatattttaaacgcatatttttgttaatcaagaaatgaataaagtgttaagataaagaccttaatccgactcgctttttaccagccaaacgtacatcatactttggtactcgatgactctgttttacacttaattatcccagtagtttccattgcatcaaattacttccacaggttgtaaaatagaaatccggtacaactgttatgttgtttatcagaatgactttcagaaaacaacatttctgaagctgctaccaaaatagctcattgcaacgataagcaccagacagattaaaatccgcttatattacaacttacggatatgcaatagcaaaacttaatgtagaataccctcgaccaaacggccctatcaaactagtctcagtcaccggaatcagcgtacagatgcgcatgcctgttgtttcacgactgtcactacaaaaataatcctgtgcatcatgaccagtcagttttatcagagaaccactattcttttccttcagaaaaagagttgctcctgaggcctgattgttggcaatcaggcgaaccttattgtctccctctgctacgccagagataatgctagctgttagcgctgtttttatcggctcgttaccttcacagttccaagtaatttggaaatcaccgtgctcttttcttcccggcgtaaggatacccaaatcatatgaggaaggcatcttaatatcgcaactcggcggggtgaaggtgacgttaatcgtcagcactgctgtagtagagtttgttgcctccacatcaccaatcatcatcaccattatcaacgcaatcaatgcaattttagggaatttcataactctgaacccctccccagtcatttacggcatctacactaattttatcacgtaccactctacctaaattcacatcactaaatggcctaagttgtgcgatttctttcatcacattatcactaagggaaatatctttaccatcatgttttacactaataatagccatgtagtacggtgttggattcttcaaccaagttgtgtctccacgtagttccatctttagctgtttttctgcatcttgacgcccattcttaatggaggcagggcggtaaattagcttcacacgactattcatagcaattgccaacaccccctcgtcactatccttcacttccggttttggtggtacttcctgaacattcagccagaacagggattcacggtccttcggtaagttactatccgtattgatgatacgaataatctgtttttgtttagcccctaccttaaagaacggtggctgtggaaccatgtagactccgtttccttggttggtgttatcaatccacacctgaccaccgtaggttttgtccgcattgttggtcacttcaaaagaaacattcttctttccctcctcataaatgaagcgggtcccattcagcacaaatgcagccatagcttggttgcaaaaagagacagaaaggagcgcagtcagcgctaccttacccagtttattcacagcgaacctcctgaactttgttagtatttgctttcagtcctgccgtggagaaacggcactgttttccgttccctatattcacgctgacagctttcggctcagccagcatgttcatcagcagaacaccattgtttgaaataaagcctgcattcagtccctgctccgttttcgcatcgccgccagtcagatagttgccttgtgcattcttcacacgcaggatataacgcaagacattttcgaagccgaatttgcggtaaaccatcgctttttcagtcggcaccacgttgaaggacgtggtctcaaactccatgtcatctggcacgttatccatgttgatgttgatgttgttttctgaatattcagacagccacaccaccgtgttaccgtcacggttcgtcggcatggagccgttaacagaaacaccttcaacgccaggaatactgacgatacccacagtgtcagacgactctttagtaaagagcggtccgctctcagacgtgcccagtacagaacctgaaacactgccggagaaactggtgtggctgtttccgtgcttgttgtaggaacgagacacccccaagtttgtctgaatggcatcaaaggcgtaactggcagatgcagatgcaccacggtcacctgttgaaccagcattcgcactcaggctgtagttcaggcgttcggttggcatggccgatacactggtattgaatgtcgtaccaccggtgcgggtataccccacactgttactgctataatgacgggtccctttcaggtcaaatggcacactcagactcagtgaaacggcgtaatctgccttatccgaccaggcatactttgaatacgccccgttcagaaataccgagacagaatcaaaaacagaggtactgaatgacagcgtgctgccagtatctgtgccctcgcgcatccagtaatcctgacgccagtaagagccactcaggtatgtaccatcaaaacggtgcgacagacgcgcctcatagcgggaacgctgaccgccgtatcgcgcatagctccagatatctttcgggttaaagtcagcaaattccacataccctttactctgataacggtacgtcagtaactgtaagtcggtccggtctgtaaagctcttggcgtatttggcactgaaactttctccggttttcacttccccattgtcatagctggcctttgacatgttcgcactgagcgataatgcccccaggccacccagcatctgtgtgccccccagaccagcagcctgatagtcatcattcagaatgaatgcagagttcagtgtggtggtggagaagccatagtccaagctgcccaaccagaacagaccagtgtcagaatgaaacgccttgtccagctcgttgttgttgttcttcttccccaccgctacgttgtactgaaactcaccaggacgcagcagcgtcggcagcgtggtgaccggataaacctgctcggttttgttaccactttcatcctcaacggtcaccaccagttcaccgttgcccatcgggcgcaggtcgtcaagacgataaggccctgccggtaccatttttgaataaactgtatacccgttctgtttcacggtaatacgtgaaggagtagaagcgatgcccgtgatgcccggcgcataccccctagactcccacggacgcatattactgttagagcgaagtgccacaccgtagaaattaaagtcagaaaacagctcagtccgggtctgagatttccccagtaataagtcaccctgtacttgactgatggcagtggatagggtcaggtcactggaggtgacttcggttttatcacgatcatgagacatgttcatgttgctagagagaacccagcgccccaggttgatggtagcatccaaattaccaaagacgttcacatcatcatgaacgtttttattgaagttagtgtaatatttcaggcgcccaccattcagaccataatcccaacgtgcggggtctgttttgctcagtaaatacgcctgaggaatattaaattttaatgtctgcgcaccgtaatcaaaatccactttagtgtgggaattacgagtcagaacatagcactgtttttccctgtcaaaggcataatcataagcgtcttttttcatcatcaccccggcgctatccagccattcatgtgaaaggcaaagatggttatttttttcatcttcttccgtaatgacaagatttgcacgcccggttcgttcattgttgacgagtacatcaacaacgtactgacctgcaggcagagtggtatcagtcttcagaatggaaggaatcgcactaataccatgaataaaatctaaattcaattctgttgcaacactaaactgagaacatatactcagtgccaacagagataatttaaaaatataacgttttttcatctctggatatattctcttgcttagcagggaggcatacttttgcggatgaagaaagttatccggtagcaagctaccggataagggggggggatgattacttgtaagtaaccgcgtaagccgctgccccctggaagtcacccggggtttgaccacctttcagttgagcagtaaatttgaaaccttccgtagttgcttttgatgcatcgaaacttacagtgctattcgacgccttaacctcctgcaccatctgtgttttaccgttcgcggttttcagagcgacatatgaatcatttgccactcccccttgattagcaaaacctttttcggttaactgcccgctccaagttacatcagctgttttactggacaaggaagaacaaccgccagtagctgaagaagccttcagtgcaaaaggaatttcaccaccaactccgtttggtgtaacactaccaagctgaatggtatctcctacagtgccacttatttgtggtgtcaaattacaggtggttgctgatacgttaccaaagaatttaacatccccttgctgagccattgcggaacccgctgtcatggacaacgcaacaaaagaaataaacactagtcttttcacgattaatgacctcaagatacttttattgtcaccactccacacgcaatgtgaaagctataagccccgccatcaactgacaacctaatttggtgtggcgcgttttctgttttagcgcttgggctataacttatataagcgcagctcagccctgcctgcagaaacataaataactacaggctggcatagctgctcttttatattcacattttagtgcgcccttgcattagctaatcgtgcaattgcgattgacgcatgcacaattagctaataagacattcaaaatattactctgatattaatttttctgctgaaaggaacattgcagtacagtccacaacacagtcaaaaaaacaagaataaaggtctgttgtggtcaacagaaatgggatacaattttgattatccccagtatctggtaaccaattcgttcggctgtattccactgttatattcatgaggtcggcattggattttccgcgatgtttcaagggcatcattaagcggcaaggctgctgaagttgctctcaattgcggggctgaaaatttgcataatgtactaaattttcggtaataagatgaagatgctcaaaattatctttacgtgcaagaagctttgtttcctccagactgacgacaaaatcgccctatggtaatactcgttcaatagcagacagagtgccaacattgcgtacatccaagataaccaagccaacagaaacatattgatgtgccttttgctgtatcaacttgcccgttttctgaaggtactctacttgcttatattttgcccaagcaaacatactacccaaaatacgttcatgcagttcaataatctcatcaacaattgtggctctggcctcaatcagtacacagaccaaacgagctggaaaaaagccgccaagcagcgacagctcattttgcgggctctcacacatgagtttcaacaatcagttctggtgaatggttctctccactccttccggtagcgccagagcttcaatagcgttaaggcggtcaatatgttttccattggcttccccagagtttaaagcaaccacgtcaaacgggatatttgtttttcatttgtcgccaacaaggcagcaagcgcagatttatgcgtgatatcaaggtgcgcattcagtgtataaaccgctttataacccaatgtcattgcttctgcacaggtacgttctggcgcatcatgtcacgaacggtgcaaaagtggttcttccgcaacttaggcggaagaaaatggatgaaactttctggccgagtaggcagcctggcggctgcggcttgtcatggtctgagattaccgttataaaaacagacaatatcattgtctttcaggtggttatatggcccgttcagctaaaccccgtaaacgaaaacccgcccctcaaagaagcaaacttccccgctatgtcgtgaagcttcacgacgatgacttttttgaggtacacacagcggtgctgttcatcaccggactgttgccacacaaaaaaggtctgcttccggtgtaaaagtcgctcctgcccgcactgcggagtgaaggctggcgcacagtggatacagtatctgctgagtctggtccttggtgttccacaaccggtggttactggcagagatgagccgtattgctgcggatgtgaagccgggaatattcacggtaatccacacatggggccgggaccagcagtggcatccacatatccatttatcgacaactgccggtggtgtgacatcaggtcacacctagaaaaactttcatttttacgcccgcaaggtaatgagtatatggcgctaccggataacacggttgctgtcacggaaatacccagagctgttgatatcggatgagctggctgctgaaggaagcagtaaacgggaatggaaccgtttactggacagtcattaccgacggggctggaatgtcaacgtatcaaaggtgatggataacaccacacatgtggcggtgtactttggctcttacctgaaaaagctgccgatgccaatgagccgtctggagcactatgccggtcaggatgaaatcggactgcgttacaacagtcaccgcacacaacgtgaagaatacctgttgatgagtggtgatgagtttatggaaaggttctcctggcatgtggcggataagggggttccgtatggtgaggtactacgggttcctgagtccggagaaacgccgattgctggaagaagtagtgtacgtcataacagagactgtgagaaaaacggcgatgcaaatcaggtggagagggatgtatcagcggttactaaaggttgacccgctgaaatgcatactgtgcggaagtcagatacgggttacggggctgaagcggggttaccgtctggcagagctggttatgatgcatgagccactggcgcgaatgcagtattgcggctgagagccgcagaggggaagctgcgtccactttgaagggaatggagcaaaaaatagccatcgatacccggtatcaatcaatgtcagcaatataagtgacgataccgattacgt

SEQ ID NO: 108 - DNA, 8796 bp, Escherichia coli
  source 1..8796: mol_type = genomic DNA
ggtgcttttgccgttacgcaccaccccgtcagtagctgaacaggagggacagctgatagaaacagaagccactggagcacctcaaaaacaccatcatacactaaatcagtaagttggcagcatcacctgcccaccgaagtaagcaaacgctgctcccagcacaccaaacagatgacagaacatgaacagcaatacgatgtagccgattgaggcgatggtttgcgccacgagaaaagcgcgctgttttcccgccatcaatagcaatgactcctgagggaagcccagcatcgaaatcacaattgcgcccagcatcacctgaatcaggtcatacgcttcgagatacttaacgccaaacaccagcgaaatgagcggcttgccgacgataaacaccgcgagcgccaccagaataccgattccgcccgccagtaaaccggacttcacacctaacaaccacggtctggtggtgcgcggatctaaacgcatcacctctgggtaaaaacttttacccagcaaacccgctggcgttccggcggcgtcgaagaatgtcatggcgattttaaataacccggcggcagcgggtcctaacacgatccccaccagcactgtgctgcacgagttacgcgccgaccagatggagtgggcaatgttggttgaccagacaaaactccacgcgcctttgatgtgtcgggcagactcaaacagattcaatttgaaggcattatggatatttcggcggcgtaattcgcgcgcggcaaaccaccagtacatggtgccgccaaccagattcgacacgtaccaggcaataacaaaacccgcaaaaccaaagtcaaaataccaggctacgacgctccccgctgcgcgcagaaaaggtttcgtcgcctgctgtacagcaattaaatcgaagcgatctaccgcacgcagaatgccggtcggcgtggaggaagccattgaaggaatgagcgtgcaatacagcgctgccagccaaaaactttggtcatccagacctaatgaatgggaaaggaatggcagtaaggcaatgccaccgacaatcgccaccgcgccgctgacgatatccagcgagaaggaaaatgagacgacattgcggaattgctgcagattattgttggttaatgctggtgttccgtactgaaccaccagttgccatgtctgaaacttaataaaatcgctgatcgacttggcgtacgattgcacaatcaccagtacgccaaacatggcgggcgtcatccctttaccggcacacgagagcgccaacagacccagcaaggcgctcacgacattactggagcctaaccaggcgctattgcgaataatggtgcgaaacgcgccatctgcaaaccaatgtttgatgttaaaacccgccaattcagcctgaccttatcgttgatagtaaaaagtatcccgccagccttaagttaaacttcggcggtcagaaacgatggcaaccagagaaaccgccttctgtgcctgttccagcacttcgctgtagggcgctctggaatcaatctcaagaatttttgtgccgttatagccaatcttcgacatgacaccgattttgtcctgcagctcggcatagtcatggtcaggcttgcgggagatggcagtctcaatatcaatgcccaagcgaataattaattccgggcgatattgcgccatttgttggtataaacgccgttcgcgctgcgccagaaacatgctgattttcccggtcgcacgttcgacgccaatccccggtccatcataataaaagcccgaaatttcagcctgcgggaagcgatcgctgaccaccagaacgccactttgcgccagtcgctgaaccttgcgtagattcgccattcttcgcagcgagaagcagtacataatcaccgccgcccatagcgccggagatttggttttcatgctttgggttttcgaggatttggccgccagtcgccgttccagccagacgccaaccaacggcaatcgtttgattttgtcgccgtcttcgccggagagcagccccagatagcgccgctcggtttgccagtgttgttgcagcgatttcaccaggtcggtggtcagtgtggatttaccggtgccatcacacccgaccaccgcaattagccccggaatgtagctgggctgcggcgcggttgtactaataacagtttgtgtttgtagtgcatccattcgttaaatcatcccctatccattttggtgatcaggaaagcgcggcgtgaattgcgcgtagtgacgcttgcagaatttcatcggctggttgccgaccatccacttcaaggatctttgcaccattgaatgtcagttgcggcgtaacggcgattttttcctgtaacgctgccagttggtggtcaggtttacgcgcaaacgccgtttgttcatcaatgccaagacgaatcaacaatacgggcaaataagatgccatccattggtacagcttcagctcgcgctgccttaacatttttatccaaccgttaccgcccgtggtttttgccaattgcgggccatcaaagcgaaaccccggcacttcaacctgcgggtagcggtcggtgatgagcagaaagccttgctggcttttacacaacattttgcgaaacttgtacgcccgccagcaggaaagcagatagataaccagtgcagtaatattgccaggcggtgttgagggcttttcgtgcacatgtgccgctttacttcgcagataacgcccaaaaggtgcgccaataacagggagctgtgaaatccattcgccaattcgcccggacgattgcccgagataaatgtgttctgttggcattcttgctgccagttcatttaccaggcttgccgtgagggtcgatttacctgaaccatcacatcctacaatggcaataacatgcactggcgtggaattaattattgacatattacgttgattcacgaaaaacccggcagtaaataatgtattgaatattacgtggtccgtgctcagaatatccgttcaaccttattgtgacaatggttaattgtgacattgacctgaattacgctttcataaaaacatattaaccaaataaatatttttaatggatatttaaattaaaggatatattcatgcagtcaataacacctccattaattgccgttattggtagcgatggttcaggcaagtcaacggtgtgtgaacatcttattaccgttgtcgaaaaatatggtgctgccgaaagagttcatttaggaaaacaggccggaaatgtcggtcgtgcagtgacaaaattaccgttgatgggaaaatccttacataaaacaattgaacgaaatcaggtgaaaacagcaaaaaaattgccaggaccagttccggcgctggtaattacagcgtttgtcgcccgtcgcttactgcgctttcgtcatatgcttgcctgtcgtcgtcgcgggttaattgttctaaccgaccgttatcctcaggaccaaattcctggcgcttacgatggtacggtgttcccacctaacgttgaaggtggtcgttttgtctcatggctggcaagccaggaacgtaaagcgtttcactggatggcgagccataagcctgatctggtcatcaaactcaatgtcgatctagacgtggcctgcgcgcgtaagcctgaccacaaaagggaatcgctggcaagaaagatagccataacgccacagttaacctttggtggtgcacaactggttgatatcgatgccaatcagccactggaacaggtgttggttgatgcagaaaaagcgattacggattttatgaccgcgcgtggttatcactagtcaaaaatggaaatgcccgatccgatcgccaggaccgggcattttcaggaaggttaaatcaactgcaatgctatccagtacagcccaccagaaagaaaaattgccgccggtaaagtaaacacccatgccatcaggatgctggttaccgttttacgctgtaacccaccgccgtccaccaccatcgtccctgctacggcagatgagagtacgtgtgttgtagagacgggcatcccaatataactggcaaggccgatagacactgccgccgtcatttgtgccgccatgccttgcgcatacgtcatgccgcgcttaccaatcttctcaccgatggtcatcgctacacgacgccagccaatcatggtgccaatgccgagcgccagtgctaccgccatgatgatccacaccggagcgtactcaatggtgcttaacatatcgctgcgcagttttttcagcaggttctggtcttctttactgacgcctggcagtttcgccagcttcgcggaggtatcagagatgcacagcataatgcggcgcagctggctgcgctgactcacgcttaacggctcgtaactttccatattgcctggcagcatcgttttaacgcgcgcaatcgcatcaaaggtatttgccggatgacagtgaaactctgttacttgcgtgccatcagtcgatgctgcaggcaatggaggttccatcgcaatcaacttctgcggcagttcaggatgctgttgcaggtagtgttcgaagttggtgacggcatcgcgggtacgggtaatttcatagccggacgcgttcatattgacgacgaagccagcaggggcaatccccaccagtaccagcatcaccaggccgatccctttttgtccgtcgttcgcgccgtgcgaaaacgccacgcccgcagcggaaacaatcagcgcaatacgcgtccagaatggcggtttacgtttgccttttttctttttgcgatcttccggaatgcggtgaatacggtcacgctttttcgtcccgctccagtagcgtcgcagcaggaatatcaggcctcccgcaatgaccaggccgacgataggggaaacaatcagcgaggagaaaattttggtcacttcacgcaggtttaacgcatccatcaccgatgagccggttaacagcgcgttggttaaaccgatgccgataatcgcaccaatcaaggtgtgcgaactggaggccggtaaaccgaagaaccacgttcccaggttccagataatcgccgccagcagcatggaaaagaccatcgccaggccgtgggttgaccccatattcagcaacaaatcggttggcaacatatggacaatggcataggcaacgctaagtccgcccaataacacgccaaaaaagttaaaaaatgccgccatcaccacagcaagttgtggttgcatggcacgagtataaataacggttgccaccgcattcgccgtgtcatgaaaaccattgattgcttcgtagaacaacacaaatgccagagcaagcaataacaaaagccctgtgtatatatcaaggccaacaaataaatttagcatatattagattacgccattttgaatttacgaacggacgcattatcagtgactttaacggcatgggcaaagtgaaatatcattttttaacgataaaaagagtgttatttcttgtgtatcagacaataagcattcattcaaaacctttagaaataatcaaaacacaggtattccactggttaatatattcacatatgaaatgaataaatattagaacatataaatattgaatattttgattaatccccgtactgattattcttcataatcagtacggggttgctacaacatgtattactttttcaccacaattaacggttcaatatcactctcttttttgatgaccagtgattcatcaccgcgcaaacacgtcccaccgtagttgccgcccacggtgaaggtacatacctgaatgtatttaccgtccactttcggcaaacaccacagttgctgatagatgtttttctgctcggcaaatttaccgctggttttgtccagcacctcttcatgatggctgaccaggtcgatattgctaccacagcgaccggcaatcggtttcactgcgtaacctgttttcaccaattcatcattaacagtgaaatcggtatccagcaggtaacgatggtgcgggaacagcgaccagaggatcggcagaatcgctttgttgccggggatcaccgtccacagcggctcaaagaccagcacttccgggcgcagcaatacgtcgataagacgcacttcgttttgcggatgaccggtacggattggcaccgcagcaaactcacggtcgctaacttcacgaatctgatcaaacgcggtttcccacgcccaggttttccacacgcagttaaccagccgtccttccccatcaatcagttgcccggcagcatcccagcccagttcatccagcccgcgcaagatacgcgtttcaaagcccgcctggtgcagcgcctgctccataaactgcgcgtgatagttttcctcgatatctttgtcctgcatgatatggacaaacggacgtgcacgactgtgtttccaggcaccagccagttcgttaatcagcccttccgccggattgaagccgttgcctttatagccctgctccgcccaacgttcgaggatcaagcccgcttcggtatgacatgaggcagagtcggcgttgtactcgtaaaccttcagaccacgctcatccatgcagaaatccatacgaccggtgatcatatggtgacggcgacgctgccaggagagacgcaaacgtggccagaggattttcgggatgtcgaacagcgccagcaggttgtcatctttcagcaccttgtcggttgcgtgaagatacatcaggtgcagctcgttggtggctttaattagctcctgctcggcactctcggtaatggtgtagtaatgataaggatcctgattgatcacctgaccgttggcctgcacataggcgttttgcagcggatctttttcatccagccatttaccgtcaaactggcctttgttttccaggcgcgctccgctgattttcagcagctcgcctgcaatttccggctgcggtaagctgtattcagtatcttccgtctggatcatccagcccagaatggtggtgtcatcaaaagtgtctttcagggtatagcagccgttttcgaccaccatctccagctcacgcgtccactgttgcccttgcggcaacggggaatgaatcacgttctgttccgcaatacggactttgttgccatgcaattgggtaatgatggcgacatggccagtgtctttaaattcaccgcctttatcccagataagaagcgcacccgcgaccggcgcacgcggcgagccgttaggaaatgcctgcaatggcaggatgttgtcattaaccacttctcgcaggaagcgcagcgagaaaatctcccacgccatacccacgtcagtaaagaccacaccgtaattcagaaagagaaaacggcgagcaaattcaacgcattgccacttgtggcccatatattcgtcgtcgatatagctacggaatacggcgtcatcttcgtattcctgcggatcgagagaactgtaatctgaagagtagattgctaccccacctggggcgtagcccaataatgtcccgaacggggcatcctggctggtcgttcctttgctcatcactttacctttaacaatacaacctaagcagttggcgtaattgttgtgctctgattacctgctcagcgacattaaccggacagaggtcagactaatcatacacctcatcgcagcggctggcgcaaagggttaaaaaattcacattctgtacagcaagtgacctgctacactgcttcaacactaccactcagaaggcaactcactatgacagacaatacttatcagcccgcgaaagtctggacgtgggataaatccgctggcggcgcgttcgccaatatcaatcgcccggtttctggtccgacgcatgaaaaaacgctgcccgttggcaaacacccattgcaactttattcgctgggaacgccgaacggtcagaaagtaacgattatgcttgaggagctgctggcgctgggcgttactggtgcagagtacgacgcctggctgattcgtattggcgatggcgatcaattctccagcggctttgtcgaagtgaacccaaactcgaagatcccggcgctgcgcgatcatacgcataatccgccgatccgcgtgtttgaatctggttcgatcctgctttatctggcggagaaatttggctacttcctgccgcaggatttggcaaagcgtactgaaacgatgaactggctgttctggttacagggcgcggcaccgttcctcggcggtggttttggtcacttttaccattacgcgccgatgaaaattgagtacgccatcaaccgctttaccatggaagccaaacgtctgctcgacgtgctggataagcaactggcgcagcataagtttattgcgggcgatgagtacaccattgcggatatggcgatttggccgtggtttggcaatgtggtgttaggcggcgtgtatgatgccgcagagtttcttgatgcgggcagttataagcatgtacaacgctgggcgaaagaagtaggcgaacgtccggcggtgaaacgtgggcgtattgttaaccgcaccaacggaccgctgaatgagcagttgcatgagcgccatgacgccagtgatttcgagacgaatacggaagataagcgtcaggggtaagggttggtgttcgtcgcagcaagccatccaggccggataaggcgttcacgccgcatccggcaatcgtgcacaatgcctgatgcgacgctgccgcgtcttatcaggccttgtattatccctccagtgcagagaaaatcggccagttttctctgcctgcagtccgcatgccgtatcgggccttgggttctaacctgttgcgtagatttatgcagcggactgcctt

SEQ ID NO: 109 - DNA, 7832 bp, Escherichia coli
  source 1..7832: mol_type = genomic DNA
gccatgatcaaactcttcaatttaaaagtttgatgctcaaagaattaaacttcgtaatgaattacgtgttcactcttgagacttggtattcatttttcgtcttgcgacgttaagaatccgcatcttcgagtgcccacacagattgtctgataaattgttaaagagcagttgcgacgcgctttagcgcactgtcgcgaggtggcgtatattacgctttcctctttcagagtcaaccctgaatttcaggatttttctcttcaaccgaaccagctgtttgtgtgaagcgattcacatccgccgtgtcgatggaggcgcattatagggagtcggctcaggaagacaagcggaaaaatgcatttttatttcaaccgctcatcttttaatcattgcgccggtttttgctgcttttttatcgcttgcggcaggtctgccaggctatttaacacccaatctgccgcgttttctgcttcaggtgtaataggtttacccgtacgcaccagcacttttgttcccacgttcgccgcagccgctgcctgcatatcttctaatttatcgcccaccatataagaagcggccatatcaatatgcaaataatcgcgtgctgacaaaagcatccccggatgtggtttgcggcagtcgcagacctggcgaaactcttcaacactaccctgcggatgatgcgggcaataatagataccatccagatcgacatctcggtccgccagcgaccagtccatccactcggtcagcgtttcaaactgtgcttcggtaaatttaccgcgagcaatgccagactggttggttactaccaccagcgcaaagcccattttttttagctcgcgcatggcgtcaataacaccgtcgataaattcaaagttgtcgatctcatggacatagccgtgatcgacattaatggtgccatcacggtcaagaaaaattgcgggtacgctctttgccaccttttatagctccttaataaggcatgtgacgctagtatcgcatgtttcgacctgcaagaaagtgctcttcgcataaacctgattgatttagacgtctggatgccttaacatccatttcattgacggcgttgcccgtttcaggcattcgagatgccacgactaacttaatgacgataataaataatcaatgataaaactttcgaatatcaccaaagtgttccaccagggcacccgcaccatccaggcgttgaacaacgtcagcctgcatgtgccagctggacaaatttatggcgttatcggtgcctcaggcgcgggtaagagtacgcttatacgttgtgtaaacctgctggagcgcccaaccgagggtagcgtgctggtcgatggccaggaactgaccacgctgtcagaatccgagttgaccaaagctcgccgccagattggtatgattttccagcattttaacctgctctcttcgcgtactgtttttggcaacgtggctctgccgctggagctggacaacacaccgaaagacgagatcaaacgtcgcgtgacggaattgctgtcattggttggtcttggcgataagcatgatagctacccgtcgaatctttccggtgggcagaaacaacgtgtggcgattgcccgtgcattagccagcaatcccaaagtattgctgtgtgatgaagccaccagcgcgctggacccggcaacgacacgttctattctcgaactgctgaaagacattaaccgccgtctgggtttgacgattctgttgatcacccacgaaatggacgttgtgaagcgtatttgtgattgcgtggcggtcatcagcaatggcgaactgatcgagcaggacacggtaagtgaagtgttctcgcatccgaaaacgccgctggcgcagaagtttattcagtcgaccctgcatctggatatcccggaagattaccaggaacgtctgcaagcggagccatttactgactgcgtgccgatgttgcgcctggagtttaccggtcaatcggtcgatgccccgctgctttctgaaaccgcgcgtcgtttcaacgtcaacaacaacattattagcgcgcagatggattacgccggtggcgttaagttcggcatcatgctgactgaaatgcacggcacacaacaagatacgcaagccgccattgcctggctgcaggaacaccatgtaaaagtagaggtactgggttatgtctgagccgatgatgtggttgctggttcgtggcgtatgggaaacgctggcaatgaccttcgtatccggattttttggctttgtgattggtctgccggtcggcgtcctgctttatgttacgcgcccggggcaaattattgctaacgcgaagctgtatcgtaccgtttctgcgattgtgaacattttccgttccatcccgttcattatcttgctggtatggatgattccgtttacccgcgttattgtcggtacatcgattggtttgcaggcagcgattgttccgttaaccgttggtgcagcaccgtttattgcccgtatggtcgagaacgctctgctggagatcccaaccgggttaattgaagcttcccgtgcaatgggtgccacgccgatgcagatcgtccgtaaagtgctgttaccggaagcattgccgggtctggtgaatgcggcaactatcaccctgattaccctggtcggttattccgcgatgggtggtgcagtcggtgccggtggtttaggtcagattggctatcagtatggctacatcggctataacgcgacggtgatgaatacggtactggtattgctggtcattctggtttatttaattcagttcgcaggcgaccgcatcgtccgggctgtcactcgcaagtaacgttcaacacaacataaataattgaagaaggaataaggtatggcgttcaaattcaaaacctttgcggcagtgggagccctgattggatcactggcactggtaggctgcggtcaggatgaaaaagatccaaaccacattaaagtcggcgtgattgttggtgccgaacagcaggtagcagaagtcgcgcagaaagttgcgaaagacaaatatggcctggacgttgagctggtaaccttcaacgactatgttctgccaaacgaagcattgagcaaaggcgatatcgacgccaacgccttccagcataaaccgtaccttgatcagcaactgaaagatcgtggctacaaactggtcgcagtaggcaacacttttgtttatccgattgctggttactccaagaaaatcaaatcactggatgaactgcaggatggttcgcaggttgccgtgccaaacgatccaactaatcttggtcgttcactgctgctgctgcaaaaagtgggcttgatcaaactgaaagatggcgttggcctgctgccgaccgttcttgatgttgttgagaacccaaaaaatctgaaaattgttgagctggaagcaccgcagctgcctcgatctctggacgacgcgcaaatcgctctggcagttatcaataccacctatgccagccagattggcctgactccagctaaagacggtatctttgtcgaagataaagactccccgtacgtaaacctgatcgtaacgcgtgaagataacaaagacgccgagaacgtgaagaaattcgtccaggcttatcagtctgatgaagtttacgaagcagcaaacaaagtgtttaacggcggcgctgttaaaggctggtaatttttaggctgtttccacaatttgtaatatcattcaggacgggcgcttgcccgtcttgtcatttttacaagctcctgattcaatattgacgttttgatcatacattgaggaaatactatgcgtgctttaccgatctgtttagtagcactcatgctaagcggctgttccatgttaagcagatcccctgtcgaacccgttcaaagcactgcaccccagccgaaagcggagcctgcaaaaccgaaagcgccgcgcgccacgccggtccgaatttataccaatgcagaagaattagtcggcaaaccgttccgcgatctcggtgaagtcagtggcgactcttgccaggcctctaatcaggactctccgccgagcattccaaccgcgcgtaagcggatgcaaatcaacgcctctaaaatgaaagccaatgcggtattactgcatagctgcgaagtcaccagcggtacgccaggctgctatcgtcaggctgtatgtatcggctctgcgcttaacattacggcgaaatgagcagtttccagttcgagcaaataggcgttattcgctcaccctataaagaaaaattcgccgttccgcgccagccaggtctggtaaaaagcgccaacggcgaactgcatctcattgctccctacaaccaggccgacgccgttcgcggcctggaagcgttcagccatttatggatccttttcgtctttcatcaaacgatggaaggcggctggcgtccgactgtgcgtccaccgcgcctcggcggtaacgccagaatgggggttttcgcaacacgctctactttccgccctaacccaattggtatgtcgctggtagagctgaaagaggttgtttgccataaagacagcgtgattctgaagctcggcagtctggatctggtcgatggtacgccggtggtggatatcaaaccgtatctcccctttgccgaatcgcttcccgatgccagtgccagctatgcgcaatgtgcgccagcggcagagatggcggtgagttttaccgcagaggtcgaaaagcagcttttgacgctggagaagcgttatccgcagttaacgctgtttatccgcgaagtactggcgcaggacccgcgcccggcctatcgtaaaggtgaggaaacgggcaaaacctatgccgtctggctacatgattttaacgttcgctggcgcgtcaccgacgcaggttttgaagtctttgcgctggaaccgcgttaaattcacgcctttctcttttgacatttcttttgcactggtaaactaaatcacttttttttgtcccaggctcgccttgagcctgttctaccttccaactggaaccgtaacaacatgcgtactagccaatacctgctctccactctcaaggagacacctgccgacgccgaggtgatcagccatcagctgatgctgcgcgccgggatgatccgcaagctggcctccgggttatatacctggctgccgaccggcgtgcgcgttctgaaaaaagtcgaaaacatcgtgcgtgaagagatgaacaacgccggtgcgatcgaggtgtcgatgccggtggttcagccagccgatttgtggcaagagagtggtcgttgggaacagtacggtccggaactgctgcgttttgttgaccgtggcgagcgtccgttcgtactcggcccaactcatgaagaagttatcactgacctgattcgtaacgagcttagctcttacaaacagctgccgctgaacttctatcagatccagaccaagttccgcgacgaagtgcgtccgcgtttcggcgtcatgcgttcccgcgaattcctgatgaaagatgcttactctttccatacttctcaggaatccctgcaggaaacctacgatgcaatgtatgcggcctacagcaaaatcttcagccgcatggggctggatttccgcgccgtacaggccgacaccggttctatcggcggcagcgcctctcacgaattccaggtgctggcgcagagcggtgaagacgatgtggtcttctccgacacctctgactatgcagcgaacattgaactggcagaagctatcgcgccgaaagaaccgcgcgctgctgctacccaggaaatgacgctggttgatacgccgaacgcgaaaaccatcgcggaactggttgaacagttcaatctgccgattgagaaaacggttaagactctgctggttaaagcggttgaaggcagtagcttcccgctggttgcgctgctggtgcgcggtgaccacgaactgaacgaagttaaagcagaaaaactgccgcaggttgccagcccgctgactttcgcgaccgaagaagaaattcgtgccgtggttaacgccggtccgggttcactgggtccggtaaacatgccgattccggtggtgattgaccgtaccgttgcggcgatgagtgatttcgctgctggtgctaacatcgatggtaaacactacttcggcatcaactgggatcgcgatgtcgctaccccggaaattgctgatatccgcaacgtggtggcgggcgatccaagcccggatggccagggtacgctgctgatcaaacgtggtatcgaagttggtcacatcttccagctgggtaccaagtactccgaagcactgaaagcctccgtacagggtgaagatggccgtaaccaaatcctgacgatgggttgctacggtatcggggtaacgcgtgtggtagctgcggcgattgagcagaactacgacgaacgcggcatcgtatggcctgacgctatcgcgccgttccaggtggcgattctgccgatgaacatgcacaaatccttccgcgtacaagagcttgctgagaaactgtacagcgaactgcgtgcacaaggtatcgaagtgctgctggatgaccgaaaagaacgtccgggcgtgatgtttgccgatatggaactgatcggtattccgcacactattgtgctgggcgaccgtaacctcgacaacgacgatatcgaatataaatatcgtcgcaacggcgagaaacagttaattaagactggtgacatcgtcgaatatctggtgaaacagattaaaggctgatgccagaaagggtcctgaatttcagggcccttttttacatggattgtataaaatggataaaccaaaggcgtactgccgcctgtttctccccagctttcttttactttcggcttgtaccgttgatatcagccagccagacccatcagccacagcagtagatgccgaggcaaaaacatgggctgtcaaattccagcatcaaagctctttcaccgaacaatcaataaaagaaataacggcacctgatctcaaacccggcgatttgctgttctcctcaagccttggggtaacctcatttggaatccgcgtcttcagcacttcctctgtgagtcacgttgcaatctttctgggtgataataacgttgcagaagcgacaggcgctggcatccagattgtttcccttaaaaaagcgatgaagcatagtgataagcttttcgtcttacgagtcccggatcttaccccgcaacaagccacagatatcaccgcgtttgccaataaaatcaaagatagcggttataactatcgcggcattgtcgaatttattccctttatggtgactcgccagatgtgctcactgaatccgttctccgaggattttcgccaaagtgcgtcagcggcctggcgaaagcgcagttaagcagtgtgggcgaaggagacaaaaagtcgtggttttgttcggaatttgtcacggatgcctttgccaaagccgggcatccacttacactggcgcaatcgggctggattagccctgccgatctgatgcatatgcgtattggtgatgtctctgcgtttaagccagaaacgcagttacagtatgttgggcacctgaagcctgggatttatatcaaggcgggtcgctttgttgggctgactcagtgataaagccagcctcgtgcacaaaatgccggatgcggcgtaaacgccttatccggcctacaaaatcgtgctaattcaaaatgttgcattatatgctgtagatactgttatggcctgcaagttttttcctggtccggtttcccggattgcaggcatgccagacacagcgccgtcaggcgctgtttttttcatcccttccgcgatttttacgccgctaccggatt

SEQ ID NO: 110 - DNA, 7020 bp, Escherichia coli
  source 1..7020: mol_type = genomic DNA
tttacgcacctcttttcctaacaaaacgccagccatctcaaaattagaactagtgttagacatatatccaagcctatctcttattttaagatacatctactgtctggtatttcagggggccagctcaggatgcagctgcaacacggaagctggaacatcttcggtaaccggaccttgcagcacatttttcagtgcctgcgctttacctgcgccactgacaattatcagcaagtttttcgccgccatgatgcttttcggccccatcgtcacgtagctgtcaggcactaacgaaaagtcgccgcccaactcaccatgcgccacaatatcaaccatctctccctggatcgggaactccacggtttgctcatggaaatgggtcgtattcggcaaattgccacaaaaatgaccatctgcacctaatcccagcaccaccaaatccaggccgccttcacgcgccagtttctgatcatgctcgcggtagttatcaatagtgagcttctggatattctcttctttgatccccgcaggggtgaaaaacagattacgcagattggtaatcgttacaccttctccctctttgccgcgaaagggaatttcatcgaaattatagaaatagcagttatcgtaccagggcttacctttaaccagggtggtgaggtattcatacatgcctttgggcgtgctaccggcggtaattgccaggttaacacgacgcgtcttcgacatataaccaagcagatggtgtgccgcgacacggctcatttcctggtaatcttcggtaatgattaatttcatcttagtgccttattttatttaaataatttctgtacgaaggctgcataggcaggccgccagacatccatttcatggttcaggccgggatattcctggtaatcaaacttaatttttttctgctcaagctcagttttcagcccggcgatatccttgccggttacgacatctttatcaccaacgaccacagtaaaattacgtagttgctggttaatagctgccggatcgttcagccgggccgcgacaccttcatccggtacggttgtcgtggtaacaccactgaatgtggccagccagccaaagctttccagatgattcattccggaaaccagcgcctggtacccgccttgtgaaagccctgccagcgcgcgaccatcggcatctttacggacattaaaacgcttgctaatcagcgggataatatcgttcatcagttcgcgatctgccgctttagcattcagcggataaaagactttacgtctttcctgaggcacgaaatcttcgggaataatgcccttcgcatcggtttcggtatccgggatcaccaccagcatcggtttaattttcccttcagccagcaggttatccatgatttgcgggatacgcccctgatcgatagcggaacgtccggtatcaccaaaaccgtgatagaaatagagcactggcaaaggctcgcccatgccggtgtatcctggcggggtccagacatacatctgacgttcaaattgcaatgcgttggagtggtaagttatggcgatcaaatcaccatgcgcaacagaacgcgtatccagataactgcctggcaccagaatcatactggagttaacctggcgctgaggcttagtcattgcggtgcctgtatcaatgctgcgtacaccatcaacattgaaaaaatactcgtacaggttgcctttcaggataggtgtgcgccacgaccagactcctgcttcgtctttggtcatcgggtgaatattgtccggaaccggaacacccaccactacagagacattttttgccccaggggcaaagtagcgaaaggtcacgctgttatcggcattgacctgagtcacatactgtttcaccgggatagtgggtgccgggctggctggcatatccgctgctatgacccactgagcagaaataccgctggcaatagccagcgttaaagcagcaatttttatattcatcgtaatattcctttcattaagttccattaccaccagatttcagcctgggcaccgacagcaaactggtcgtctttattgtctccgaaggtgaagccatccagttcgttttccagggctttgatatacgtggcgtagaaacgaatttccggacgcgaggtcaacatactggtattgactttaaaggtatggaagagcgtggttttataaccagactcattaaatttattactattcgcatctttgttttgctgggtgaaatagcccagttcaacacctgtctggttatattggtcccaaatataggccgggcgaacaaccgcacgaatagattcgaaatcagagtgtgcgcctgtttcgtagctataaatatcgttaccgaaggagtaaacaatcgcgttagccacaataaaatgatcgccgatataggcttcgccctgcgaggtcagacgaactgctgttccgccggtgtgatcaccataataacgaccattaaaggtggtaaatggacttgcgccagcataacggccaaagttactggcgatagagttattcgcaaccaggaaggagaattcgttgaagccacctttatcaaatttctgcgttaaagatgtgccgaacatccaggtatctttccagtcataatacccgttattatcctgattatctttttccgatgcgctttcgtttgccgtgacataacgaccactcaccattaaggtcgctttatcccataacgggatatctttatagcgtaaatcaatagtattggtattaatctgctgtttgttttgcaggctgcgatcgtaatcatcgacatcttcgcgaaccagcgcgatatcaattttacccggaccgactttccagttttccagacctacacccgctgcggcatcagtacgctgcgttttccagtccagcatctggatttcaattttcggcgcaccgtgtttacccacccagaaatcagcctctggcgcaaagggcaggaaacctttggtggtaacgtacatatcggagaactgcataaagttctcgccaccggcgttatcgccaaaccagccggttgagtactgctgaccaacgttaccatccatcatcacaacggcatcaacccgtttgccgttttcgttgtagacacgttgttttaactgcaaatcaaaccagccggagtattcgttaccaaagcggcccagagaaccaatcgcccatgatttaggtgaaccatgagaggcggtcccccaaccagaacggtaatagccgttgtaactaaagccaatttcatctttcacaaacttactgaaatctttcagagtcatggaagaataaatcgagcctgtctcactggcatttttctcttcatttttgaccagtacagcatcaggttttgcggcactactggtcgggaacggattggcggcatacccttgatcattcgtacttacgctacgattcaccgtcgctggcgtatattttttcttctcttcatctttatactttttgagttcgctttgcgtttctcttaacgctttttctaataactcaaggcgttgttccaccgttaatgattcagccaatgattgtgcagaaaaggctaacggtgccattaataagatggcagaggtaataagatttcgtctaaacataatatccctttatggtgcaaagaaagaattaacgtatcgcatccagactgttctgaatgcgacgataattaaggtgctttattggttatttttttaatgacagcccccgcgttttgatcacttctgcataccatccgaagcttttcttacgcgttcttgtgaggcttccttcgccattatcatcacgatccacataaataaagccgtagcgcttagacatttgtgaatgagatgcactgactaaatcaattggcccccaactggtgtaccccataatatccacaccatcggcaatcgcttcatttacctgtaccaggtgatcgtttaaataggcaattcgataatcgtcctgtatcgaaccatccgcttcaacgctgtcttttgcgcctaatccgttctcgacaataaataacggtttttgataacgatcccaaagcgtatttaacagaacccgtaatccaaccggatcaatttgccacccccactctgaacttttcagatgcggattggggatcatattcagtatgttgccctgcgcatttttattaatgctttcgtcgtgggaaacacaaccagtcatgtaataactaaaagagatgaaatctacagtatgttttaaatcttctgcgtcactttcagtcatctcaatggtgatattgtggtcgcggaagaaacgctgcatatagccgggatactggccacgcgcctgaacatcaccaaagaacatccagcgccggttctcttccatggcctgcaacatatcctgtggctggcaggtgagggggtaaaccagcccaccgagaagcatattgccgattttcgcttcggggagcaggctatgacaggctttaactgcccgcgcactggcaaccagttgatggtggatagcctgataaacttccgcctcgccactctcttctgccagccccacgcccgtgaatggctcgtgtaacgatatgttgatttcattaaacgtcagccataacgccactttatgttggtagcgagtaaagaccgtgcgggcgtaatgctcgaagtgatcgatgaccgctcgattagcccaaccgccgtagtttttcaccagcccatatggcatttcgtaatgggataacgttaccagcggcttgatccccgcctgcgccatttcatcaaacagccgatcgtaaaacgctaaccccgcttcattcggttcgacttcgtcgccctgagggaaaattcgcgcccaggcaatggaaatacgcagacaggtgaagcccatctcggcaaataacgcgatatcttccgggtaacggtgataaaaatcgatggcgacatctttgatattctctttccccaggatgcgcggttccatttttcccattacgccatgaggctgtaaatctgaggtcgagatccctttgccatcttcctgccaggcaccttccacctgattggcagctgttgcgccaccccaaagaaatgtttctggaaatgctttcataattaactccttttatcgttagcgaatgatggataacagcggttcacctgcgcttatctgcgccgtgccgtggggtaatacgtccgtaaaatcatcgctattactgattaataccggcgtcgtcagatcaaatccggcctcgcgaatagcagggatatcaaaagaaatcagccgatcgcctgtattgaccttgtcacccacgttgacgtgagcggaaaagaatttgccgtccagttttacggtgtcgataccgacatgaatcaggagctccacaccatcatctgactcaatgccaatggcgtgtaatgtggcgaacaacgaagcaattcgacccgcaaccggagaacgcacttcaccaaccgagggcagaatggcgatacctttacccaacaggccactggcaaacgtggtatcagcgacgtgaatgagcggcacaatctctcccgtcatcggtgaacagataccgccctgctcaggtggtgtaataacctctggtgttttctcttgcggggcaccctgcgctggctgacgtttagcggtgatgaaatgaagcatcaccgtaccgacaaatgcgcaaccgatggcaatgacaccgccaataacgctggcccagacggtgaaatcaatccccgttgacgggatggtttgcatgaaggtgaaaatacttggcaaaccaaaggagtaaactttcgtttgcgcgtagccaatgatggtggcccccaatgctccactgatacaggcgataacgaagggatacttacgcggcaggttgacgccatataccgctggttcggtgataccaaacaggcccgtcaacgccgctgatcccgccaccacttttttctgcgcatcgcgttcgcagaggaagacgccgagcgccgccccgacctgcgccataatggtgggcattaacagcgggatcatggtgtcgtagcccagcacggtgaagttattgatacacagcggcaccaggccccagtgcagtccgaacatgacgaagatttgccagaagccgcccattaccgcgcccgcaaatgcaggaaccgcctgataaagccagagataaccggcggcaatcagttcgcttatccaggttgatagcggccccaccagcagaaaggtgacgggtgtgataaccatcagacatagcaatggtgtgaagaaatttttgattgccgacggtaaccacgcattaagtcggcgttccagaatgctgcacaaccaggcagaaaaaataatgggaataaccgatgacgagtaattcaacaatgtgaccggaatacccaggaaatccagccccagctcatccgctttttgcccgttctcgaaagcagtcagaattaatggatgcactaacgctccaccaatcaccatggcagtaaatggattaccgccgaagcgtttccccgcggtgtatcccaggattatcgggaagaaccaaaacaaggcatcactggcgctgaataaaattaaataagtaccactttgttcggtcgtccactgaaaagtgagcgccagagccagcatacctttcaggatcccggttgccgccatcaaaccgatcagaggcgtaaaaatacctgaaataacataaacaaagcggtttagcagattacctttctcatcattttccggtgcctgttgcgctttttcgccaaggcctgccacgctgttgaccgccaggaagacatcggccacatggttacctatgaccacctgaaactggccaccgctttccaccaccataataataccgggggtgtttttcagtacctcagcttgcgctttgctctgatgaatcccctaatgattttggtaaaaatcattaagttaaggtggatacacatcttgtcatatgatcaaatggtttcgcgaaaaatcaataatcagacaacaagatgtgcgaactcgatatttt

SEQ ID NO: 111 - DNA, 6905 bp, Escherichia coli
  source 1..6905: mol_type = genomic DNA
gctcagaaacaaggttgggacaagcacttccaggctaacacagtcagaaatcgaaacgtactctcaacagttcgcttaggcatggaagttttgcggcattctggctacacaataacaagggaagactcactcgtggctgcaaccctgcttactcaaaatctattcacacatggttacgttttggggaaattatgaggggatctctcagtgctcagcatgtttgagtgctttactcgccgcgggttgagaaatatgtaaaacttcagccgcacgcgttaaggaaccacaagtcattacagcataaaagatatcgagatgtcttaatttcattccatgtagcctactgattatttatttctacggactattctaacgaataaagtataaataatcagatatactcgtcataattcaaattttggtttagttgtcacgagaattaattcgtaaacgtgcaagctaaatagattgactaggggaatatacggggtaagaaagcggctcggcatactgccctataataaattgttaggagaagtacgccgagtagtgtgtagctattaggtaaagtatgtaccaatttcaataaatattttaattaagatactgtttgaaatatcaacaataaaggcaccgaccataggaacgacaaggaaagctttatgtgatggtccaaatgcttttgtgactgtttgcatattcgcaattgctgttggtgttgctcccataccaaagccacagtgacccgcgctgatcacgacagcatcataatctttgcccatcattttgaaggtgacaaagcaggcaaatagcaccatgacaacagtttgtacagcaatgataattaatactggccctgccatgcttgccaattgaccaaattttaatgacattaacgccattgccaagaaaagcgataaagcaacgctacctaatacatcgacggtcggctcaaacacttcgtgtttaaatacatgagtcagtgtattacggataataataccgacaaataaacaccagacaaaagtaggcagttgcagaaaagtatctttaaacaatgcactgatatagccaccaacaacaatacagataatcagcattgaaatggtttcaataacgttatttgcattgatttttcttttgacgcttggttgctcaaaagcttcaacgatagtgtcgcgctcttgctcggttgttttaggaatagagacctttttcaaaagatgacgggcaacagggccgccaactaaaccacccaacactaatccaagtgttgcacaagccatcgctaattcaacggcgcctgttacaccatatttatcagcgagaatagggccccatgctccggcattaccatgaccacctgttagagtaattgaacctgcaattaagccaataaatggactttcattcatcatgacagccatactcatgccgacagtattttgaatggcgattaggatcgttactgcaatagttaatagaactaacggctttcctcctttaatcagtcgagaaaagtcagaacttagcccgatagaggaaaagaatgtgagcattaataaactttgcaatgaagcatcaaaagtaaacgaataacctgatgttttatcaataattaacagaacaattgcaacaataaagccaccaacgacggcttctggtatgtggtttttttgtaggaacggggtaaattttacgacaaacattcctatgagtagcgcgatacatgcgactaataatgtataactggcatctaggatcatttttttacctctattagtttaccagaattttcactataacaatttaacaatagtgaaaaatgaagttactttggttaactaatctttaacaatgagttttattagggtatccataacttttagttaatagggtcataattttagtgtgatcttaatcatgaaatattaaaaagattaaaataacaacaatggtatttaatgatgggtaaacctaaataccatgcgggatccgcactattttcggtgatagcaaaaaataaaaaagtataaataataaacaaaattataagagaaggagaacatgataagcgcaggccgagcaatttaaagaagtgtgatatacaacataaaacagcagcatgacctttctatatttcgttgcttatcgaagtgttaattttcgggtggattactctgtttgttgattaataacggagaaaaatatgattgctgtaatatttgaggtgcaaatacaacccgaccaacaaactcgctatttgactttagctgaggagttaagaccactattaagtcatgtagctggttttatttcaattgaacgttttcaaagtctagctacagaaggaaaaatgttatcgctatcttggtgggaaaacgaatacgcagttctgcaatggaaaaatcatgttttacatgcgaaagctcaacaagaagggcgagagtcaatatttgatttttacaaaattagtattgctcatattactcgcgaatattcatttaaaaaggacaaggataatgtttgatgttcacgttgttttagataatcaaataggacaattagcattactaggaaaaacattaggtaataaaggtattggattggaagggggagggatatttacggttggtgatgaatgccatgctcattttcttgttgaacaaggaaaggaagctaaaatagcgctagagcaagctggactgttagtacttgcgatccggacaccattaattcgtaagttaaaacaggaaaaaccgggggaacttggcgaaatagcacgagtattggcggagaataacattaatattttagtgcaatacagtgaccatgctaaccaactgatattaataacggacaatgatagtatggctgcatctgttacgctcccttgggcaataaagtgaacttgcgatggctaatttaatacgaaaagaggttacctttgagtcctcaatagccgcgataggggcggctatgtctgacatttcacgagttaaaatactcagtgctttgatggatgggcgagcttggacggccactgagctaagttctgtggcgaatatatcagcttcaacggcgagcagtcatttatctaaattattagattgccagctaatcacagtagtagctcaaggcaagcatcgttattttcggctagcaggaaaagatattgctgaattgatggaaagtatgatggggatctccttaaaccatggcgtacatgccaaagtttccacgccagtgcatttacgaaaagcacgtacttgctatgatcatttagctggcgaagttgccgttaagatctatgattccctttgtcaacagcaatggatcactgaaaatggttcaatgatcacattaagtggtattcaatattttcatgaaatgggaattgacgttccttccaaacattcacgtaaaatctgttgtgcgtgtttagattggagtgaacgccgtttccatttaggtgggtacgttggagccgcattattttcgctttatgaatctaaagggtggttaactcgacatcttggttaccgtgaagttaccatcacggaaaaaggttatgctgcttttaagacccactttcacatttaagttgtttttctaatccgcatatgatcaattcaaggccgaataagaaggctggctctgcaccttggtgatcaaataattcgatagcttgtcgtaataatggcggcatactatcagtagtaggtgtttccctttcttctttagcgacttgatgctcttgatcttccaatacgcaacctaaagtaaaatgccccacagcgctgagtgcatataatgcattctctagtgaaaaaccttgttggcataaaaaggctaattgattttcgagagtttcatactgtttttctgtaggccgtgtacctaaatgtacttttgctccatcgcgatgacttagtaaagcacatctaaaacttttagcgttattacgtaaaaaatcttgccagctttccccttctaaagggcaaaagtgagtatggtgcctatctaacatctcaatggctaaggcgtcgagcaaagcccgcttattttttacatgccaatacaatgtaggctgctctacacctagcttctgggcgagtttacgggttgttaaaccttcgattccgacctcattaagcagctctaatgcgctgttaatcactttacttttatctaatctagacatcattaattcctaatttttgttgacactctatcattgatagagttattttaccactccctatcagtgatagagaaaagtgaaatgaatagttcgacaaagatcgcattggtaattacgttactcgatgccatggggattggccttatcatgccagtcttgccaacgttattacgtgaatttattgcttcggaagatatcgctaaccactttggcgtattgcttgcactttatgcgttaatgcaggttatctttgctccttggcttggaaaaatgtctgaccgatttggtcggcgcccagtgctgttgttgtcattaataggcgcatcgctggattacttattgctggctttttcaagtgcgctttggatgctgtatttaggccgtttgctttcagggatcacaggagctactggggctgtcgcggcatcggtcattgccgataccacctcagcttctcaacgcgtgaagtggttcggttggttaggggcaagttttgggcttggtttaatagcggggcctattattggtggttttgcaggagagatttcaccgcatagtcccttttttatcgctgcgttgctaaatattgtcactttccttgtggttatgttttggttccgtgaaaccaaaaatacacgtgataatacagataccgaagtaggggttgagacgcaatcgaattcggtatacatcactttatttaaaacgatgcccattttgttgattatttatttttcagcgcaattgataggccaaattcccgcaacggtgtgggtgctatttaccgaaaatcgttttggatggaatagcatgatggttggcttttcattagcgggtcttggtcttttacactcagtattccaagcctttgtggcaggaagaatagccactaaatggggcgaaaaaacggcagtactgctcggatttattgcagatagtagtgcatttgcctttttagcgtttatatctgaaggttggttagttttccctgttttaattttattggctggtggtgggatcgctttacctgcattacagggagtgatgtctatccaaacaaagagtcatcagcaaggtgctttacagggattattggtgagccttaccaatgcaaccggtgttattggcccattactgtttgctgttatttataatcattcactaccaatttgggatggctggatttggattattggtttagcgttttactgtattattatcctgctatcgatgaccttcatgttaacccctcaagctcaggggagtaaacaggagacaagtgcttagttatttcgtcaccaaatgatgttattccgcgaaatataatgaccctcttgataacccaagagggcattttttacgataaagaagatttagcttcaaataaaacctatctattttatttatctttcaagctcaataaaaagccgcggtaaatagcaataaattggccttttttatcggcaagctcttttaggtttttcgcatgtattgcgatatgcataaaccagccattgagtaagtttttaagcacatcatcatcataagctttaagttggttctcttggatcaatttgctgacaatggcgtttaccttaccagtaatgtattcaaggctaattttttcaagttcattccaaccaatgataggcatcacttcttggatagggataaggtttttattattatcaataatataatcaagataatgttcaaatatactttctaaggcagaccaaccatttgttaaatcagtttttgttgtgatgtaggcatcaatcataattaattgctgcttataacaggcactgagtaattgttttttatttttaaagtgatgataaaaggcacctttggtcaccaacgcttttcccgagatctcatctattgaaacagcttgatagcctttttcaacaaacaatattcgtgctgagttaaccagtgattgataggtactcttaaaattttcttgttgatgatttttattttccatgatagatttaaaataacataccgtcagtatgtttatggtatcatgatgatgtggtcgtgacaatcttaagaacatttaggttattttatgtatattgaacagcattctcgctatcaaaataaagctaataacatccaattaagatatgatgataagcagtttcatacaacggttatcaaagatgttctattatggattgaacataatttagatcagtctttactgcttgatgatgtggcgaataaagcgggttataccaagtggtattttcagcggctgttcaaaaaagtaacaggggtcacactggctagctatattcgtgctcgtcgtttgacgaaagcggctgttgagttgaggttgacgaaaaaaactatccttgagatcgcattaaaatatcaatttgattcccaacaatcttttacacgtcgatttaagtacatttttaaggttacaccaagttattatcggcgtaataaattatgggaattggaggcaatgcactgagagatcccctcataatttccccaaagcgtaaccatgtgtgaataaattttgagctagtagggttgcagccacgagtaagtcttcccttgttattgtgtagccagaatgccgcaaaacttccatgcctaagcgaactgttgagagtacgtttcgatttctgactgtgttagcctggaagtgcttgtcccaaccttgtttctgagc

SEQ ID NO: 112 - DNA, 6566 bp, Escherichia coli
  source 1..6566: mol_type = genomic DNA
tctgaggcagcacctggcacggctgggacggaagtcgctgtcgttctcaaaatcggtggagctgcatgacaaagtcatcgggcattatctgaacataaaacactatcaataagttggagtcattaccctcaaaaccgctggcaacaaacatcgcgaccggcagcaccataatgaacgctttgtccatcaggctacggccagaataactcatccatactgccagacataccatcaggtttgccaggataccaaggcagacggcctcaataaaagtatggtgcactttgtggtcggcggtttgtaggacgtttagtccccattgaccatttgcggtcatatactcgccggaaagccacattaaaagtacaaacagcagtgcgccgaccaggttgccaaaatagacatttagccagtttttcgccaactgaccccaggtgatgcgcccactcgccttagcaacaacaatcaacactgtggaagtaaagagatcggctccgcagacaacacaaagaatcagccccagagagaagcaaatgccgccaaccagttttgccatgccgaagggcattgtgcctgtgccagtggttgctgtgatatagaagacgaatgcgattgagatgaaaacaccggcggtaatcgccagatagaaagtcttaagcggatgtttcgttgctttatagacacccgcctcttcggccactttggccattgcagcaggaagtaaaagatcaaaagggttgtcagctttcacactaactctctctttattaagtcggcgacgagatactaacaaagcattatagatgagaaattgatatagatcatatctcgcctggcttataggcccgtaactcgcatggtttttatgcaaatacggagtaaatatttgattatccaaataaaaataaattttaaaaattaacaaatgagttgaattttttccgcatcctccgctaaaacagttaattaaaagggagcatcaggcgaataaagtaacaatatcgatcgtatttattaaatacaaattaccgatatttaaccttataattacaattattttattaatgcaaatatatgtaaagcggggcattaaaaaaacgccccgtaatataactcagactaatcattaagcctacattgcgtaggctatttgattttattttgcccagaatgctgctttggcgcgctgcagcttttcgtaggccttcaacaacgactgatgtgcagcaaacgcgtgcagatcgctatctaccggttgcaggccgtaaaacgccgcttcgccgctcattgccgcactggcggcttctacggcatctgcgccgtacatgcgaacaaacgcattcagatattgcagcggctggcgatcttcttcctgtgccagtaataacaacgtttgcaggcagcgataatagttggcgcgttccggactaaatactgatgagttaaactccatcgtccattcggtccagaccagagcctgttccagatcgccaccagccagcgccagcatggcttttaattcaccgatacgcagggtgtaccaaccgttatccgacccggtcgccagacccaacagctcacgcacgcgggtaaagtcatcaaaaccttcttcatccagttgctcgatgaggttcaggtaatcttctttttcccactcgctgcctggtagcgaaagaatcgtttcacgtaaatggctgcccatactgttattcgcgagccacagatcttcagccggataaatatcggacatgccaggcacgataatacggcaagcataaacgcccagatgctcgtaatcggcaatataaacttctttatcttctttgttgaagatagccatcagtgtggcgaactcttcttccgtggtgccggagaaattccagtccacaaacggataatcggcatcctgcttgaacaggtcccaggagattaaaccgctggaatcgataaagtgcgtttcgaggttggtatgttcagcgacttcttcatcatcgaaggttggcggagtaaacacatccaaatctttcaggccacgaccttgcagcagctcggtcacggtacgttccagtgctacgccaaaatcaggatgcgcaccgaaagaggcaaagcaggtaccgttagcaggattgaacagtaccacgcaaatcaccggatactggccgccaagcgaaccgtcataagcgaagattgggaaaccctccgcttccagcgtttcgatggcttcaactactgctgggtaacgcgccagcacgtctgccgggatctctggcaggctgatgctttcagcaataatgcggtttttcacgtagcgttcgaaaacttcagacaatccctgaacgcgtgcttcgttgcgggtattacctgcggacataccgttggagacgtacaggttaccaatgatattcatcggaatataaacggtctgattgtcggactgacgcgtaaacggcaggccgcaaataccacgatcttcgttaccggattgtaggtcaatcagcatgctgccggtcagttcattctccggatcataaaacgcgcgcagacggtcatcgagtagtccttctggcacatcgtcattttcggtcagtgggaaccatttttcgttgggataatgcacgaacggaccgttggcgatggtttcgcccagccagaaatcagcaaaaaagtagttggttgagagacgctcgaaatattcaccaagtgcagaagccagcgccgcttttttggttgcgcctttaccgttggtaaaacacagtgcgcactctttgtcgcgaatatgtacagaccagacgttaggcacaggattcagccaggaggcctcttcaatctgaaagccgaggtctgaaagtttttgctggaagcgagcgatggaatcttccagagcggcatctttgccggggataaatgtttgcgtcatgaaaatcactttagtcgtacggaaagcgcgcaataatacgggttttatctcaaaggcgctatcaccgccgccatgccgatgaactgttgactatgcttttagcggataaaccacgataagagcataaaaatgaaggcgttcgatctccaccgtatggcatttgataaagtgccttttgatttccttggcgaagttgcactacgtagtctttatacctttgtactggtttttctgttcctcaaaatgaccggaagacgcggtgtgcgacagatgtcgctgtttgaagtgttaatcattctcacgctgggttcagcggcgggagatgtggcgttttatgatgatgtgccgatggtgccggtacttatcgtctttatcactctggcgttgttataccgcctggtaatgtggttgatggcgcacagtgaaaaactggaagatttactggaaggtaagccggttgttattattgaagatggcgagctggcctggtcgaaactcaataactccaacatgacggaatttgagttctttatggagctacgattgcgtggcgtggagcagctggggcaggtacgtctggcgattctcgaaaccaacgggcaaatcagtgtctatttctttgaagatgacaaggtgaaaccgggtttacttattttacccagtgattgtacgcagcgttacaaagtggtgccggagtcggcggactatgcctgtattcgttgtagtgaaatcattcatatgaaagcgggggaaaaacaattatgtccgcgctgtgcaaatccagaatggacgaaggcaagtcgggcaaaacgggtgacctgacagtaaaaacatcggctttttgctaataatccgagagattcttttgtgtgatgcaagccacatttttgccctcaacggttttactcattgcgatgtgtgtcactgaatgataaaaccgatagccacaggaataatgtattacctgtggtcgcaatcgattgaccgcgggttaatagcaacgcaacgtggtgaggggaaatggctcaaatcttcaattttagttctggtccggcaatgctaccggcagaggtgcttaaacaggctcaacaggaactgcgcgactggaacggtcttggtacgtcggtgatggaagtgagtcaccgtggcaaagagttcattcaggttgcagaggaagccgagaaggattttcgcgatcttcttaatgtcccctccaactacaaggtattattctgccatggcggtggtcgcggtcagtttgctgcggtaccgctgaatattctcggtgataaaaccaccgcagattatgttgatgccggttactgggcggcaagtgccattaaagaagcgaaaaaatactgcacgcctaatgtctttgacgccaaagtgactgttgatggtctgcgcgcggttaagccaatgcgtgaatggcagctctctgataatgctgcttatatgcattattgcccgaatgaaaccatcgatggtatcgccatcgacgaaacgccagacttcggcgcagatgtggtggtcgccgctgacttctcttcaaccattctttcccgtccgattgacgtcagccgttatggtgtaatttacgctggcgcgcagaaaaatatcggcccggcaggcctgacaatcgtcatcgttcgtgaagatttgctgggcaaagcgaatatcgcgtgtccgtcgattctggattattccatcctcaacgataacgactccatgtttaacacgccgccgacatttgcctggtatctgtctggtctggtctttaaatggctgaaagcgaacggcggtgtagctgcaatggataaaatcaatcagcaaaaagcagaactgctgtatggggtgattgataacagcgatttctaccgcaatgacgtggcgaaagttaaccgttcgcggatgaacgtaccgttccagttggcagatagtgcgcttgacaaattgttccttgaagagtcttttgctgcaggccttcatgcactgaaaggtcaccgtgtggtcggcggaatgcgcgcgtctatttataacgccatgccgctggaaggcgttaaagcgctgacagacttcatggttgagttcgaacgccgtcacggctaatgccgaaattttgcttaatccccacagccagcctgtggggtttttatttctgttgttgagagttgagttcatggaatccctgacgttacaacccatcgctcgtgtcgatggcactattaatctgcccggttccaagagcgtttctaaccgcgctttattgctggcggcattagcacacggcaaaacagtattaaccaatctgctggatagcgatgacgtgcgccatatgctgaatgcattaacagcgttaggggtaagctatacgctttcagccgatcgtacgcgttgcgaaattatcggtaacggcggtccattacacgcagaaggtgccctggagttgttcctcggaaacgccggaacggcaatgcgtccgctggcggcagctctttgtctgggtagcaatgatattgtgctgaccggtgagccgcgtatgaaagagcgcccgattggtcatctggtggatgcgctgcgcctgggcggggcgaagatcacttacctggaacaagaaaattatccgccattgcgtttacagggcggctttacaggtggcaatgttgacgttgatggttccgtttccagtcaattcctcaccgcactattaatgactgcgccgcttgcgccggaagatacagttattcgtattaaaggtgatctggtttctaaaccttatatcgacatcacactcaatctgatgaagacgtttggtgttgaagttgaaaatcagcactatcaacaatttgtcgtaaaaggtggtcaatcttatcagtcaccgggtacttatttggtcgaaggcgatgcatcttcggcttcttactttctggcagcagcagcaatcaaaggcggcactgtaaaagtgaccggtattggacgtaacagtatgcagggtgatattcgctttgctgatgtgctggaaaaaatgggcgcgaccatttgctggggcgatgattatatttcctgtacgcgtggtgaactgaacgctattgatatggatatgaaccatattcccgatgcggcgatgaccattgccaccgcggcgttatttgcaaaaggcaccaccacgctgcgcaatatctataactggcgtgttaaagagaccgatcgcctgtttgcgatggcaacagaactgcgtaaagtcggtgcggaagtagaagaggggcacgattacattcgtatcactccaccggaaaaactgaattttgccgagatcgcgacatacaatgatcaccggatggcgatgtgtttctcgctggtggcgttgtcagatattccagtgacgattcttgatccaaaatgtacggccaaaacatttccggattatttcgagcagctggcgcggattagccaggcagcctgaatgaacaacgggcaataaatagccaaatctttctttatcaaaacgtcggcacattgtcgtaatgccgatcagttaaggatcagttgaccgatccagtggctgtgtaagaatccggaaacgctcactcgtttccggatttttttatgcacattggacaggcccttgatttggtatcccgttacgatt

SEQ ID NO: 113 - DNA, 6406 bp, Escherichia coli
  source 1..6406: mol_type = genomic DNA
atatcgagttcgcacatcttgttgtctgattattgatttttcgcgaaaccatttgatcatatgacaagatgtgtatccaccttaacttaatgatttttaccaaaatcattaggggattcatcagtgcgtagcatgtgaaacagttaatgtcagcaaatgtctcaaatgagcgattttttatagtgacaaacagtaataacgttaaaaatagccatgaagacattaactgaggaatagacaatgttagttagtaaaaacaacgaatttaacactagctcatttatagatagtggaaattgtaatgaaagaaaatcttctgaatccatggagctactagcttatagtattataaatttaatttgtaagaaagctgcctcagggacgtatcgcggtgctcttgaaactttacaaaaaatgatgtctgaatgtatatatcatgaaggcaacgcctttgtcattatgggagttggagaacaattaaaacgtattaaatatgaagttggtgaaaataacttaaaggtattcaacgtacactttaataataatcacgagttagttagttctggtgagcctgacgtaatatgtttaagcaagcaggtctgggaaaatcttctcattaaactaaagctggaaaacaatgaaaatgtgttttctgaaactaaaaaattatcgaataaaaataatgacgatcagttttttgaatgcgctaaaagaaatgaacagaaccttttcgataatataagaaaaagtgattttcatgttggtttacttaagccaagtagtacgcgtagtgttattttagaaacgccgccaaatgtctgtatggaatcacgtaattcatatgaaaaaaaatagatgagatttcatctttgtcagagtcaaaggaacaccccatagatattcaagaaaaaaaagatgcgtttgtgaatgagttcaaggggatattatttgataaaaatggaaggtcttcagagtttctacttaatttttatgaatgttgctatgagtttttaccaagagcgcagcctcaggataaaatcgaaagctataattcagcactgcaagctttctccatcttttgttcatctacgttgatacataataatataggctttgatttcaaattatttccagaagtcaaactgtgtggggaaaatcttgaaacggtattcaaatataaaaatggcgatgatgtccgggagatagccaaaattaacattactctccaaaaagaagaggatggtttatataatttaggtggattgaattttaagggatgcttcttttctggacagaacttcagtaactatgatattcaatatgtgaactggggaacgtcattgtttgatcttgatactccgtgtatttttaatgcgcctgcttacaacaagagtaatgaaaaatcattaaaacctgtgagcgaaaacggtttaagtggagtcttgactgatcgtaataataaaataaaactcatcacgggcgtggcaccattcgatgatattttatttatggatgatgactttgatgatagttcctctgaggatgatcccgttgagaatagtcctgttgtgactagtcccgttgtatcaagttctaaaagcagttttcaatgattaataaatggctatttttacaaagagataataacgtagattgaaacaatatgtattattgattgattaaacgggattattttttacactacaaccattttgctgccactaccaaagaaaaaggggctacgctttcacgtaaccccttgatttatttgttgagctggcggtgtctgaattggtgctgtaattggttgaaatatttattctaatgtctggttcaactttccttagctgcctgaaagtttttttgatcttacccatcaataatagggttacggtacaccacgcctgactgatgaactgcgtgctcagggttacctcttcaacgtaaaaccgtggcaggaggtccggactgaaaaaactgctcaggacattatcggcggtggacgcacgggtagtctgtaaaccgaaccgactggggcgcagtatgtggcatcttgtcgtgctgttggaggagctgtgcaaacgtggtattaactttcgtgctctggcccaatctatatttgcccaacaatggggggacgaatgctgtaaaagtaaaagaatctgcgatctcaaagttattgtgttatttttatgtgagcagaagatattcatcagaaacgattatgtaaatcattttattttgccgacggcctgattgtcgaaagaaaagaatacccccgtattccctgaatagattgacttttttatccaaccatacttcagcgcactgcgtttaaaaaatgcttctttcttatgtggaatatcatcatttcatcatgatgtctttgatgagcggtgaacacaatacacttgcgctgtctcttcaggatgaatcccctggtctggtgcctgtgggctgatgttgcagcagagctaaggtcgcttaaacgctactcagtattcacttttcagaggatgaaatttatgaacaggaccagtccccattattgtcgccgctcagtactttccttattgatatctgccttgatatatgccccgcctgggatgacggccttcactcctgatgttattggtgtggtaaacgatgagactgtagatggcagccaaagagtagatgaacgaggtacaacaaataacactcatattatcaaccatggccagcagaatgttcatggcggggtatctaatggaagtcttattgaatcgggtggatatcaagatgtaggaagtcataacaattttgtggggcaggctaataatacaaccattaacggaggaagacagacaattcatgacgggggcatttccaccggtacgataatcgacagtggcaatcaggacgtttatacaggtggtatcagcaatggaacgacaattaagggtggtaattcacacataagtggggggactgcgaatggaaccatcattgatggtggagggcagacagtaacaactcaggggcatgttgatggtacaacgataaataagtccggttatcaggacatcacgcaaggaagtattgcaacgaacacaatcataaatggtggacgacagtatgttgaacagagcacagtaggaacaaccaccattaaaaatggcggtgagcaaagagtatatgaaagccatgcgctggacacgacgattgaaggtggaactcagtctctgaataataagtcaacggcaaaaaatactcagatctattctggtggtacgcaaattgttgattacaccagctcctcggatgttattgaagtttattccggtggcgtgcttgatgttagtggtggtacggcaacaaatgttacccagcacgatggtgcaattttaaaaacaaacactaacggtacgacggtgagcggtacgaatagtgaaggtgcattctccatccgcaatcacgtggcagacaatgtgttgctggaaaacggtggtcatttagacataaacgcatatggttcggcaaacaagacgattattaaagataaaggaacaatgtcagttttaacgaatgctaaagctgatgcgacccgaatagataacggcggggtaatggatgttaccggaaacgcgaccaataccataatcaatggtggtacacagaatattaataatcatggtattgccacgggtaccaatatcaacggcggaacgcaaaatatcaagagcggcgggaaagctgacacgacaattatatcctccgggagccggcaggttgttgagaaagatggtacggcaactggcagcaatattagcgccggaggctcgctgattgtctataccggtggtattgcacatggggttaaccaggagacgggcagtgctttagttgccaacacgggcgcagggactgatattgaaggatacaacaagctctctcacttcactattaccggaggggaggctaattatgttgtgctggaaaataccggcgaactgacggtagtggctaaaacctcggcgaaaaatactaccgttgatgctggcggtaagctgattgtccagaaggaggctaaaacagataccaccagacttaataatggtggcgttctggaggttcaggacggtggtgaggctaagcatgttgagcaacaatccggcggcgcattaattgcttccacaacttccggaacccttatcgaaggaatcaacagttatggtgatgctttctacatcaggaattcagaagctaaaaatgtagtgctggaaaacgctggctcattaacagtcgtcactggttcccgggcagttgatacgattattaatgccaacggcaaaatggatgtttatggaaaagatgttggcactgtactcaatagtgctggcacccaaacaatatatgccagtgccacttctgataaagcaaatatcaaaggtggcaagcaaacggtatatggattagccactgaggcaaatatcgaaagtggtgaacaaattgttgatggtgggtcaacagagaaaacacacatcaatggtggcacgcaaaccgttcagaattatggtaaggcaatcaataccgatatcgtctctggcctacaacaaattatggcaaacgggacagcggaaggttccattattaatgggtgttcacaggtagttaatgagggcggtctggctgaaaactcggtgcttaatgacggcggcacactcgatgtgcgggagaaaggcagcgcaacggggatacagcagagtagccaggacgctttggttgcaaccaccagggcgacgcgggtcacaggaacacgcgcggatggcgtcgcgttcagcatcgagcagggtgcggcgaacaatatcctgctggcaaatggcggcgtgttaaccatggagtcagacacctcttctgacaaaacacaggtcaatacgggcggacgggagatcgtcaaaacaaaagccactgcgacaggcacgacgctcaccggcggcgaacaaatcgtcgaggggggggcgaatgagacaacgattaacgacggcggaatacaaacagtttcagctaacggagaggcaataaaaacaaagatcaatgaaggcggtacgctgacagttaacgataatggcaaagcgacagatatcgtccagaacagcggtgccgctctccagacgagcacggctaacggtattgaaatcagcggtactcaccagtacggcactttttccatttccggcaatttagcgaccaatatgttgctggaaaatggcggtaatttattggtattagcaggtaccgaagctcgcgactccacggttggcagcggtggagccgccaacggcagttatcgcagcaacgggctgggcggtcacattgaaaccgggatgcgatttaccgatggtaactggaacctgacgccgtatgcatcgttaacgggggttcaccgctgataaccctgaatatcatttatccaatggcatggaatcgaaatcagtcgatacccgcagtttatatcgtgaactgggtgcaacgctgagttacaacatgcgtctggggaacggtatggaagttgagccgtggctgaaggcggctgtgcgcaaagaatttgtcgatgataaccgggtgaaagtgaatagtgacggtaatttcgtcaatgatttgtcgggcagacgtggaatataccaggcaggtattaaagcctcattcagcagtacgttaagcgggcatcttggggtggggtatagccatggtgccggtgtggaatccccgtggaacggggtagctggtgtgaactggtcgttctgaccatcaacgaaaaagcccacatctgtgggctttcatgtcaccaggagccgcggctcctttgcgtatccttttatgtctcttcaccgtctggtcggtgtcctgctgagactgctaacttcctgtttttattggtgttgtccttataccgtccaatcatgattggtgggctggcggagtttgaataaatattatattgctttgatttttaacgattttgtttaattcagtttttgtgcgtatacctaatcgtataccaatggctataagttaatgtgaaatgaaagcgcatttttacttggattgatgctatatcgtacaggaaaaaaattttttttcgaaagaactgttcacactgttcaccctttgattttctccttttatttcatagtgataggtggtgaataatgggtgaagggtgaacattcgattcttcacctccggcattctgccggtgtgactcataccggtgattaatcccccgcactgaaatcacacagggagaaaaaagttttttttgatttgattgttcacactgttcacctttcatttttctcttttaatttcagtgtgataacgggtgaatatacggtgaagggtgaacagtggattgttcaccttc

SEQ ID NO: 114 - DNA, 6050 bp, Escherichia coli
  source 1..6050: mol_type = genomic DNA
tctgaggcagcacctggcacggctgggacggaagtcgctgtcgttctcaaaatcggtggagctgcatgacaaagtcatcgggcattatctgaacataaaacactatcaataagttggagtcattaccgccgtcatgttactgagcggatgcttaaccgccccgcctaaagaagccgccagaccgacattaatgcctcgagctcagagctacaaagatttgacccatctgccagcgccgacgggtaagatctttgtttcggtatacaacattcaggacgaaaccgggcaatttaaaccctacccggcaagtaacttctccactgctgttccgcaaagcgccacggcaatgctggtcacggcattgaaagattctcgctggtttataccgctggagcgccagggcttacaaaacctgcttaacgagcgcaagattattcgtgcggcacaagaaaacggcacggttgccattaataaccgaatcccgctgcaatctttaacggcggcaaatattatggttgaaggttcgattatcggttatgaaagcaacgttaaatcgggcggtgttggggcaagatattttgggatcggtgcagacacgcaataccagctcgatcagattgccgtgaacctgcgcgtcgtcaatgtgagtaccggtgagatcctctcctcggtgaacaccagtaagacgatactttcctatgaagttcaggccggggttttccgctttattgactaccagcgcttgctggaaggggaagtgggttacacctcaaacgaacccgttatgctgtgtctgatgtcggctatcgaaacaggggtcattttcctgattaatgatggtatcgaccgtggtctgtgggatttgcagaacaaagcagaacggcagaacgacattctggtgaaataccgccatatgtcggttccaccggaatcctgacagataaaaaagccggaattatcatccggcattttactgtttaagcgaaagcgtgagtgcccctcacgctttatttttgatttcctgctcacggtgagccgtctttgcactacgcgccgccagccacaggccgctgtttttcattgcgtaaccaaataccagcccaagcgccagcgaaggtaacaccagtttccagtcaccctgcccggcaaacgtcgcgcatgcgcctataaacgtccccggaacaaatgaaagcagcagctgtttggcctgaatacacatcagaaacgccacaataccggttatgacataaccgagaatttccagatgtggtgccagtgcactaccgtaaataatgaccatcgcccacaccacgccactaatcagggttgcagcggagatcgccagccctttcagcccaccttgcgggcaagcaaagtaggccgtacagcccaggaagcccgcccagcttagtaagcccagggaaacagccacccatccccagataccggagagaatgcctgttgtgattgcaatagagagaagtatgttcatgccgcgcatgatagcagaaaacgcggccatgaatgagatcgagcacacattttatgcaacaacaaattatctgttgcagttatgagtgacgatgatcacatttactcttcagaatcttcttccagctcgtcccacattgcactaatggcatcacgggttagcggtgccatggtgcgccagaaaggcgtggttgcatgggcctccactttgccgaggaacgcaccacaccagggtaacagatactcactgaacagtgtttccagtgcttcgctctcatcttccgttgactgatcttccagccaggaagccgcaagcagcaatgtgccgatgtgatcggctggcgtatccgccagtggcatccctcgttcggaaagaaaagcgcgcacttccgcttccgttgcgtcctcaacccatgcgctacgatatggcggcacggcacattcatcgccgataaacaacgcattgtaatcggcagagacttgcgccatatcacagcttttctgtaaacgcgtcagtaactcatcctgctccagtggccagttcgcagccagtttcccctcacgaatcagggtaaacagcggcaccagtaaaggatcttgcggttggcggtaatagagcgaacccagcacacgacagaggatagaaaactcgttcattaatatatttccattactagtaattaaaggtctgcaaattccgcaatcggtgccataccgcgagattcaaggaagttcagtaagcggcgcggagaaacattcaaaatgcgctctggcggaaaatctaccgcgtcgaggattttaagacactcttcaaattcccccatggtaaacgcggtgtgagaatccgagcctaatgccacccaacctccagcatcacgtaccgctgcggctaccgcacgacagttgtcttcactgcccttacgtgagtgtaaaaatgaagaattattgatttccagcgccacctgatgtttcgcggctgcttcagcaacggctttcacatctatttcatatttgggatttccgggatggcttattatatgcacattgccgctggcgatagtggcgatcatcgcttgtgtattggtcgctttgtcatgtggtgcaaaaaccggctcatgaaaaccggcaataatcagatccagcgagtcaaacattttaccgctgcaatcaatttcaccatcaacatttttaatgttagcttcgatgccgcgcaggatccctaccccatcaaccactcgcggccagatacgcatgttaatgaagtgccagtgatgcggagcatcttccatatccgggccatgatcggtgatcgcaaaaagtttaatgcccttttgtttggcctgggcaatgtaatcactcaatgtgctatatgcatgtgtgctggcaacggtatgcatatgaaggtcgacgggatacataactctctcctgtattcaattcccgccaaggatagcaggaatcctgatgctttattagtagccgcgtgcgcggtcgacttgcccgcagaccctctcccctttttcgagctgggcaatggtgcgagaaatgtactccacagcttcagcgggacgggtaatcgcggcgacatgtggtgttatcgtcacgcgtggatgttgccagagcggactttcaggcggtaagggttcacgattaaaaacatccaagcatgcgcctttaactttcccgctatccagcgccgcgagcaggtcatcttccacaacatgaacaccacgcgccaggttgaggagatacgcgccatccggtaatttttcgagtaattgttgattaataatgccgacggtttcaggggtattcggtaacaaattaatcaatacccgacattggctcagaaatgcagacagttcttcccgtccggcaaagctttgcacgccaggccacgatttacgggttcgactccagcaacgcagcggaaagcgccaggtttgcagactctgagcaactttactgcccagtacgcctgcgcccaaaatgccgatggtaaaatcttcccgatgatattccggcagcggttgccaatgcgaactattttgctggatgcgataatcgtcaaaacgtcgaaaccaatgcagcacctgactgacagcatattcctgcatttgctcgcccataccggtatcttccaggcgaaaaagtggaacagaagggttcagcatttcagggtgtgcctgtagcttgctcaaaatagaatcaacaccggccccgagtgcgaacaccgctttaagatcgcgccctgccagcatttcaacaggaggatgccagactaaagcataatcagcagagtcattatctccgcttttccacgctctgactcttgcctgaggaatagctttgcgcagtgcctcaatccaccattgggtatcgaacgttgggtgataaaagatgatatccatactgactcccgaaaagcgttgtgcgaaatttattcgcacttatcgttatgatctacaaaggccaccagcataacaaatccgtggtcggtggcaaaaaaagcagatttcgcttattaaaaccacacattgattgaagtttgaataaacgcgcgattttttcaaaaagtttgttgacctcaggtcatgatttccctaaattagcgcccgttccagcaagacaggaacgacaatttggtgaggtgtccgagtggctgaaggagcacgcctggaaagtgtgtatacggcaacgtatcgggggttcgaatccccccctcaccgccatatttaaagaagagctcgtacgaaagtacgggcttttttttcgtatattgcacacaccggggggatgagaagccccgaccggggttcgacaactggcgacagccagttggacagaccgtgaacgcagtgagcgggctgcccgcagggcgagcgaagcgagtcaatccccccctcaccgccatatttaaagaagagcccgtacgaaagtacgggcttttttttcgtatattgcacacaccgggtgcccccgcccacgtctgttagggcgaggggaaattgtgcacatcaactgtctggttactcagtcaacaatcaaaatgcgcaagatagtagagaacatatatgcgttatctggtcacttcctgtaacttcctcacttattaaaatgcccccaacggaaatacatgtcacatgccatcataaaatcgttatgccagaggcatcgacaatggaaaaaatagtaaattaagcacggtacatagcagagtaaaaaataggcttcaaaccaaatccgccattctacaagcgttgccaataccgacaccagcgtaatccacatcatttcaataaccagcaatatgaataaccgaagccaaagcggcttggcaaaaaaggtcgacaacgcattttcactggagaaaaacagatcgatttcctgcaaaaaaagcctgcccagaaaagcgtaccgcttggagaagcgcagaaaaaacagattaatcgccaacactacgccacaaagaatgagcaatgcaattatcgatttaaacgttaaccactgcccctctgtcacaaaagaatcactgttacgtaacgggctgatagtaagcaggttaacaaccgttgagatgcacaccgaaagcagcacatagcgagtcagacttttatattttacttttttcgctactgaaatagcgacctgcttgacataactggtgcggatcatccgaaacagcagaaagatgaccaacggcccaagtaacgaaatcaggaacagcgcatataacgagggtagaagctggtatagcccccaactcattgcactcaacatgattaacgacagaaatcctgccaccagaggttgtgtaagaaataattctattttgtggttctgctttttcttaaaccacgaaaaatcgatattcttcgtgacgcatttataagcccagtacgccttgagatcaaaaataaaattatacagcaccagggccagaatcccactaacgacaccaatatcctctgatggaaaagtaaatcctgcatttttccaataaaagcctatcagaataagtccaatagcataaatgtatatcagatttcgtttatcctgaaagcgaataaaagttaaataatcaggaatcatttgaatacctttgcatcactaaatgctttacgacaatgcataactcgttgctgatccacgccagcaaaatcatttaacatattccccaaatagggcttattacttatttcaaggaaagctaccggggttggcatattcagaaatgtatcgagagattcagtccatttcaccgtatgggttaagtgtaatgagagattttctttgataattgacggagcgacctcgctttttgctgttacgttcatcagaacctgatgctctggcgaagcgatatccagtccggcaagataatcgcgcattgcctgaacgccgtcttccatcaaacgcgtgtgccaggcactgatcttacccagcaatagtggacacgcggctaagtgagtaaactctcagtcagaggtgactcacatgacaaaaacagtatcaaccagtaaaaaaccccgtaaacagcattcgcctgaatttcgcag

SEQ ID NO: 115 - DNA, 5915 bp, Escherichia coli
  source 1..5915: mol_type = genomic DNA
agttcaactgggaccgttataacccggcagaccaagacagttcgtgctggatccgtgtggcacaggcgtgggcaggcaccggttttggccacctggcgataccgcgtgtgggtcaggaggtgattgtagacttcctcaacggcgatccggaccagccgatcattatggggcgcacctaccaccaggaaaaccgcacccccggcagcctgccgggaacaaagacgcagatgaccatccgctccaaaacgtacatgggcagcggatttaatgagctgaagtttgatgatgcgacagggagagaacaggtctacatccacgcgcagaagaacatggataccgaagtgctcaacgaccgtaccaccaccgtaaaacacgatcatcgcgaaaccgtaaaaaatgaccagacggtcacgatccaggaaggtaaccgccttcttacggtggaaaaaggccacaagatcaccggagtactgaaagggtctttatctgaggatgtctttcaggacagaggcacgattgccggttcggtgcatgttgacgctgtaaacaatggtggcgaaggcgacggtatacaggcttatacggcgattaaggaaattttgctggccgtggaggaaagcaaaattgcgctgacgccggatggcattcagctacaggtcggggaatcgacggtaatcaggctgtcgaaggatggcatcaccatcgtgggcggttctgttttcatcaactaattcactcagattatcagggagtattttatgcagttcacttttaatgaaggccacattcaactgccgtctcaatggcaggatcagtcaatgcaggtcctggtgtccacagataacagtggcatcaacctggtcattacccgcgaagccgttccacagggaaccctgacaccagagctgtaccaggaaacgctggcgctgtaccagggcaaacttgatgggtacaccgaacatgcctgccgggaaatcactctggcagaggccccggcctggctgctggattattcctggaacggtccggaagatgaggggaatcaggggcggattagccagatagccgtattccagcggcgtggagatacgctgctgaccttcactttcagcacctccttatccctgaagaacagtcaaaagacgatgctgctggaggtgataaagagcttcaccccgttgccaccggagaatgacatccaaaaggaccagccgcgctgacataaacgagggataacacatgagtgaaggaccaggcgggccacagggagcgaccgcaggcggtacgctggcaatgcgaatgctgtcacagcaggcgatggtcgccagccagatgaaacgggcagccaacgacaaagccattgcacagatgttggcatcaaaaaagtccggcccccccgccgccaggctgggcgatgaaattcagcacaagagttttttgggggcgctggcaggggccgtgctgggggcgatagtgaccatcgcagaaggttgcctgattatggccgcctgtgccaccggcccttatgcgctggttctggtgcctgcgctgatgtatgccagctataaggcgagtgattatgtggaggagaaacagaaccagcttgaatcatggataaacagcttttgtgacacggacggcgccatcaataccggttctgaaaacgtaaaaattaacggcgagctggccgcacgtgcagcggtcacccttccccctcctcccccacctggagcaatacctgaagtcccacagggggaaccctcatggggtgatattgccactgacctgcttgaatcggcagcggaaaaagcagtaccactggcgaaggcctgggggaacgctgttatcaccctgacggacagcaatgccggttttatggatcgcgtcagcgccggcgcatcgcttctgtttcccgccggtccggtattaatggagtttgccaccatggtgggcgggcgtggcgaaatcaaaaaagaggtggatttcccggaagccggtgaggacacggcgctctgcgacaaggagaacaaaccaccgaggatagcccagggcagcagcaacgtctttatcaacaatcagcctgccgcgcgcaagggcgacaaactggagtgcagtgcggtgatcgtgggaggttcgccggacgtctttattggcggtgagcaggtcacatatctggatatccagccggagttcccgccgtggcagagaatgatcctggggggaataacgatagccagctatcttctgccgcctgcgggactgctgggaaaactgaagaatctggcgagactcggcaaactgggaaacctgctggggaaaagcgggaagctgctgggcgcaaagctcggcgcgttgctggggaaaacaggtaagtcgttaaaaagtattgccaataaagtcatcagatgggtaacagatcctgtcgatccggtaaccggcgcatactgcgacgaacgtaccgacttcaccctgggccagaccctccccctctccttcacccgtttccacagttctgtactgccgctgcatggcctgacgggcgtgggctggagcgactcctggagcgaatacgcctgggtgcgtgaacagggaaaccgggtggatatcatcagccagggagccacgctgagatttgccttcgacggtgacagtgatacgacggttaacccgtatcacgcccagtacattctgcgccgccgcgatgattatctggagctgttcgacagggatgcactgagcagccgcttcttttatgacgcctttccgggaatgcgtctgcgccacccggtgactgacgataccagcgatgaccgcctggcacacagccccaatgaccggatgtacatgctgggcgggatgagcgacaccgccagcaaccgcatcacgtttgagcgcgacagccagtaccggatcacgggtgtcagtcacaccgacgggatccggcttaaactgacgtaccacgccagcggctacctgaaagccattcaccgcacggataacggcatacagacgctggcgacctacgaacaggatgcgcgggggcggctgacagaagcggatgcgcggctggactaccacctgttttatgagtacgacgctgcggaccggatcatccgctggtccgataacgaccagacgtggagccgtttcacctacgatgaacagggccggtgcgtgaatgtcaccggggcggagggctattacaacgccacgctggactatggtgacggctgcaccaccgtgacggacggcaagggcactcaccgttattactatgatcctgacggcaatattctgcgggaagaagcgccggacggcagcaccaccacgtatgaatgggatgaattccatcacctgctggcccgtcactcccctgccgggcgggtggagaagtttgaatacaacgccgcactcggtcagttaagccgttacacggcggcagacggcgcggagtggctgtaccgctatgatgagcgcggcctgctcagcaacatcaccgacccagccgggcagacgtggacacagcagtgtgatgaacgcggcctgccggtaagtctggtgtcgccacagggcgaagagacccggctggcatacaccgctcaggggctgctgtcggggatattccgccaggatgaacggcgtctgggcatagagtacgaccaccacaaccggccggaaacactcaccgacgtgatgggccgtgaacaccacaccgaatacagcggtcacgacctgccggtgaagatgcgcggccccggcggtcagtcagtgcggttacagtggcagcagcaccataaactgagcggcattgaacgtgctggaaccggcgcggaaggattccgctatgaccgccacggcaacctgctggcgtacacggacggtaacggcgttgtctggacaatggaatacggcccgttcgatttgccggtggcgcgaacggacggtgaaggccaccgctggcagtaccgctacgataaagacacgctgcagctcacagaagtcattaacccgcagggcgagtcataccgttatattctggacaactgtggccgggtgacggaagagcgtgactggggcggcgtggtctggcgttaccgctatgacgctgatggcctgtgtaccgccagggtcaacggcctggaggaaaccatcctctacagccgggacgccgcaggccgcctggcagaagtcatcacgccggaaggcaaaacgcagtatgcctatgacaaatccggcaggctgacgggtatcttcagcccggacggtacatcacagcgcaccggctatgacgaacgcgggcgggtgaatgtcaccactcagggccgacgggccattgaataccactaccccgatgaacacaccgttatccgctgtatcctgccaccggaagatgaacgcgacagacaccccgatgaatccctgctgaaaaccacgtaccgttataacgccgccggagaactgacggaggtcattctgccgggggatgagacgctgacgttcagccgtgatgaggcgggacgtgaagtgttccggcacagtaaccggggttttgcctgtgagcagggctggaatgcagccagccagcttgtcacccagcgcgccggatttttcccggaggaaaccacatggggcgggctgctcccctcactggtacgggagtaccgttacgacagcgcgggcaatgtgtcggctgtcaccagccgggaagattacggacgggaaacacggcgggagtaccggctggaccggaacggtcaggtcacggcggtgacagcctcaggcaccgggctgggctatggcgaaggcgatgagtcctatggctatgacagttgtggctacctgaaggcgcagtctgcgggcaggcaccggataagtgaagagactgaccagtatgccggaggccaccggctgaaacaggccggaaacacgcagtatgactatgacgccgcaggccggatggtcagccggacaaaacaccgtgacggctaccgcccggaaacagagcggttccggtgggacagccgggaccagctgaccgggtattgcagcgcacagggtgagctgtgggaataccgccacgacgccagcggcagacgaacagagaaacgctgcgaccggaagaaaatccgcttcacgtatctgtgggacggcgacagtattgcggaaatccgggaataccgcgatgataaactgtacagcgtacggcacctggtgtttaacggctttgagctgataagccagcagttcagccgggtacggcagccgcatccgtcggtggccccgcagtgggtgacgcggacgaatcatgcggtgagcgagctgacgggccgtccgctgatgctctttaacagtgaaggtaaaaccgtctggcgaccggggcagaccagcctgtgggggctggcactcagcctgcccgcagacaccggctacccggacccgcgcggggaactggacccggaagccgcccccggcctgctgtatgcgggacagtggcaggatacggaatccgggctgtgctataaccggttccggtattacgagccggaaaccggaatgtacctggtgagtgatccgctggggttgctggggggtgagcagacttaccggtatgtgccaaatccgtgtgggtgggttgatccgctgggattggctgcaagttctaaaatcagcagtttgatggactatattggcgatggtcgtcgtgttagtgggcatacgggtttcctggatggggttcgtttatcacgtagtcaaataaacaatattgctaaagaaatggagaagctagggaaggtgcgaacaagtccctgatatgagatcatgtttgtcatctggagccatagaacagggttcatcatgagtcatcaacttaccttcgccgacagtgaattcagcagtaagcgccgtcagaccag

SEQ ID NO: 116 - DNA, 5460 bp, Escherichia coli
  source 1..5460: mol_type = genomic DNA
aatccggtagcggcgtaaaaatcgcggaagggatgaaaaaaacagcgcctgacggcgctgtgtctggcatgcctgcaatccgggaaaccggaccaggaaaaaacttgcaggccataacagtatctacgccatctctgcaatatattgaatttgcgtgcttttgtaggcaggataaggcgttcacgccgcatccggcatgaataaagcgcactcaacaatctgaaacccgccggaacggtttattacgtaaatcaggtgaaactgaccgataagccgctttcttttgggtatagcgtcgtggacagtcattcatctttctgcccctccaaaagcaaaaacccgccgaagcggttttttacgtaaaccaggtgaaactgaccgataagccgctttcttttgggtatagcgtcgtggacagtcattcatctttctgcccctccaaaagcaaaaacccgccgaagcggttttttacgtaaaccaggtgaaactgaccgataagccgctttcttttgggtatagcgtcgtggacagtcattcatctttctgcccctccaaaagcaaaaacccgccgaagcggttttttacgtaaaccaggtgaaactgaccgataagccgctttcttttgggtatagcgtcgtggacagtcattcatctttccgctcctccaaaagcaaaaacccgccgaagcgggtttttacgtaaatcaggtgaaactgaccgataagccgggttctgtcgtggacagtcattcatctaggccagcaatcgctcactggctcaagcagcctacccgggttcagtacgggccgtaccttatgaacccctatttggccttgctccgggtggagtttaccgtgccacggactgttaccagccgcgcggtgcgctcttaccgcaccctttcacccttacctgatcccgcttgcgcgggccatcggcggtttgctctctgttgcactggtcgtgggtttcccccccaggcgttacctggcaccctgccctatggagcccggactttcctcccctccgcccgtctcccccgaagaggacgacgacgaagcggcgactgtctggtcagcttcggcgcgcagtatagagggtttgcgcgcccttgtcaccccgcgttgcgcattccaatcgccagtgtcgcggcgatattacgtgaagcacggcagatattgtcataagccccgcggaatgcttcgtccaacgtacctatgctggtcaatacgctgaagaccgcatcgatgccatgctgatgtacaacgccaacatcatcggtcaggctacccgcaatgccaatcaccggtttatggtacttcttcgccacgtttgcaacgccaatcggtaccttgccgtgaatactctggctgtcaatacgcccttcaccggtgatcaccagcgtacaatcgtgaatatgttcctccagattcagcgccgtagtgacgatttcaataccacttttcagttccgcaccaagaaacgccatcagcgccgcacccataccgcccgcagctcctgcgccggggacatctttcacatcaacatgcagcgcttttttaatgacatcggcatagtgagagaggttattgtccagctcaacaatcatcgcttcactggctcccttttgtgggccaaagatgcgcgatgcgccgttatcgcccaccagcggattggtgacatcacaagcgacgcgaatgacgcaatcttttaagcgcggatcgaggccggaaatatcaatatcattcagagtattaagactaccgccgccaaaaccaatttcattgccgttggcgtcgcataatttcgcccccagcgcctgtaccatgcctgcgccgccatcatttgtagcgctaccgccaatgccgataataatgtttgtcgcgccgctctccagcgcctgcaggattaactcgcctgtgccgcgtgaagtggtcacgagtggatcgcgtttttccgcaggtaccagctccagcccactggccgccgccatttcaataaacgcggttttgccatcgccggagatcccccaactggcattcactttctcgcccagcggccctgtaacccaggcgtgacgttcagaaccctgggtggctgcaatcatcgcttccaccgttccttcgccaccgtcggcaaccggaatagaaacgtactgtgcatcaggaaaaatttcccgaaatcctttttctatcgcctgcgcaacctcgctggcagataaactttctttataagagtctggggcgattacgattttcatacctatgcctgttaccacatgacgccggagggcgtttctcttattcggcctggattccaggcccggattgcaatacgccatccgggcacgacgtcattaacgagtaacttcgactttcgccagtttttcgtagtagcacgccagggcgctatgatccgccgttcctaaaccatctgctcgcagtgcctgcatcatctccataaccgcagctgtgagcggcagttgcgcgccgacgccgtgggaagtatccagcgcatttgccagatccttaatatgcagatcaatacggaagcccggcttgaagttgcggtccatcaccatcggcgctttggcatccagcacggtactgcccgccagtccaccgcgaattgcctgatacaccaggtccgggttaacgcccgctttggttgccagcgttagcgcttctgacatcgcggcaatattcagcgccacaatgacctgatttgccagtttggtgacgttacctgcaccgatttccccggtatgcaccacggaacccgccatcgctttcatcaaatcatagtatttgtcgaaaatagccttgtcgccgcccaccatcactgacagcgtaccgtcgatggctttcggttcaccgccgctcactggagcatccagcatatcaatgcctttcgctttcagcgcttcgctgatttcacggcttgccagcggtgcgatagaactcatatcgatcaataccgtacctggcttcgcgccttcaataatgccattctcacccagcgccacctctttcacatgaggggagtttggcagcatggttatgatgacgtcgcactgttcagcgatcgctttagccgtagacgctgtttctgcacctgcagcaatcacgtcagcaatagcttctgggttacggtcagcaaccaccagcgagtaacctgctttcagaaggtttttactcattggtttacccataatccccaggccaataaaaccaactttcatagtcatatcaatcatctctcttgttgcggtggtggttattttttaaaggtatcagccagtttctgagtggcagagcggaagacgccaagatcgctgccgacagccacaaacgtcgcgccccattccagataacgacgcgcatcggcttcgaccggcgcgagaataccgctgggtttgccgtgcgcactggcacggttaaaaatgtgctgaattgctttttgtacatccgggtgcgaggcattgccgagatggcctaatgccgcagccagatcgctggggccgacgaagataccgtctacaccttcggtagcggcaatggcatcgacgttatctacgccctgctgactttctatctggaccagaatggtgatgttcttgttcgactgagcgaaataatccgccacggtgccaaacatattggcgcggtgagaaacggagacgccgcgaatgccttccggtgggtaacgggttgatgccaccgcctgctctgcttcctcttttgtttctacaaaaggaatcaggaagttatagaaaccgatatccagaagacgcttaataattaccggctcgttggtcggcactcgcactactggcgcgctggcgctgcctttcagggccattaactgcggaataaacgtggagatatcgtttggcgcatgttcgccatccagcaccagccagtcaaacccagccaaaccaagaacttcagtgctaatcgggttagagagtgctgaccagcaaccaatttgtacctgtttcgcagccagtgcggctttgaatttattcgggaaaacatcgttattcatcgcttatacctttgcttatttctgcaattccatacgtttaatgtcgccaactacgaagaggtagcagaccatcgccatcagcgctgaacatcccacgaaaaccagtgctgcattgaaggagtgcagttcacttaccaggtagccaatcaccagtggagtgacaatggaggcaacattgccaaagacgttaaagacgccgccacagaggccaacaatctctttcggcgcggtgtcagaaatcaccggccagcccagagcaccaaatcctttgccaaaaaaagccagcgccatcagcatgaccaccagcgtggtgttgttggtgtagttacataagatgatggtggaagccagcaacattcccagcacaatcggtagcttacgtgccagggtcagggataaaccgcgtttgatcagataatccgagaagacacctcccagcacgccgcccgcaaaaccacacagtgccggaatcgaggcgaccagacccactttcagaatcgacatgcctttttcctgcaccagataaatcgggaaccaggtgaggaagaaccaggtgatggtgttgataaaatattgtccgaaaaatacgcccaacatcatgcggttagagagcaattgcttgatgtaatgcagtttgggaccgcttgctgccgcgctgcccggctttttgtggtccatatcgaccaccgcgccattttcagagataaacttcagctcttccgcagacatacgtgggtgatctgtcgggttatgaatcaatttgatccacagcgccgtcagcacaaaaccaatcacccccataacggtaaagacgtgctcccagccccaggcgaaagtcagccagccaagcagaggcgaaaagagcgccagcgagaaatattgcgccgagttaaagatggcggaggcagtaccacgttctttcgtcgggaaccaggcggcgacaatacgggcgttcgccgggaatgatggcgcttccgagaagccgagcataaagcgcataaagaacatggagatccctgcccaggccagcgggaacatatcaacaaagccttgcaggaaagtgaatagcgaccagaaaaagaggctataggtataaacttttttcgagccaaacttatcaagcagccagccgccggggatttgcatcagcaagtaggcccagccaaaagcagaaaagatgtaacccatcgaaaccgcacttaactctgagagatcccctcataatttccccaaagcgtaaccatgtgtgaataaattttgagctagtagggttgcagccacgagtaagtcttcccttgttattgtgtagccagaatgccgcaaaacttccatgcctaagcgaactgttgagagtacgtttcgatttctgactgtgttagcctggaagtgcttgtcccaaccttgtttctgagc

SEQ ID NO: 117 - DNA, 4872 bp, Escherichia coli
  source 1..4872: mol_type = genomic DNA
gtcagggagaactcatctcggggcaagtttcgtgcttagatgctttcagcacttatctcttccgcatttagctaccgggcagtgccattggcatgacaacccgaacaccagtgatgcgtccactccggtcctctcgtactaggagcagcccccctcagttctccagcgcccacggcagatagggaccgaactgtctcacgacgttctaaacccagctcgcgtaccactttaaatggcgaacagccatacccttgggacctacttcagccccaggatgtgatgagccgacatcgaggtgccaaacaccgccgtcgatatgaactcttgggcggtatcagcctgttatccccggagtaccttttatccgttgagcgatggcccttccattcagaaccaccggatcactatgacctgctttcgcacctgctcgcgccgtcacgctcgcagtcaagctggcttatgccattgcactaacctcctgatgtccgaccaggattagccaaccttcgtgctcctccgttactctttaggaggagaccgccccagtcaaactacccaccagacactgtccgcaacccggattacgggtcaacgttagaacatcaaacattaaagggtggtatttcaaggtcggctccatgcagactggcgtccacacttcaaagcctcccacctatcctacacatcaaggctcaatgttcagtgtcaagctatagtaaaggttcacggggtctttccgtcttgccgcgggtacactgcatcttcacagcgagttcaatttcactgagtctcgggtggagacagcctggccatcattacgccattcgtgcaggtcggaacttacccgacaaggaatttcgctaccttaggaccgttatagttacggccgccgtttaccggggcttcgatcaagagcttcgcttgcgctaaccccatcaattaaccttccggcaccgggcaggcgtcacaccgtatacgtccactttcgtgtttgcacagtgctgtgtttttaataaacagttgcagccagctggtatcttcgactgatttcagctccatccgcgagggacttcacctacatatcagcgtgccttctcccgaagttacggcaccattttgcctagttccttcacccgagttctctcaagcgccttggtattctctacctgaccacctgtgtcggtttggggtacgatttgatgttacctgatgcttagaggcttttcctggaagcagggcatttgttgcttcagcaccgtagtgcctcgtcatcacgcctcagccttgattttccggatttgcctggaaaaccagcctacacgcttaaaccgggacaaccgtcgcccggccaacatagccttctccgtccccccttcgcagtaacaccaagtacaggaatattaacctgtttcccatcgactacgcctttcggcctcgccttaggggtcgactcaccctgccccgattaacgttggacaggaacccttggtcttccggcgagcgggcttttcacccgctttatcgttacttatgtcagcattcgcacttctgatacctccagcatgcctcacagcacaccttcacaggcttacagaacgctcccctacccaacaacgcataagcgtcgctgccgcagcttcggtgcatggtttagccccgttacatcttccgcgcaggccgactcgaccagtgagctattacgctttctttaaatgatggctgcttctaagccaacatcctggctgtctgggccttcccacatcgtttcccacttaaccatgactttgggaccttagctggcggtctgggttgtttccctcttcacgacggacgttagcacccgccgtgtgtctcccgtgataacattctccggtattcgcagtttgcatcgggttggtaagtcgggatgacccccttgccgaaacagtgctctacccccggagatgaattcacgaggcgctacctaaatagctttcggggagaaccagctatctcccggtttgattggcctttcacccccagccacaagtcatccgctaatttttcaacattagtcggttcggtcctccagttagtgttacccaaccttcaacctgcccatggctagatcaccgggtttcgggtctataccctgcaacttaacgcccagttaagactcggtttcccttcggctcccctattcggttaaccttgctacagaatataagtcgctgacccattatacaaaaggtacgcagtcacacagattgctctgtgctcccactgcttgtacgtacacggtttcaggttctttttcactcccctcgccggggttcttttcgcctttccctcacggtactggttcactatcggtcagtcaggagtatttagccttggaggatggtccccccatattcagacaggataccacgtgtcccgccctactcatcgagctcacagcatgtgcatttttgtgtacggggctgtcaccctgtatcgcgcgcctttccagacgcttccactaacacacacactgattcaggctctgggctgctccccgttcgctcgccgctactgggggaatctcggttgatttcttttcctcggggtacttagatgtttcagttcccccggttcgcctcattaacctatggattcagttaatgatagtgtgtcgaaacacactgggtttccccattcggaaatcgccggttataacggttcatatcaccttaccgacgcttatcgcagattagcacgtccttcatcgcctctgactgccagggcatccaccgtgtacgcttagtcgcttaacctcacaacccgaagatgtttcttgnnnnnnnnnnnnnnnnnnnnnnnnnnnnnnnnnnnnnnnnnnnnnnnnnnnnnnnnnnnnnnnnnnnnnnnnnnnnnnnnnnnnnnnnnnnnnnnnnnnnnnnnnnnnnnnnnnnnnnnnnnnnnnnnnnnnnnnnnnnnnnnnnnnnnnnnnnnnnnnnnnnnnnnnnnnnnnnnnnnnnnnnnnnnnnnnnnnnnnnnnnnnnnnnnnnnnnnnnnnnnnnnnnnnnnnnnnnnnnnnnnnnnnnnnnnnnnnnnnnnnnnnnnnnnnnnnnnnnnnnnnnnnnnnnnnnnnnnnnnnnnnnnnnnnnnnnnnnnnnnnnnnnnnnnnnnnnnnnnnnnnnnnnnnnnnnnnnnnnnnnnnnnnnnnnnnnnnnnnnnnnnnnnntcaaagaacgcttctttaaggtaaggaggtgatccaaccgcaggttcccctacggttaccttgttacgacttcaccccagtcatgaatcacaaagtggtaagcgccctcccgaaggttaagctacctacttcttttgcaacccactcccatggtgtgacgggcggtgtgtacaaggcccgggaacgtattcaccgtggcattctgatccacgattactagcgattccgacttcatggagtcgagttgcagactccaatccggactacgacgcactttatgaggtccgcttgctctcgcgaggtcgcttctctttgtatgcgccattgtagcacgtgtgtagccctggtcgtaagggccatgatgacttgacgtcatccccaccttcctccagtttatcactggcagtctcctttgagttcccggccggaccgctggcaacaaaggataagggttgcgctcgttgcgggacttaacccaacatttcacaacacgagctgacgacagccatgcagcacctgtctcacggttcccgaaggcacattctcatctctgaaaacttccgtggatgtcaagaccaggtaaggttcttcgcgttgcatcgaattaaaccacatgctccaccgcttgtgcgggcccccgtcaattcatttgagttttaaccttgcggccgtactccccaggcggtcgacttaacgcgttagctccggaagccacgcctcaagggcacaacctccaagtcgacatcgtttacggcgtggactaccagggtatctaatcctgtttgctccccacgctttcgcacctgagcgtcagtcttcgtccagggggccgccttcgccaccggtattcctccagatctctacgcatttcaccgctacacctggaattctacccccctctacgagactcaagcttgccagtatcagatgcagttcccaggttgagcccggggatttcacatctgacttaacaaaccgcctgcgtgcgctttacgcccagtaattccgattaacgcttgcaccctccgtattaccgcggctgctggcacggagttagccggtgcttcttctgcgggtaacgtcaatgagcaaaggtattaactttactcccttcctccccgctgaaagtactttacaacccgaaggccttcttcatacacgcggcatggctgcatcaggcttgcgcccattgtgcaatattccccactgctgcctcccgtaggagtctggaccgtgtctcagttccagtgtggctggtcatcctctcagaccagctagggatcgtcgcctaggtgagccgttaccccacctactagctaatcccatctgggcacatccgatggcaagaggcccgaaggtccccctctttggtcttgcgacgttatgcggtattagctaccgtttccagtagttatccccctccatcaggcagtttcccagacattactcacccgtccgccactcgtcagcaaagaagcaagcttcttcctgttaccgttcgacttgcatgtgttaggcctgccgccagcgttcaatctgagccatgatcaaactcttcaatttaaaagtttgatgctcaaagaattaaacttcgtaatgaattacgtgttcactcttgagacttggtattcatttttcgtcttgcgacgttaagaatccgtatcttc

SEQ ID NO: 118 - DNA, 4762 bp, Escherichia coli
  source 1..4762: mol_type = genomic DNA
ccctgaccacttcaagccctgcctctgtgagcgcctgaatcacatcctgacggccttttatctccccgacatgataaagagcgtctatcccgcgtgtgacgctctctgcaagcgcctgtttcgtttccggcaggttatcaggaagggtcagcgtccggcggttctccggggcgttggggtcatgcagcccgtaatggtgattaaccagcgtctgccaggcatcaattctcggcctgtctgcccggtcgtagtacggctggaggcgttttccggtctgtagctccatgttcggaatgacaaaattcagctcaagccgtcccttgtcctggtgctccacccacaggatgctgtactgattcttttcgagaccgggcatcagtacacgctcaaagctcgccatcaccttttcacgtcctcccggcggcagctccttctccgcgaacgacagaacacctgacgtgtatttcttcgcaaatggcgtggcatcgatgagttcccggacttcttccggattaccctgaagcaccgttgccccttcccggttacgctcccttcccagcaggtaatcaaccggaccactgccaccaccttttcccctggcatgaaacttaactatcatcccgcactccctgttccctgaccacctgccgtaagctgcgcaactctctctcgatggccatcagtgcggccaccacctgaacccggtcaccggaagaccactgcccgctgttcaccttcctcgctgcctgattcaggttattcccgatggcagccagctgacgcagtaacggcggtgccagtgtcggcagtttcccggaacgggcaaccggctcccccaggcagacccgccgcatccataccgccagttgtttaccctcacagcgttcaagtaaccgggcatgttcatcatcagtaacccgtattgtgagcatcctctcgcgtttcatcggtatcattaccccatgaacagaaaccccccttacacggaggcatcagtgactaaacaggaaaaaaccgcccttaacatggcgcgctttatcagaagccagacattaacgctgctggagaagctcaacgaactggacgcggatgaacaggcagacatctgtgaatcgcttcacgaccacgccgatgagctttaccgcagctgcctcgcacgcttcggggatgacggtgaaaacctctgacacatacagctcccggagacggtcacagcttgtctgtgagcggatgccgggagcagacaagcccgtcagggcgcgtcagggggtttcggggcgaagccctgaaccagtcacgtagcgatagcggagtgtatactggcttaactatgtggcatcagtgcggattataagaaaagagcagcatatgcggtgtgaaataccgcacagatgcgtaaggagaaaataccgcatcaggcgctcttccgcttcctcgctcactgactcgctacgctcggtcgttcggctgcggcgagcggtatcagctcacgcaaagacggtaatgcggttatccacagaatcaggggataaggccggaaagaacatgtgaacaaaaaggcaaaaccagggaaaaaggccgcgccgcaggcgtttttccataggctccgcccccctgacgagcatcacaaaaattgacgctcaagtcagaggtggcgaaacccgacaggactataaagataccaggcgtttccccctggaagctccctcgtgcgctctcctgttcctgcctttcggtgtaccggtgtcattccgctgttatggccgcggtttctcattccacgcctgacactcggctccgggaaggcagttcgctccaagctggactgtatgcacgaaccccccgttcagtccgaccgctgcgtcttatccggtaactatcaacttgagtccaacccggaaagacacgactaatcgccattggcaacggccactggtaaacaggatgtgcgagagatgtatcgagagttcttgaagtggcggcctgactacggctacactgaaaggacagatttggtgacatgtctcgcacaagaccgttaccgcggttagagaatctgccaggattaactaaccttcgaaaaaccacctgccagggtggttttttcgttttcaaagcaggagattacgcgcagaaaaaaaggatctcaagaagatcttttctcctttaggtagggcttacttcgtcaccatataaaacatttgcactagacaaaaaaaatgcaataatgttggtacagacctgtggcgtgccgcaggcgaagaaacaacccccctgtggcgtgccgcaggcgaagaaacaacccccctgtggcgtgccgcaggcgaagaaacaaccctcctgtggcgagccgcaggcaaacacccctcctacggcgtgccgtaggaaaaaaaaaccgcagatgcggttttttttatatctaaaatggagctaaccccattgaaaacaatagtttatgttgatggctttaacttttattatcgtaagctgaaagattccaacaaaaagtggctgaacataaaagcaatggtcgaaaaattgctaccggatgatgaaataataggaattaactattacacggctaggatctcaggaaggattgattctgacgcacctcgtaggcaacaaatatatttcaatgcactgaaaagcatagataacctaagtatccattatggtactttttcggtgaatgaaagcagaatgtttttagtgcagcctcttgatttcaaacatcacttaaaaaacccgaatcaaaaaataaagtttgcaaacgtcttaaagacagaagaaaagggttctgacgttaatttaggttgccacttggttagagatggtttccaagggaaatacgagaaggctgtaataataactaatgatacagatttggctgaaccaatgagagtagtcaaatcagagctcagcctttatattgaactactttctcctgtaaacaaaccagcaagaaccctgagcgcaatatgcgataaggtcactcttataagcgaccaatcaatagctgatagccagtttgaagacgttattgtagttggtgagaaaaccgtgacaaaaccagcacagtggtagtggctacatactcgttctgttgaaaaaaagcccgtcccccgggctttttatgttttgcattataccttcaggcaaatataaagagtatgaaatctatagctatgtgcagaaaataaaaaattagctaatagcacttaaaatagcaaagtgagttgcaggatctgtactttcattttcaaaatgaacagataagttactatttctagtatttctagagatacaacatgcaaaaccagtgtcgaaagaacacttcaatgtatatccatttggttgtacttttgagccaacatatccttgagatgtctggatcaacgtcatcaaagcagtatatttttcacgatcaataataatactcatcacatccccattagtattactctgcaggcattaaacctcagcaataaatctatttaccataactcccgttgcccgcaccgcctcagacgctctcagcgcgtttctgacgggaaaccggaaaaacaggcaacaaacctcccgaaaaactgccgcgatcgcgcctgataaattttaaccgcatgaatacctatgcaacaagatggtgcagactacattagtccgtcaaaatccactgaacctgccatttttcatagtttcaccatcccagcgaaggaccatccagtgtgcgttcctgtatttccggctggtgctcacgctccagggataactcatgttcgcgttcctgtatcagccgttcgtcccttatctcctgttctcgctgtataactggctcaagcgttctgtccgctcgctcaagtgctgcacctgctgactcaactgcatgacctgctcgttcagcatcgcgttgtcccgttgcgtaagcgaaaacattttctgcaattccacgaaggcgctctcccattcgttcagccgctgcatatagtcctgttgcagttgctctaatgcgttcagcaaatgtctttccagctccgtcactctgtatcactccgtcagttgtacccagtccttcccctgatagggaatcaccgttgccgatttcccgtacggaaggaccagaaatttccttctcccgtcctgcacaaactccacgccccatgtcttcgcgttcagtttctgcaatgtttcttcctgtatcctgatttcttccaggttcgcctgtatccgcccgccaagataccagagcgtcccgccactcgcggtaaacaggagaaagactatccccagcaacctcatgcccgtattccctgccagctttaacacgtccttcctgtgctgcatcatcgcctctttcaccccttcccggtgtttttccagcgattcctctgtcgacgttgtgaacagggctatagcgtctttgattttcgtctcgtttgaggtcacagccttgcttacagatttttcgagcttgctgaactcgtcgttcagcattgtctctgtagattcggctctctctttcagctttttctcgaactccgcgcccgtctgtaaaagattgctcataaaatgctcctttcagcctgatattcttcccaccgttcgggtctgcaatgctgatactgcttcgcgtcaccctgaccacttcaagccctgcctctgtgagcgcctgaatcacatcctgacggccttttatctccccgacatgataaagagcgtctatcccgcgtgtgacgctctctgcaagcgcctgtttcgtttc

SEQ ID NO: 119 - DNA, 4760 bp, Escherichia coli
  source 1..4760: mol_type = genomic DNA
catatagtcctgttgcaaatgctctaaggcgttcagcaaatgcccttccagttccgtcatactcgtttactccctgaccagcctcacggcgttcttgtcgcccaccgtccaggtgttttcccctttcaccccgtccggcagcaccagaaatttcccgttctcgccattgacgaacgtcaccccccaggtttttgcctcgagtttcgccagcgtgttttcctgctctctgatggtcaagatatttttcgcaatcctgctttcctgccactgaatcagcccccagcaccccaggaaaatgccgcccgtgacgctgagcgcggtcagcgccggaaacagtacccgccctttgatcacctgccagagcaggtttttctgctgccgggacagttcggcctctgtggtgctgagctgcgtgctcacggtggtgctcagcgtatccagttgctgtttcacggatgttgtatgttcgctgatagcgtctctgattttctgcctgtttaagctcagtgccttgtctacagactcttctagcttcctgaactcgctgttcagcatgttctcggtagaagcggctcgctctttcagtttcttctcgaagtctgttcccatttgtaaaagattgctcatacagcgccccctttagcctgagattccgccccccctccgggtcggcaatactgatactgcttctggttgtcctcaccacctcaaaacctgccgctgtgagcgcctcagtgacatcctgacgcgtttttattgctccggcacggtaaagcgcctcaagaccccgtgtaatcgcttctgcggcctcctgtttcgcttttggcagattattcggtgtgacaagcgtccgtctgttctccggtgcgttcgggtcacgcagcccgtaatgatgattaaccagcgtctgccaggcatttatcctcggcctgtccgcacggtcgtagtacggctggaggcgcttaccgctctgtagttccatgttcggaatgacaaaattcagttcgagccgccccttatcctggtgttccacccagagaatgctgtactggtctttttcgagaccgggcataagaacacgctcaaagctcgtcatcactctttcgcgttcacccggcggtaactccttctccgcgaacgacagaacgcctgacgtgtatttcttcgaaaatggcgtggcatcaatgagttcccggatttcttccgggttaccccggagcaccgttgcgccttcgcggttacgctcccgccccagcaggtaatcgaccgggccacttccaccgcctttccccctggcatgaaatttaactatcatcccgtcccccctgttccctgacagcctgccgcaactggcgcaattcaccctcgatggccatcagtgcggccaccacatgaacccggtcaatcgaagaccagtggccgctgttcaccttccgggctgtctggttcagattgttcccgatggcagccagatgccgcagcaatggcggcgatagtgtcggcagttttcctgtgcgcgcaaccggctcccccagacagacccgccgcatccattctgccagtcgtttaccctcgcagcgttccagtaaccgggcgtgctcctcatcgctaacccgtatcgtgagcatcttctcgcgtttcatcggtatcattccccctaaaaaatcccctattaaggagccttaagaccatgaccaaacaggaaaaaacagcccttaacatggcccgctttatcagaagccagacgctgaccctgctggaaaaactcaacgagctggacgcggacgaacaggcagacatctgcgaatcacttcacgaccacgccgacgaactctaccgtagttgcctcgcacgcttcggcgatgacggtgaaagcaactgaaacatgcagctcccggagacgttcacagcttgcctgtgagcggatgccgggagcagacaagcccgtcagggcgcgtcagcgggttttagcgggtgtcggggcgcagccctgacccagtcacgtagcgatagcggagtgtatactggcttaactatgtggcatcagtgcggattataagaaaagtgcaccatatgcggtgtgaaataccgcacagatgcgtaaggagaaaatgccgcatcaggcgctcttccgcttcctcgctcactgactcgctacgctcggtcgttcggctgcggcgagcggtatcagctcactcaaagacggtgatgcggttatccacagaatcaggggataacgccaaaagaaacatgtgagcaaaaggccaagaacaggaagaaggccgcgccgctggcgtttttccataggctccgcccccctgacgagcatcacaaaaacagacgctcaagtcagaggtggcgaaacccgacaggactataaagataccaggcgtttccccctggaagctccctcgtgcgctctcctgttccgaccctgccgcttaccggatacctgtccgcctttctcccttcgggaagcgtggcgctttctcatagctcacgctgttggtatctcggcccggtgtaggtcgttcgctccaagctgggctgtgtgcacgaaccccccgttcagcccgaccgctgcgccttatccggtaactatcgtcttgagtccaacccggaaagacacgtaaaaacgccactggcagcagccattggtaaccgtttagaggagttagtcttgaagttatgcgccggttaaggctaaactgaaaggacagatttggtggctgtgctcctccaagccagttaccttggttcaaagagttgctgctctgagaaccttcgaaaagccgccttgctgggcggttttttcgtttacggacaagactaccttcaggatcgttagatctcaagacaatcatgcatagtgagcatacacaggagccgaacttgcttacactgttcatcttttttgttttattaatagctgcatgtttcttttgttttgctccaccacgaagaggatatgacagaaatgagatcattccatacaaaataaaactatcaataaataaatatcgcctttacatatactcatcgggaaaggtaagacaataccttttatttttagttattttatcactgtactactccatagcggaaccatttaagtctgagttaataaaaaacatatcatattcactgatggctgcatttatttttgatacagggcttaattttagcaaggagaatataactaaaggggtgatttcaacaaggtggcataatgacctatattcatcatttgagagaatgaaagcaattaataaaatttactacccatccaacaaagagataaacacagaaggtctatccaaagccatcacatcatctcttttcaatgatgacgcgaactcgttcgcaaagagagattttcgcttgatgtgggacttatcttctgaaaaatatctttcctataaagaaataataataagaaaaggcgataagcttgacgctgtatgcttgagatttataaatgatgactacaagtttttagttaatttcaacagagatgaagaggttttcaaatactttccatctataatgcaaccttcactcaaaacatatagagcgttatcaagactagtaaactcaatcaaagatccttctagatttaagttcacgacagagtcattagaaatggagttactagaatacttagagttaagaaatgaattattcaatgacatagaagaagtaatgggtagctatgctcagagggcaccatagttcatgatagccctcgatagtacttacttatatttttagagaggtttaagtgtaagtagagggagtaacacctggtttttcagcatccactccaatgaatgctgacaccgatacgcgataattctctttatcgtagcaaaatcatcctccagattgcggttgagaataggttcatggtgcgcaatacgattgcgcagttttctcacgggacttgttagcagtaatgcttccccccggggacaaacgacagagatatacaacaaaggcccgctgtatagagtacagcgggcctttgttgttttaattcccgcaattaaaatactccgtatttaccataacgtcgcattgcgcgtaccgcttaaacgcgttcagcgcgatcacggcagcagacaggtaaaaacagcaacaaaccacccgaaaaactgccgcgatcgcgcctggtaaattttaacctcatgcatagttatgcgcgaaactgaatgacgatcagtttcgcacgttccagccgtcgaacggggcaaaatggggaggtttggatattgttaatgctaatgtacgtacattaacattggcgccatccgggtagggcgtgccacaaactggctcgatttcagggggcaccccggtcacatccccattgacgggccacgccagatccgcgcttcgggttcctgctcttcatgccagcgccgggcaagctcctgcgcctgacgctcctgttcatcccttatctgttgttcgtgataaataaccgactcaagcggtcgacttgtccggctaatagctgcacctgctgactcaagttcacgacacgctcgttcagtatcgcgttgttctgttgcgtaaccgcgtgcatcttctgcaattctgcgaaggcgctctcccactcgttcagccgccgcatatagtcctgttgcaaatgctctaaggcgttcagcaaatgcccttccagttccgtcatactcgtttactccctgaccagcctcacggcgttcttgtcgcccaccgtccaggtgttttcccctttc

SEQ ID NO: 120 - DNA, 4703 bp, Escherichia coli
  source 1..4703: mol_type = genomic DNA
gtggtgctctgggaaatcgatctgacagaggtcggtggtgaacgttattttttctgtaatgagcagaacgaaaaaggtgagccggttacctggcaggggcggcagtatcaggcctatcccattcaggggacgggatttgaactgaacggcaagggcagtgcagcccgtccgacactgacggtttctaacctgcacggcatggtcaccgggatggcggaagacctgcagagtctggtcggcggaatggtggtcaggcgtaaggtttacgcccgttttctggatgcggtgaacttcgtcaacggaaacagcgacgccgatccggagcaggaggtgatcagccgctggcgcatcgagcagtgcagcgaactgagtgcggtcagtgcctcttttgtactgtccacgccgacggaaacggatggggccgtttttcctgggcgcatcatgctggctaatacctgcacctggacctatcgcggtgatgagtgcagttatagcggtccggcggtcgcggatgaatatgaccagccaacgtccgatatcacgaaagataaatgcagcaaatgcctgagcggttgtaagtttcgcaataacctcggcaactttggcggcttcctttccattaacaaactttcgcagtaaatccatgacagaaactgaatcagcgattctggcgcacgcccggcgatgtgcgccagcggagtcgtgcggcttcgtggtgagaacaccggagggagaaagatatttcccctgcgtgaatatctccgctgagccggaggattatttccggatggctccggaggactggctgcaggccaaaatgcagggtgagattgtggcgctggtccacagccaccccggtggtctgccctggctgagtgaggccgacaggcggctgcaggtgcagagtgatttgccgtggtggctggtctgccggggggcgattcataagttccgctgtgtgccgcatctcaccgggcggcgctttgggcacggggtgacggactgttacacgctgttccgggatgcttaccatctggcggggattgagatgccggattttcatcgtgaggatgactggtggcgtcacggacagaatctctatctggataatctggaggccacagggctgtatcaggtgccgttgtcagcggcgcagccgggcgatgtgctgctgtgctgttttggttcatcggtgccgaatcatgccgctatttactgtggtgacggcgagctgctgcaccatattcctgaacaactgagcaaacgagagaggtataccgacaaatggcagcgacgcacacactccctctggcgtcaccgggcatggcacgcatctgcctttacggggatttgcaacgatttggccgccgcatcgaccttcgtgtgaaaacgggggctgaagccatccgcgcactggccacacagctcccggcgtttcgtcagaaattgagcgacggctggtatcaggtacggattgccgggcgtgatacaggtgaaacggaattatcagcccgtcttaatgaaccgctggcaaatggtgctgtgatccatatcgtgccgcgtctggcaggagccaaaagtggcggtgtgtttcaggctgtgctgggggcggctgttatggcggttgctatatggatgccgggggtaggaattatggcgagtaatctgctgttttctctcggtgccagtatgacgcttggcggtgttgcacagatgctggcaccgaaagccagaactccccgcacacagacaacggataacggcaaacagaacacctatttctcctcactggataatatggttgcccagggcaatgtcctgcctgttctgtacggtgaaatgcgcgtggggtcgcgggtggcttctcaggagatcagcacggcagacgagggggacggtggtcaggttgtggtgattggtcgctgatgcaaaatgttttatgtgaaaccgcctgcgggcggttttgtcgtttatggagcatgacgaatgggtaaaggcagcagtaaggggcataccccgcgcgaagcgaaggacaatctgaagtccacgcagttgctgagtgtgattgatgccatcagcgaagggccgattgaaggtccggtggatggattaaaaagcgtgctgctgaacagcacgccggtgctggacagtgaggggaataccaacatctccggtgtcacggtggtgttccgtgccggtgagcaggagcagataccgcctgaggggtttgaatcctccggctccgagacggtgctgggtacggaagtgaaatatgacacgccgatcacccggaccatcacgtcggcaaacattgaccgtctgcgttttactttcggcgtgcaggcactggtggaaaccacctcaaaaggggaccggaatccgtcggaagttcgcctgctggttcagatacagcgtaacggtggctgggtgacggaaaaagacatcaccattaagggcaaaaccacctcgcagtatctggcctcggtagtggtggataatctgccgccgcgcccgttcaacatccggatgcgcaggatgacgccggacagcaccacagaccagctgcagaacaaaacgctctggtcgtcatacaccgaaatcatcgatgtgaaacagtgctacccgaacacggcactggtcggcgtacaggtggattcggagcagttcggcagccagcaggtgagccgtaattatcatcttcgcgggcgcattctgcaggtgccgtcgaactataacccgcagacgcggcaatacagcggtatctgggacggaacgttaaaaccggcatacagcaacaacatggcctggtgtctgtgggatatgctgacccacccgcgctacggcatggggaaacgtcttggtgcggcggatgtggataaatgggcgctgtatgtcatcggccagtactgcgaccagtcagtgccggacggctctggcggcacggagccgcgcatcacctgtaacgcttacctgaccacacagcgcaaggcgtgggatgtgctcagtgatttctgctcggcgatgcgctgtatgccggtatggaacgggcagacgctgacgttcgtgcaggaccgaccatcggataaggtgtggacctataaccgcagtaatgtggtgatgccggatgatggcgcgccgttccgctacagcttcagcgccctgaaggaccgccataatgccgttgaggtgaactggattgacccgaacaacggctgggagacggcgacagagcttgttgaagatacgcaggccatcgcccgttacggtcgtaacgtcacgaagatggatgcctttggctgtaccagccgggggcaggcacaccgcgccgggctgtggctgattaaaacggagctgctggaaacgcagaccgtggacttcagcgtgggtgctgaagggcttcgccatgtaccgggcgatgtcattgaaatctgcgatgatgactatgccggtatcagcaccggtgggcgcgtgctggcggtgaacagccagacccggacgctgacgctcgaccgtgaaatcacgctgccatcctccggtaccacgctgataagcctggttgacggaactggcaatccggtcagcgtggaggtccagtccgtcaccgacggcgtgaaggtaaaagtgagccgtgttcctgacggcgttgctgaatacagcgtgtgggggctgaagctgccgacgctgcgccagcgtctgttccgctgcgtgagtatccgtgagaacgacgacggcacgtatgccatcactgccgtgcagcatgtaccggaaaaagaagccatcgtggataacggggcgcactttgacggcgaccagagcggcacggtgaagggtgtcacgccgccagcggtacagcacctgactgccgaagtcaccgcagacagcggggaatatcaggtgctggcgcgctgggacacgccgaaggtggtgaagggcgtgagcttcctgcttcgcctgaccgtggcagcggatgacggcagtgagcggctggtcagcacggcccggacgacggaaaccacttaccgcttcacacaactggtgctggggaactacaggctgacagtccgggcggtaaatgcccgggggcagcagggcgatccggcatcggtatcgttccggattgccgcaccggcagcgcctgtcactattgaactgataccagggtattttcagataacagcggtcccgaaactggctgtatatgacccgacggtgcagtttgagttctggttctcggaaaagcggattgcggatatcaggcaggttgaaaccacagcccgctatcttggcacggcgctgtactggatagctgccagtagcaatattaagccgggttatgattattacttttatatccgcagcgtgaataccgttggtaaatcggcatttgtggaggccgtcggtcgggcgagcgatgatgcggaaggttatctgaatttttataaagggttgatcaataaaacgcatctcggcaaggaactgctggaaaactttgagctgacggaagataacgccagcaaactggaggagttttcgaaagagtggaaggacgccaacgataaatggaatgccatgtggggcgtcaaaattgagcagaccgaggacggcaaacattatgtcgcgggtattggcctcagcatggaggacactgaggaaggcaaactgagccagtttctggttgccgccaatcgtatcgcgtttattga

SEQ ID NO: 121 - DNA, 4646 bp, Escherichia coli
  source 1..4646: mol_type = genomic DNA
tcgggccgtcagtcgcagcaactaccaggatcgcgccgtccatctgagcagcaccggtgatcatgtttttaacatagtcggcgtgccccgggcagtctacgtgtgcgtagtgacgggtcggggtgtcgtattcaacgtgagaagtgttgatggtgataccacgagctttttcttccggcgcgttatcgatctggtcgaatgcgcgagcagcaccgccgtaggttttggccagtacggtagtgattgcagcggtcagcgttgttttaccatggtcaacgtggccgatagtaccgacgttaacgtgcggttttgtacgttcaaacttttctttagacatcgattgtccctctaagacacggataaatcggtgatatcaccacatcaaccaggcaacatgcccgacttgttgaatgcaataaacagaaggaaaaaacagggaggagaaaagaagtggtgctgataggcagattcgaactgccgacctcacccttaccaagggtgcgctctaccaactgagctatatcagcacatcttggagcgggcagcgggaatcgaacccgcatcatcagcttggaaggctgaggtaatagccattatacgatgcccgcatcctggaactcggctacctgattttcattctgcactgaatatcgagagaagctctctttattcgagccggtaagcgaacttatcgtctcgggctacgccatcgcgtggccgaaattggtggtgggggaaggattcgaaccttcgaagtctgtgacggcagatttacagtctgctccctttggccgctcgggaaccccaccggacttgatggtgccgactaccggaatcgaactggtgacctactgattacaagtcagttgctctacctactgagctaagtcggcatcaagtagcgcgcattctatggagacatgcgagttcatgcaactaaaaaattgcataatttgttttattggtcacattttatgcgacacgatgaagaaacagccgaacggagggcagattagcacactttttcaacatcattgtgctcaacaatgcgctcctgctaaaccataattctttttatcagatggaatatctgtcacattgcttttcaacgatagcttcctggcagagattttttcttattattcctccccatctggtgttaccctcctgcccattaacccattcaacagaactgtgacgcgccatggcaaatatcgctttgccgatagagctatgaccgccagaaacatgcttatgagtataaaagagcaaacgttaatgacgccttacctacagtttgaccgcaaccagtgggcagctctgcgtgattccgtacctatgacgttatcggaagatgagatcgcccgtctcaaaggtattaatgaagatctctcgttagaagaagttgccgagatctatttacctttgtcacgtttgctgaacttctatataagctcgaatctgcgccgtcaggcagttctggaacagtttcttggtaccaacgggcaacgcattccttacattatcagtattgctggcagtgtcgcggtggggaaaagtacaaccgcccgtgtattgcaggcgctattaagccgttggccggaacatcgtcgtgttgaactgatcactacagatggcttccttcaccctaatcaggttctgaaagaacgtggtctgatgaagaagaaaggcttcccggaatcgtatgatatgcatcgcctggtgaagtttgtttccgatctcaaatccggcgtgccaaacgttacagcacctgtttactcacatcttatttatgatgtgatcccggatggagataaaacggttgttcagcctgatattttaattcttgaagggttaaatgtcttacagagcgggatggattatccacacgatccacatcatgtatttgtttctgattttgtcgatttttcgatatatgttgatgcaccggaagacttacttcagacatggtatatcaaccgttttctgaaattccgcgaaggggcttttaccgacccggattcctattttcataactacgcgaaattaactaaagaagaagcgattaagactgccatgacattgtggaaagagatcaactggctgaacttaaagcaaaatattctacctactcgtgagcgcgccagtttaatcctgacgaaaagtgcaaatcatgcggtagaagaggtcagactacgcaaataatttgcaggggagcgaatactcccctttcttatttttctgcactacgcagggatatttcaccgcccatccagggttttattattccatcctgctcaagtaataaagccccctgtttgtctattccgcgtgaaatgccaaatatttctttatcaccaatgataagtttcactgggcgattaataaaattatccagcttttcccagcgcgacagataaggtgccaatccttcttgttcgaagagttccaacgcagcacgtaattcacgtattagcatggccgccaacgtattacgatcgagattgatccccgcttcctgcagcgtgatccacccctgattaacgacactctcttcaacacggcgcattgccatgttgatcccggctccaatgactatttgcgccgcatcgccagttttgccagtcagctccacaagaatgcctgccagcttgcgatcctgcagatagaggtcattaggccatttgacacgaactttatctgctcccagcttgcgtaatacttccgccatcacgataccgataaccagacttaaaccaatcgccgccgccgggccttgttccagacgccagaacatcgacaaatataagtttgcgccaaaaggcgaaaaccatttccgcccccggcgaccacggccagcctgctggtattctgcaacacaggcatcgcccgatttaagctctccgatacgatcaagaaggtactgattcgtagagtcaataactggcagcacggctacactaccgccatccagctgacccaatatctgttcagcattaagtaactggatgggctcaggcaggctgtatcctttacccggaacggtaaagacatcaacgccccagtcacgcagtgtctgaatgtgtttattaatagccgcccggctcattcccagcgtttcacccaactgctcgccagagtgaaattcaccgttcgctaacagggcaatcaatttcagtggcacggtgttatccttcatgaaattgtctccactgcgctcacttcacctgatgcaccaataaagcggacttcaggctcaagccagacattaaatttttcacccactttttgtcttacatggtgtgccagttgcaccacatcttcgctttttgcattgtcttcattaatgagaactaacgcctgttgacggtgcaccgcagccccacccatttgcatcccttttagctggcactgatcaataagccaacctgctgccagttttactgaaccacccgcctgggggtaatttggtgctgttggaaattgcgccagtaatgctttagccgtttcggcagatacaacagggtttttgaagaaactaccggcattgccattcacttttggatcagggagtttggtggtgcgcatatgacacaccgcattaaatacttgctgtggcgttactgttgtaggatccagacgagttaagtcaccatacgttagtacaggttgccactcttttggcagacgcagacctacggctacaatggcgaagcgatcctggtattcatgtttaaaaatactgtcgcgatagccaaaacggcactctttggcagttaagcgcacttgcttgcctgtcgccagttcaacacaatcaacataagcgcaaactcgctgtaattctacgccataagcaccaatattctggataggtgatgagccgacacaaccaggaattaatgccagattttccagaccaggcataccttcctgcaaagtgtattttaccaggcgatgccagttttctccggctcctacatgtaaataccacgcatcaggttcatcatgaatttcgatacctttgatccggttgatgatcaccgtgccgcgatagtcttccagaaaaagtacattacttccttcacccagaataagaacgggttgtccttctgcggttgcatactgccaggcattgagtaattgttgttcgtcttcggcacatacaatgtgctgagcattatgatcaatgccaaatgtgttccagggttttaaggagtggttcatagctgctttcctgatgcaaaaacgaggctagtttaccgtatctgtggggggatggcttgtagatatgacgacaggaagagtttgtagaaacgcaaaaaggccatccgtcaggatggccttctgcttaatttgatgcctggcagtttatggcgggcgtcctgcccgccaccctccgggccgttgcttcgcaacgttcaaatccgctcccggcggatttgtcctactcaggagagcgttcaccgacaaacaacagataaaacgaaaggcccagtctttcgactgagcctttcgttttatttgatgcctggcagttccctactctcgcatggggagaccccacactaccatcggcgctacggcgtttcacttctgagttcggcatggggtcaggtgggaccaccgcgctacggccgccaggcaaa

SEQ ID NO: 122 - DNA, 4615 bp, Escherichia coli
  source 1..4615: mol_type = genomic DNA
tttacgcacctcttttcctaacaaaacgccagccatctcaaaattagaactagtgttagacatatatccaagcctatctcttattttaagatacatctactgtctggtatttcagggggccagctcaatgtaattctctaattgagttcgtgtatggattgcatgactcgtcgaacctttaccgtaaaatgtatcgagcgatgttgatcctgatgttggcttatcatctaaaaatatatagaccaagatatttgcaactaactcttcatcgtcagagtctctaatgctaggcctactaatgatatgatttctaatatagaaatgattgtctatatttattccataatcgagtccatcattgcaaattgatatgttatgtattttattctgtcccattatatcgctatgtgtagtatctcctcttataattgtcgatatttttcttactaactctgaaaaattactaacacaccccgcacttcgtagttcttgttttgataaaattttaccattggaattgatgcgtcgaaacacttcgtcaatgtggtcctcagttgaagagtattcagatatagcaaatctatagcgagcaattaatgtagaactttcgtgggatagcactggctctttttgttgaagtttaccactgtcttttagttgttttgttaatgcaatggcatctaaattaaagtatttaccatttaatgaaaatcgctgctcaataaaactcattaaagcttctaaatagctgcgcggaatagtagatcactttgagggaactcagcccggattgtgcgatctgatcaatcgccaaatcaaaacaaatcaccaaccggactgagcgatgccgatcatagcaccaattccccgtgacgaacgacgcctgatgcagaaagctatccataaaactcgcgataaaaatcatgcccgcaggctaacggctatgctgatgcttcatcggggtgacagtgtaagcagcgttgccagaacactctgttgtgcccgttcatctgttgggcgctggatcaactggttcacgcactcaggtgttgaaggcctgaaatcattacccgccggacgcgcccgccgctggccgtttgagcatatctgcacactgttacgtgagctggtaaaacattcttccggcgactttggctaccagcgttcacgctggagtacagaacttctggcaataaaaatcaatgagataaccggatgtcagttacatgccggaaccgtgcgccgctggttgccgtctgcggggcttgtgtggcgaagggccgcgccaactctgcgtatccgtgacccgcataaagatgaaaagatggcggcaatccacaaagcactggacgaatgcagcgcagaacatccggtcttttatgaagatgaagtggatatccatctcaatcccaaaatcggtgcggactggcagctacgcggacaacaaaaacgcgtagtgacgccggggcagaatgaaaaatattatctggccggagcgttgcacagcgggacaggtaaagtcagctatgtgggcggcaacagcaaaagttcggcgctgttcatcagcctgctgaagcggcttaaagcgacataccgtcgggcgaaaaccatcacgctgatcgtggataactacattatccacaaaagccgggaaacacagcgctggctgaaggagaacccgaagttcagggtcatttatcagccggtttactccccatgggtgaatcatgtggaacgactatggcaggcacttcacgatacaataacgcgcaatcatcagtgccgcgcaatgtggcaactgttgaaaaaagttcgccattttatggaaaccgtcagcccattccccggaggtaaacatgggctggcaaaagtgtagcggtattcggagcagctatttagtctttgcattccatcaaggatttctcttttgttgtcaatggaaacaaacaatagcaaagggatagggtattgctgagtcattgatgaaatcagtgctgttttctcttcgagggaccatactaattttctttggtatcttcgatttataattaatttatcatccagataccactcgtataattcttctgctgtcttggagtcaatatctaagttttcattagccattagatgtatctcgagtatttagttaagaaactgataggtcagtatttgcatcaatgttcattgaatttgtatccgaagtcaatctgatgtaggaacttcaaaactgcgcaaagcacgcaaatacgcacaagaaagtagggctgcgcttggaattcggaaaataaaccacatcaagactactttttagccaaataacgtttgggaatcaccagaatggtgggacaacagcggttttagtgccctaaatcgtacgttttcatccggttgcccctcaaactccatgttcaagtcagaatagtggacaggcggccaagaacttcgttcatgatagtctccggaacccgttcgagtcgttttccgccccgggctttcatatcaattgtccggggttgatcgcaacgcacaacacctgtggtacgtatgccaacaccatccaacgacaccgcaaagccggcagtgcgggcaaaattgcctccgctggttacgggcacaacaacaggcaggcgggtcacgcgattaaaggcggccggtgtgacaatcagcaccggccgcgttccctgctgctcatgacctgcggtaggatcaagcgagacaagccagatttcccctctttccatgtcagatttcctcctgaccagtcgccggtgcatccagccattctcgttcttcagctgatatttcagcattcggatcacactgtgccagtagctcagccagtgaatattgcgggcgtctgtgcggctcaacaatcagccggccattatcaatgaccatgccaacttcattatctgtacccagagacagcgcattcagcagtgccggtgggacggtcagcataactgagccgccaaccctcttcagtcgggtggtatgcattcttcacctccataaaagttatatttaaatataacacccactaaaaaaacacaccaggctttaacgcacaatgtttaataaaaatataactttcaaccaaacagtaaacccagcgtggttgcttccatatgcagcaatatcggcagcagcaggccaccacttctgatcctggccactgatgtaatcaaccccaccaggaacagttctgccagtgtcagcaggttctgatactggctgtgcgcggcgacgaacaacaacgacgttatcagcgcccccagccacatcgtccagcagtaccgtgaacggaagacgttcagcataatcccccggaacagcgtttcctcattcaacggggcaaggataaagacggtcagcaacgtcaggatcacgtcaggtatggacttatcggcaaaaagtttcgttataaatggctcagcaggcagagctagcgccttaccgagcagaaatgcaccgacatacaccgcggccatcgcaccaaccagccatggtacgccaacgttgcgcagctgaccaacgaccggtagcggagctatccaacggcggtataccaggaaaacacacagcaggtacatcagaacagcaccatgactgaagaacaaatagttttttcctggcccataaagcagaacggcctgctccatgacaaatctggctccccagctaatgccccatgcagccagcataaccagcataaactgcagatattgattacgtgtctgaatcattgcatctcctgtaaatttttaacttatcctattcttgtcattactacgtatatacatatgtataacaattcagatatcgtcactaggatatgccgcgccagcggcatggaaggcggcactctgttgtttcatatgatactggagtaaaaccgccgaagcccggcgtaagccggtactgattgatagatttcaccgtacctatccccagccctgtcagaccatacccgctttcagccatgagagagcttctgtgcgcggtcggagtggtcccgacgagggtttacccgaagttggggcgtatctccgcgttagcgggccgtcagggccgcttacgagcgtgtattcagtacgtccagccagaagactgacagcaacgaagattgttagttacaacattcataattaaaagcgactctgttccggccctttgggccggggcggggccgcttttcagttatgagggaggggctttgtggtttcagttctgcgcgggactggggtttttctggaggttgtctttgtgtgttgtaactaaagtgactccggttggggcccgccgcttgcggtgggaggtgcatatctgtctgtccacaggacagacagtgaacaggttttctttttaaatgaatgtaattaagtagtttaaaggagatataaacaggtgtttaaaagatacattgcaccctgtaaggctggcggatggcgctttatgacatgaacggttgtaaccttatggggaagttgtcagcgccagtgatataagacggtaattcaccatttggattgtccgctccacccaacatgttgtttccttaaggttctcacaccagaaaggacatcaacatgctgagcagagaggacttttacat

SEQ ID NO: 123 - DNA, 4439 bp, Escherichia coli
  source 1..4439: mol_type = genomic DNA
gcgtgatggctttatcggtactggtaaactgaatgtcgtagcggaacggggtactcagttgttcgcgaccttcgaaggtcagcacatccaccggactttgcaggccgcgaattttgagcttgtggtgcgagtggtcgaaattaagagtaggagtaaccattttattttccttaatttattggttagtacttcatatacttacctcatttgatactacgctttgtgcaatgttttatttttaataagaaaaaagaaggatagccagaataaaaaaagattagccattagaaaaaggaaatatgttctaatcataaacggaactgtctgtaatactctttcctgacctgaataaaaatccccattaaaaaatatctcaatatatatgcaatacaaccagtccagtacaaactctgccttaagaaaaaggatgataaatatacttgttgtaaagataaatgaagtagacaatattgtcaccgcagaattagtcaggcagtttttcttgagcatataaacgcatattcctgcgctccctgccagggatatcaccaccagcatacaccagaacgtgttaccaccaatggcggctaatatattaagagtactaagtcgtccaccgccatcaagagaaagtataaacattaaaaaataaactgctactataataaaaaagaataaccttgaaattgtttttagtatcacaaatacctcagattcatcatttaaatttattttattatagagagacatcacctgatttaatcaccacctgacaaatctggagatggtgactgttcttctgatttttcttctggtttttcttttgatttgggatattcagccatacgacgaaggaaaaaactttcgttaatagaagccccggtatcaacagtttgtaaatcatgagtaaaataagaatgaatagtatctatgcctagccatgatatgtccgtgagttcttctccgttccatgctttatgataatagtcaagaaacagttcagctcgcttccatgccgggcgaaaaatatcttcatgatttagcatgcgggtatccattggccttccgtaattaaaatcattcgataatcctgtagcgacacgccttacatcatccagccatccccagtgagatttaagttctgcgatctgtgcattgatttcatcagcttcaggattagggttaattcccgttccggcaagagggccatacccgcttatttgtttgcgatgtgcaagtgatagtttttcatccaattgataaagttcagtgcagtaaagatagtattgatttgccaaccatttgaaatatatatcaagataaaaatcaaagggcaggtcatttttattatccgtatcatttactttactttcagaggcgctttgagtttctttttggcactgtcccacttccatatcatagcttttcatccactctttaacggatttaccttctacggcctcattcatgaggaaatagcgtgatacggtctcagaaaacgatggtagcgtctcaaaatctggaaaaggtaccccagcatcatatgctgcttcatacatcttttgcagggccacacgacataactctgcgctcggtttctgttcatctggcttcagaccaccgcccacatcctcgctacaaccaggcagtaaaatctccttatgttctgtattcgagctccccaactggtaaagactgcgccatagacgtcgctcataagccgctaccagatgtaacgcgttcttaactgtacctggtaaaatggtatccagttcgatagccttctcgccaaatgcgactttggcgattttgccagctgttttcagcttattattcttggtaattttccccggaagacttaaaaaatagtccagcccattattattactggctggtgaatgacgtgaacagtcaaagaaaccagcaaagacgatatttactggtacctttttaaacaggtatttatcctcaccttctttttcacaaaactcttcgagtaactcatccagaaattttcgtgccagtgcagctccggtgtcatagccatacaacgaaacagatattgattttattttaatcgcagttgaatcctttttattcgtactgttttcaacaaaagcattcgcaaacaacacctttgctgcattaattctcgtgacctcccccgtcaagaaaaaagcactaataatttcattgtcgcggatccattgcgttgactcaataatggattttttagccatttttttaaagatatcatttcttttttttctaagttctttaggatccagaagtttatcctggattttctttaaggtttcattccacgacccccttctgttacggatttccttgctgatttcttcatgtgtctcttttgcgaaatcgtttaaatcctccttcatactttccagagactgatccatgattgtatataattttgagatcaattcttcgttatagggtgttcccataccggaaaaataaaatttattgtgacaaacaaaatcagtattgaaatcttcatcaggataagcccgaaataaacgagccacattacttaagcgttgttctgaagcatcctgatcaatattgcgccccacgccatcaaagaaaaaaccaacgtgccactcccgcccacagtttcctactttgttgtcttccgcgagttgtgcccgaattccaccaccggtatctaacattccccacattattacgtctcctgccgaacgtgatttttacagaaatctatcaattcattttccctgtgccataaagtttatctttcacatcctgccgaacgcgggtcttgtaccccccgttgtgaagatcttcatacggagaaaaagaatccttactccaccccagcaacactttatcgccaggcataaaatgcacgtgcagataattttctccccattctctttttgggagaggcaaagtcttgttacgtttctccagacgcatccctttaagatattgctcgtgagtcatatctaatgtccagataacctctgcggtatccccactgacatcaccacaacaggttgttgaacctccaccattcgcaaaagcattcgcacccgccacgccgttaacactgaatcccagtatcggacggtcaatttcactgtggatttccagaatcactccacctcttggaccaccccatactgcctgccctatattccacaacacgaccagtactggcacggcgatcagcatccgccacacccagtgcccccagcgggcataaccacgcgtaagcttttggtcaaatttttccagtcgggtaaatagccccatcagattttattccctcttatcacctggttggcaaagttgtatgtcactggcgactaaggtcagacaacgaaatttcatttcgtttcaccttttccagcatggcctgaaattcggctgactcaagatacgctttctttccattcagatagctcaacgcataaattttctgatccagtggctttgtcagtccaaccgcttgtgccttattcaatgccttctccaccatatttcgctgaatacagggcgggaagtgctcactcgttttcatggtgcgccactctcttaaaagcgcagatacatctccccgatctgctattttctgccagagcggttcatcaagcgttatgatttccactgtctcatcgctgttatttgccgcaggaaacggtatgttcagcctttgccaccgcgtatcttccagcatccaccatgattctatctgagagaacatcaccggatgccactccatatcgggccgggcggccagttgtttcagcactcggggcgtgtaatacctcagcagaacttcacgaccatctggcgtttttgccatgcaccccacagcaagccgggaggccagttgctccagcggcagctctgaaaaaactatgcctgcgacggggagtttcccgacaagcaccatcgccagatccttttcactttcaatgcaaaccaaccagggaccgtatgctgctacctttttaaggtcgggcagttgatacagggaaattcgtcggtatttataatgctccattatgatctgaagcatttcctgagagagcgctccaccttcaaataaaataaaggcgtttaacgtttcgtttcgcttaagccagtggtctgccagttgttgttttgaagtcatgattacgctccttcaacaacagcatcatcgtttttgatggcattcagcaggcattcaagacaaaaatcggatgagtccacggctgaaaggatgggaaattctggcataggaaccttctccgaagctttcggctggcgtccgtagtgcaccgctttgacgttataatcccccggcgttcccggctcaatgccgctaccctctatccggatataacttccaccgccattaatcgttatttttttcttcgctgaaatcctgatctcgtcctcag

SEQ ID NO: 124 - DNA, 3412 bp, Escherichia coli
  source 1..3412: mol_type = genomic DNA
tctgagacaacatctggcaaggctgggacggaagtcactgtcgttctcaaaatcggtggagctgcatgacaaggtcatcgggcattatctgaacataaaacactatcagtaagttggagtcattaccgtaaacttgaacaaaatgacgttaatattattaacgtagatgatattatcagaacaaccttctcgccatccattttatcgcattcaaacattataaatgtacttagtattattcataaatgatatcaagatggcaccttaaccttcacccaaacgacgttaaccaaaaaaaaagaaagctaagatgccatcgaaatatcattaattgctgcatatcctttatcatacaataacaaatgttctccttattgtttttttgtgcatccctgcttttaatatttacatgcaatggaaaaacaggatatggagagaacttttccgaaaaacattttcatatcctcagctcctgaaatataccaaccccacacagacataaatcgtccaaaaaaaatacaaggttaacgtaaaatgtaaaaaacttagcgtaactaatattagtttaccttcgttactgtaaatgcgccaacatagcatagataatcaatgaggtatagtctgtttatgataattaatttagaaaaacaagtgaataataatggagaattaatccttgcagcttatgaatttgtgaagcaattgggaaagaaaaatataaatgatgtggaaaaaaataattattcgtcttaccaatgcactcgagactacaactacaagtgttatagaaaagacaaagcatcatgaagacataatggctgaaaacacatatctgattcatatctcatccaatatgctcacaatcgcatgggagctaaaaaaatagaaaggccaactatctggagatctaatcgaatagattctatagaattgctttactctaaaatagagaaacttagccatctgacttctgcgaatcacaacgcccaatctcaataatctaataaatatatcataaaaaacacaaaaaacaaattcgcacaaatagactaaaggctgaaaagaattgtcccaacactgatatatttctgcaagagttgtggaataggactcgcaatgaaggtataaactacactgctgacagcattgccaaggcgtataacaatggttatattgataaatctcttactgagatttatcaatatagtacgcatgattctaggggcgaaaagagaattatctaacgcgacatcaccgtcagtagatggtatgtctggcaagtactctgccatatcacttaataagtgggaagagaaaattagaacagtccagcgattgctctattgcaaaaaaacataactgcaaatttttttgaagtgatttattatagcataacaaatagccatcattaattaataatggcatcaggataaaaactatcattgatgccaagacagaaattatttttatttattaatgtgctcaaaatacttacatggcgtaacaccataatattctttaaacgatgaggcaaaatatgatgtgctattatacccgcatttctttgcaataacattgactgtatatatatttagtgagattgaatttttagcaaacctcattcgtgctccccttaatatttcaccaaaagatgtaccttcatctcgcaacctcctttttattaagctatcacttaaatacattaatctagcaacatcgtttaaataccatttccgctcaatatcagggcttattaagaagacactttacttgaaaaagaattcatgttatttattaaaaaggaaataacatattcacgatttttaaatgccgccaacaaagcaacacataacttctctttaaaaaataaaaactctgaattaacttgttttatcacctcaaataacgataagataatttgcgatggaacatcaaaatccacaaaaaaatcagttttatttggcactattttttcaggagactcattacacacctcataaaaaaatgacatgcacactttcttatcaagatcaaccatcttaattttacttgtatactccaccagtcctgctttaatattatgatttaaaatcaataatgacttctcttttaaagagtaaaatttatcacctattgtcagttcaaatgactcacagatataagcaactgagcaaatataactcattcatcacctgctataattctaatcttagtggattagcaaaagtctcattaaagaaacatttccaatgttatatttaattttattttttcaaagaacttttgttgctaagagagttgtttaatattctttttttactaaaaaaacaagtcatccatctttatgaaaagaaatttttcacatttttactttgtattttacaatttagtgtcagtatgcatgaaaaatatcaggaaatgtctcctatttggtagaacatcccattattgatgaaggagttgatgacttttttgacaacgcacgagaagcatagtgttttacatactgaaccgctacgagtacttaagacacttccgaaccattgataatactggtttttatcttctgtcagtgacatctgatcgctagaaccattccaacgcttacggttataaatcatttcgatgtaatcaaaaatatctctctgggcctttccgcgttccgtagatctttttcttttattcgtgctcgcttcagtaactgaaaaaagccttctgcaaccgcattatcgtggcagttaatgcgacggctcatgcggctctcctggtcgtgtgaattcaaaaacgacttccactcatggcttgtatactgacagccctgagcagagtgaatcagcacctgtttgtgggaattacgctgccatacgccccgtcatcaatgcgttcatggcaatgtcctttgtcatccgggattgtattgagctgccgataattttgtgtgaggacagatcaacaaccacagaaaagatacacagccagccttcgtgggtcctgatgtaggttatgtaggttatgtccgttacctaacacatccggagcatctggatgaattgtcaatgggctaggtgggcgacatgacacagatctcgccttgcgtgcctgcgggctccagtatccggcctgagcctttatcccgacacatttcatcagttaccgtcttatatcattggcgctgacataacagacaggcgaataagctagcaacaggtgttgtcacggataaaggcgcacctgagtcggacagttttacgaagtgttcttgcccccttatttccagacagggggtgtatcttaagttaacattacccgctgacgtcgatattctcgcggagagcgataacccaacgcactatgcggatggttttcattgtaatgctcgatcgccactgcaaggttatgcaatgccgttctt

SEQ ID NO: 125 - DNA, 3387 bp, Escherichia coli
  source 1..3387: mol_type = genomic DNA
tggatttgctgggctgggtggccgtgtttgtgcttatcagcctgctggttaatgtccgcacatcggtgcagattattgataacagtgacctggtcaaagttcaccgggtggataatgtgccggtcggactggcgatgccactttcactgacgacccgtatcgggcatgcaatggtggccagttacgagatgatcttcacgcaaccggacagtgtcacctacagcaaaacggggatgctgtttggcgcagaactggtatcaaaaagcaccgactttttgtcccgtaatccggagatcgccaatcttttccaggattatgtgcagaactgcgtgatgggggatatttacctgaaccacaaatacacgctggaggaactgatggcctccgctgatccttacacgctgattttttcccgccccagtccgctgcggggcgtttatgacagcaataataatttcgtgacctgtaaggacgcgtcggtttcgctgaaagacaagctgaatctggacacacagagtggcggaaaaacatggcattattatgcccagcagctatttggtggacgccctgatccgaacctgttgttcagtacgctgattggcgacagttacagttacttctatggctcaagtaaatcagccagccagatcatccgccagaatgtcaccatcaatgcgctgaaggaggggatcaccagttatgccgcacgtaatggtgattcggccagcctggtgaatctggccaccacatcatcgatggagaagcaacgtctggcacatgtctccatcggtcatgtggcgatgcggacactgcccatgacgcagaccatcctgacggggatcgccatcggtattttcccgctcctggtactggcggctgtcttcaacaaactgacgctgtccgtcctgaaaggctatgtgtttgccctgatgtggttgcagtcatggccaatgttgtacgccattctgaacagcgccatgacattttatgcgaagcagaatggtgcaccggtggtgctctcggaaatttcacagatacagctgaaatactccgatctggcttccactgccgggtatctttccatgatgatcccgccattatcctggatgatggtcagggggctcggggcaggattttccagtgtgtacagccatttcgcttcctctgctatcagcccgaccgccagtgcagcaggcagtgtggttgacggtaattactcctacggcaacatgcagacggagaacgtgaacggcttcagctggagcaccaacagcaccacgtcgtttggtcagatgatgtaccagaccggcagtggcgcaaccgccacacagacccgtgacggtaatatggtgatggatgcaagcggagctatgtcccggttaccggtcggcatcaatgcaacgcgtcagattgcggcagcacaacaggaaatggcccgggaagcatcgaacagagcagaaagtgccctgcatgggttcagcagcagtattgccagtgcctggaacacgctcagtcagtttggttctaaccgggggagcagtgattctgtcacaggtggtgctgacagcaccatgagcgcacaggactccatgatggccagccgtatgcgcagtgcagtggaaagctatgcgaaggcgcataatatcagtaatgagcaggcgacaagagaactggcatcgagaagtacaaatgcgtcgcttggcctttacggtgatgcttatgctaaagggcatttaggcataagtatattgggtaacggtggaggggttggtctccaggccggagctaaggcaagcattgatggcagtgatcttgactcacatgaagccagtagtggttcacgggccagccatgatgctcgtcatgatatcgatgccagagctacacaagactttaaagaggccagcgattactttaccagccgcaaagtcagtgaatccggcagccatactgacaataatgccgattcccgcgtggaccagctgtctgcagccctgaactcagcgaaacagagttacgaccagtacacgacgaatatgacccgcagccatgaatatgctgaaatggcatcccgtactgaaagcatgagtgggcagatgagtgaagatctgtcgcaacagtttgcacagtatgtgatgaaacacgcaccgcaggatgccgaagctattctgacaaacaccagttcaccggagattgcagaacgccgccgggcgatggcgtggtcttttgtgcaggaacaggtgcagcctggtgttgataatgcctggcgtgaatcccgtggcgatattggtaaaggaatggagagcgtaccttcgggtggtggcagccaggatattattgctgaccatcaggggcatcaggccattattgatcaaagaacgcaggacagtaatatccggaatgatgtaaaacatcaggttgataatatggtcacagaatataaagggaatataggtgatactcagaacagtatccgtggcgaggaaaatattgtaagagggcagtattctgaactacaaaatcatcataaaacagaagcattaactcagaataataaatataatgaagaaaagctggctcaggaaagaatacctggtgctgatagtccgaaagagcttttagagaaagcaaagagttaccagcataaagaataatcgtaacatgttgggtagggtatggagaggccatgattacacaacaaattatcagtagtgagttggaagttttaaagaaacatattgactcaggagatattagagttccgtcactatggcagggattaaaacccgggtttataatcatgggatggatgattttttgtcccttactaatgtcatttctaataacacaaaagacaagtgaaacactcactgctgtgttagccggaggatggcttggacttattattctgtttattgtggcaaggattagaatgttatatttctctctgccggaagaattcctaaagacatcatccgtaatgaggattatatcatcaaaactgaaagtgtatttcattgtgtatatgggaattatatttttatggtcttttttaggtggagggattatatacggttttggtgcaattttagtgacggttattatggcgttcttgattcaattagatatcggtagatatcaatttgttggtgttattgatgcaatcaatagttacgtcaaaaacaagaagttatcaagagtaaaataaaagatattagagagtaaatatatgatgaaaacaaaaaaactaatgatggttgcactggtcagttccactctggccctttcagggtgtggtgcgatgagcacagcaatcaagaagcgtaaccttgaggtgaagactcagatgagtgagaccatctggcttgaacccgccagcgaacgcac

SEQ ID NO: 126 - DNA, 3359 bp, Escherichia coli
  source 1..3359: mol_type = genomic DNA
tggatttgctgggctgggtggccgtgtttgtgcttatcagcctgctggttaatgtccgcacatcggtgcagattattgataacagtgacctggtcaaagttcaccgggtggataatgtgccggtcggtctggcgatgccactttcactgacgacccgcatcgggcatgcaatggtggccagttacgagatgatcttcacgcaaccggacagtgtcacctacagcaaaacggggatgctgtttggcgcagaaatggtatcaaaaagcaccgactttttgtcccggaatccggaaatcgccaatattttccaggattatgtgcagaactgcgtgatgggggatatttacctgaaccacaaatacacgctggaggagctgatggcctccgctgatccctacacgctgattttttcccgccccagcccgctgcggggcgtttatgacagcaataataatttcgtaacctgtaaggacgcgtcggtttcgctgaaagacaagctgaatctggacacacagagtggcggaaaaacctggcattattatgcccagcagctatttggtggacgccctgatccgaacctgttgttcagtacgctgattggcgacagttacagttacttctatggctcaagtaaatcagccagccagatcatccgccagaatgttaccatcaatgcgctgaaggaggggatcaccagttatgccgctcgtaatggtgattcggccagcctggtgaatctggccaccacctcatcgatggagaagcaacgtctggcacatgtctccatcggccatgtagcgatgcggacactgcccatgacgcagaccatcctgacggggatcgccattggtattttcccgctcctggtactggcggctgtcttcaataaactgacactgtccgtcctgaaaggctatgtgtttgccctgatgtggctgcagtcatggccaatgttgtacgccattctgaacagtgccatgacattttatgcgaagcagaatggtgcaccggtggtgctctcggaaatttcacagatacagctgaaatactccgatctggcctccactgccgggtatctttccatgatgatcccgccattatcctggatgatggtcaggggactcggggccggattttccagtgtgtacagccatttcgcttcctctgctatcagcccgactgccagtgcggcaggtagtgtggttgacggtaattactcctacggcaacatgcagacggaaaacgtgaacggcttcagctggagcaccaacagcaccacgtcgtttggtcagatgatgtaccagaccggcagtggcgcaactgccacacagacccgtgacggtaatatggtgatggatgcgagcggggcgatgtcccggttaccggtcggcatcaatacaacgcgtcagattgcggcggcacaacaggaaatggcccgggaagcatcgaacagagcagaaagtgccctgcatgggttcagcagcagtattgccagtgcctggaacacgctcagtcagtttggttctaaccgggggagcagtgattctgtcaccggtggcgctgacagtacgatgagtgcacaggactccatgatggccagccgtatgcgcagtgcagtggaaagctatgcgaaggcgcataatatcagtaatgagcaggcgactcaggaactggcatccagaagtacgagagcttctgccgggatgtatggagatgctcatgctgaatggggggttaaacctaaaattcttggtgttggtggaggattaggcgttagaggtggtggtcgggctggcattgactggagtgatgatgatgcgcatcaggcctgcagtggttcacgggccagctatgatgctcgtcatgatattgacgctaaagccagtaaggactttaaagaggccagcgattactttaccagtcgcaaagtcagtgaatccggcagccatactgacaataatgctgattcccgggtggatcaactgtctgcagccctgaattcagcgaaacagagttacgaccagtacacgacgaatatgacccgcagccatgaatatgctgaaatggcatcccgtactgaaagcatgagtgggcagatgagcgaagatttgtcgcaacagtttgcacagtatgtgatgaaacacgcaccgcaggatgccgaagctattctgacaaataccagttcgccggagattgcagaacgccgtcgggcaatggcctggtcttttgtgcaggaacagatacagcctggtgttgataatgcctggcgggaatcccgtggcgatattggtaaagaaatggagagcgtaccttcgggtggaggcagtcaggatattattgctgaccatcagggacatcaggccattattgagcaaagaacgcaggacagtaatatccgtaatgatgtaaaacatcaggttgataatatggtcacagaatataaagggaatataggtgatactcagaacagcatacgtggcgaggaaaatattgtaagaggacagtattctgaactgcagaatcaccataaaacagaggcattatctcagaataataaatataatgaagaaaagtcggctcaggaaagaatgcccggggctgacagtccacaggaactgatgaaaagggcaaaggagtatcaggataagtataagcaataatactgtgtttgggagatgataatgagatgtttagcccatattgctctggtaacagtgatacagtttatcgcctgttatctggctgattgggggaatgccgaaacagtttttatgctgttcttcatagtgctatggcagggactgtttatctggttgttctctcaaatacgaaaaaaacgggatgtgtcggatgagtttaagtttagtaaaggcgtttggtatataacgatgccagtatcttccttactctctccgttattaagcctgatggtttttatcattggtacactatacgaattaaggcgagttagtggttgcataagcataaaaaaatgggggcaaaatcaactcaaagaccaatatgatgggagtgaaaagttagacttcgggggcattgaacagaccccaacgatctactataacccttcaaccggatatcctatgcatggaggctttgattcagcgggaaatacttttgggactcgttggcaggactattatgacaggcaataagaaaactgtagtttgtaaaaaaggtaatttgatgaaaacaaaaaaattgatgatggttacactggtcagttccactctggccctttcagggtgtggtgcgatgagcacagcaatcaagaagcgtaaccttgaggtgaagactcagatgagtgagaccatctggcttgaacccgccagcgaacgcac

SEQ ID NO: 127 - DNA, 3267 bp, Escherichia coli
  source 1..3267: mol_type = genomic DNA
acaacctgctccatcacggcatcggtaacctttgatatcagtgccggtgaaacatctgcgtcatacagttctttgaacgcagcggctatctcacgggtggtcatccctttggcatacaacgagaggatctggttatccatcccggtaatacgggtctgatttttctttaccagttgtggttcgaaggtaccgtcacgatcgcgcggagtacgcagttcccgtggaccgtcgcctgtgataacggtctttgtggaataaccgttgcgggagttagctcctggtctggactgatttttctcatacccaagatggtgtgtcatctctgcattgagagcggcttcaacgctgagctttttcagcagccgatcaaactgactgaggtcttcaggggttttgaggtttttggccagttcgttagccagagcctgtaactgtttttcgtccataaattaaccttcatttgatgctggattgaacatatcaaaatcaggcaattacacaaatctatgtacaggctcatagtctgtattatatcaagaacataaagtgtgttaatagtttaatatatatgtatatgtgtatcatgcatatacatatatattactctcattcccctaacttcgtagtggggccttcgaaaaatttattataaacatgatctatctgggaatatgttgattccatgtaagcggctcgtcagaaccgtattgagatttactgagcggtcagtccaactatccagggcaacagatctcgtacccggtttgccggccagtcctggatatgttcaatgacgtaacgcagccatttttccgttccactggatttccggccctcagaaatgagggccggcatattatcagaagctgtattttatccccagcgctccggagatagcattgctcccgtggcctcctgcctgatatgcgactccgccattcactgacagattttgagtaatcaccccctcaatacctgtctttatctctccctgattccggctacctgacaacaactggttgtcaccactcattttaacaccaaattcatgagtgttatggagccagtttgcctctatatacggacggaactcccgcccggtatccttatccagggagcttttcaccttccaggatgcacgaatacctgcttttgtctgaagattatttttccctgagccctgtaccactgttccgttattttcctgatgtgtatccggagtaacccccatccagacagcctgcagatgaggctgtaaccagaattcacctttaattccctcaggtgacgtccatgtatgcacattcagattataccctccgcccacggaagcggttaaaccattcaggttatatttttcttcttccagcccgtcacctttcactgatgcattaaaccagttatattgcatccaggtttcagcaaagaggcctgttgcatttgccccattctgataccaggttccgtataacccggccgaataaccatccagtgtgtttctggcccctttcttactcgtgtggtttatcgttttaccttttgcgtttgcatagccacccataatgcccagggtaaagtcacccagtttttcagcgtggtatttataaatatcccccccaagttgattgataaattgattggttgttgttttattttgcccgtcactaagcttaccagaggttcttccgcccgtaatcttcatccacacagatgcagactcaggctgtgtattatcactcacggcactgaattgcttacgctcattcaaatccatgaggaacagtgagttagccagtgccatattggtagcataacttccgttctccggtctgtattgccgggtatcagatgtgggaagatgactggttaaataccatcccttcttatctgtcccactcacgttgcctttctgcagtgtgtaatcataagctccggcaaccacgcggttcttcagagagaatgctgcatcagaatttccctctacagaaataatattaataccctctatcgtctgtccaccactgccaccttcattgatataaacgatgtcactttgaccagaggtattacctttcaccaccagacggtccgtaagggaattatctccttcaagcaccccaccaagagaaataacacttcccggcgtcccggtataatttgacacggtaagagtattacctgcactttcttttgtcggattcagaatgatatttttgttattaacaagactgccattcaccgtagcagagagcagctttgccgtaccaaagcttaagtcagcatcattcgtaatattcccgtttataatgctgttattaatgacagcgcttcccttattattaaccgagccattaattgttgcctggtctgagatgtttatataggcattctggctgacagccatatctgcattgactactgcagaacccaatataatcccaccatttttaacgttaacccccctcgcctgtgtcaatgtaccttcataagacatgactcctgagttatctttgacaagagcaccattccctgacaactctgtattaaaatcataatcgccagcaagattgagaatgaaatcgccatcattcttaatttttgctccggctacaataccatcagcattgattgtggttgttccgtcaagagtgcccccctcatcgattcttaaacgaccggctgagtttacggttgtatcggttgctgtgctgcctgatgtaacagccagaagccccccgttctctaatacaacatttgatgcatgattttgtgaaacggagaagctgccatagtggttagttccggtaacggtcgcccctgtcgaggtaaacaaattaccaccgctgcttaatgcaatattcagcgcactggcacctgcatccacgcgtatggccccgccgtttttgatgactgttccgcttacgttccctccttcatatacaaactgggagcccccctcattgataacagtagaagaagcacttccccctccgcttaccgcctgtaatcctccgctgttcaccaccgttccgtcagcacccccaccagagagcacatattcccggccgtcagtattagctacagtactggttgcagatgctcctgagcgaatatactgccgcccttccttgttaaggatagtccccgtcacattgcctgcataaacgtttaacctgccattcaggtttacgcttgctcctgacacggtaccaccagacacattgaccatgccgccgtcaaaaatttgagtaccagatgcctcgccac

SEQ ID NO: 128 - DNA, 3089 bp, Escherichia coli
  source 1..3089: mol_type = genomic DNA
agtgctgaccaaaaacacaacgccaatcagtgatgatgaaatggtgaaaagcggacagcatcagtaacgaaagtatcttagcgggcatgaaaatggcaaataacggtcaaacatcgtggcgttgacaaatacgattgctgcaattgctgctacttttaaaagtttcatgtaaaacccccatcggattgatttaaaagtcgaatggaaattaacgttgtgtcacgcgaatagccatttgcgactgtctctgcactacaattgccgttttttgagtaccatactgtgtaatatttgctttattaccagaacctttctggataatcatcgcagtattaccataagcaccttgcgaaatactggcatcgttggcactgcccgcctgatcaatatatgcaaggttataatctcctgtctggtcaatctttgcccggttgctactaccttcttgcgcaacaaccgccaaaagttttgagcctccctgccgtaactgagcactattattcgtcccagcttgaccaattatggctgcctgattaaatgaagacttactcaattcatttaccgcgaagttatattctgaattagctaaatcataacctgctgcggctgcaatcccaggcgcacccagtattgttaacatcataaataacaatttgtttttcatgttgtcaccctggacctggtcgtacatttaagaaattaaatcatttcaacttggttgttaacgcaacctgtattttgttaacgctgcgttacgatggaaagtatgtctgcggaaatatttttaataactcacccgcgcgttgtatttttctttttttgttcataccaaagtattaaaacccacgtaaatacgctgttatctacgcaaaaaatattttgttttcttttaaatctccgttttccgctatcaaaaatcaccagacagtcatttttcttgcccgtcgctgattgctgcgatatgtcttgcgcacaagccgtgacaaacctcgtctttttgcagtaaaaaattgtccacggaggtgcggagaaaaaacaagaacgttttacatgacgaaaggactacaccgaaatattttttatatgtattattagtaagttatcaccatttgtatgattttttaaaattgtgcaataaaaaccaaatgtacaacttttctatcatttctaaacttaataaaaccttaagattaacattttaatataacgagttacatttagttacatgtttaacacttgatttaagatttgtaatggctagattgaaatcagatgtaatccattagttttatattttacccatttagggctgatttattactacacacagcagtgcaacatctgtcagtacttctggtgcttctattttagaggcagctgtcaggtgtgcgatcaataaaaaaagcggggtttcatcatgtttaatgaagtccatagtattcatggtcatacattattgttgatcactaaaccgtctttgcaagcgacagctctcttgcagcaccttaaacaatcgctggcaattacaggaaaattacataatattcaacgttctctggacgatatatcttcaggctctattattcttctggatatgatggaagcagataaaaagcttatccattattggcaggatactttgagcaggaaaaacaacaatatcaaaatattgttgctaaatacgcctgaagattacccgtaccgcgacattgaaaactggcctcatatcaacggcgttttttatgccatggaggatcaagaacgtgttgtcaatgggttgcaaggcgtcctgcgcggcgaatgctactttacgcaaaagcttgccagttacctgattacacattctggtaactatcgttataacagcacggaatcagccctccttactcatcgggaaaaagagatcctgaataagctgcgtatcggcgcgtctaataacgagatcgctcgttcgttgttcatcagcgaaaatacggttaaaacgcatctttataatcttttcaagaagatagccgtaaaaaaccggacacaagcggtttcctgggcaaacgataacctcaggcgataaagccatgaaacgttatttacgctggattgtggcggcagaatttctgttcgccgcagggaatcttcacgccgttgaggtagaagtcccgggattgttaactgaccatactgtttcatctattggccatgatttttaccgagcctttagtgataaatgggaaagtgactatacgggtaacttaacgattaatgaaaggcccagtgcacgatggggaagctggatcactataacggtcaatcaggacgttattttccagacttttttatttccgttgaaaagagacttcgagaaaactgtcgtctttgcactgattcaaactgaagaagcactaaatcgtcgccagataaatcaggcgttattaagtacgggcgatttggcgcatgatgaattctaaataaaaaattgttcggaggctgcaatgcgtgtcaaacatgcagtagttctactcatgcttatttcgccattaagttgggctggaaccatgactttccagttccgtaatccaaactttggtggtaacccaaataatggcgcttttttattaaatagcgctcaggcccaaaactcttataaagatccgagctataacgatgactttggtattgaaacaccctcagcgttagataactttactcaggccatccagtcacaaattttaggtgggctactgtcgaatattaataccggtaaaccgggccgcatggtgaccaacgattatattgttgatattgctaaccgcgatggtcaattgcagttgaacgtgacagatcgtaaaaccggacaaacctcgaccatccaggtttcgggtttacaaaataactcaaccgatttttaagccccagcttcataaggaaaataatcatgcagcgcttatttcttttggttgccgtcatgggtgatgctgccaacttactgatttagtgtatgatggtgtttttgaggtgctccagtggcttctgtttctatcagctgtccctcctgttcagctactgacggggtggtgcgtaacggcaaaagcacc

SEQ ID NO: 129 - DNA, 3076 bp, Escherichia coli
  source 1..3076: mol_type = genomic DNA
gctcagaaacaaggttgggacaagcacttccaggctaacacagtcagaaatcgaaacgtactctcaacagttcgcttaggcatggaagttttgcggcattctggctacacaataacaagggaagacttactcgtggctgcaaccctactagctcaaaatttattcacacatggttacgctttggggaaattatgaggggatctctcagtactcgacacctgctttacgggtgaaaaaaatcaatatagcacttcgatatccgataaagtcggttcccggtaacaacaacagaatccttttttaattattgtttcgttgtttttggtgtgattcagaaaataaatattttagacagtagccagtcaggcgttaaaaatggggcggatagtgaggcggttttggctgcgcttattgaacatttagaattgatcaatccttctggcagattaagccaaaatacccgttcggcaatgcttcagttacgcgaagaggaatggtctgaattctttttttggttgctaaattctctggagtgtctggattatgtgattattaatttaactccagaaagcaaaaaaacgttgatgagtgaacaccgtaacaatattcaggtagcaattgatgctttatatagccaacgtcggcgtaaatcgccgggtgatgaaagtgaaacacttacccgtagaaatgacgctatcttcggcaaccacgtatggcaaacatttgcgcaatacttcccgccaggacttgaaaaaccgtctgtgtagaaaaaaccatagctatggtgttatctgccgacaacgccatccggagaagccgaatgacgttgtcggagtaagcgctggttaaggtgtgggttgtgcctctttggttgagggttgcgtcgttgctgacttaacggtcggacgcgtcgccggaacattgtcacacggttgctctttcgggcagatcaaatccagcattttcagcgtcacgccattggtccagccaaagccatcctgtaatggatattcgccaccgccgccccccgttccggtggtgctgacatcatatttttccaccagctttttctcccggtcataggtgtgctgaacattggtcaggaagtgccagctaatgtccatcgccacctctttttgcccgtagttttgtaatccttctgtcgcgacccactgtaacggtgcccagccatttggcgcatcccattgttgcccacttttcaccgacgtggtgttcaggccgccgggttgcagcagatgtgttttcgtcgccgtcgccattttgttggcgcgatctttcgctgccgcattgacgtacagcgggaacagggcggccgcggttaactgattgcgcactttatgacttttcaggtcgtaatcggcataccagccttgttgatcgttccacatgtatttttcgatccctttttgacgggcatttgccagcgtttcgtactggtttgccatcgcgttatctccggcagctttgctggcgcgggcgaggattttttccattttaaacatcaggctgttcagatcgaccggtacgatgctggtggtgcgtaaggtatttagttgatgcgggttgtccatccagcgcgagctgaaatcccagccagacgcagcggcagagcgcaggtcgcggtaaatttcagtggcaggtcgattcggattgcttttggcggtggcaatatcttccacccatgactctggtcgtggcgtatcgcgatcgtcccagtagcggttgagaagggtaccatcctgaagttttacaacgcgtttttcctgttgtccggcttgcaggttttcaacaccgtccatccagtaagcatattctttttgcatttgcggcaggtattgcttcaacgcggcatcgccttcatgctgcgccagtaactctaccatcagggcaaagaagggcggttgcgagcggcttaaatagtaactgcggttgccgttgggaatatgaccgtaagtgtctatttcatgagcaaaattggccaccatatccgcgactttatcccagtgaccgctttcggcaagtcctaacatggtgaagtaactgtcccagtaatatacctcgcgaaaacgtccgcccggcacgacataaggttccggcagcggtaacagagaatcccatttttcggtgttttcggtagaacgcgttaataccggccaaagtccgtcaatatgttcgcgcagtgactgcccctctggcggaacatatttctcgccctctttcggcagggtgaaattgacgttaacgaaatggagcagatcaaatccgctctggttttgctgcatccgataatcagcaaggatcatcagcggatcgctgttcggcacggcatcggcaaaggttttttggtccggaaaaagtttggcgttttgcacatcattaaacagcggccctaataaaatatcaggcggctgtggtgttaccggtgtttcttctgcctgcaccgatagcgcagcgaaacacaaaaagatacaggctggaattaacgccattttttgcgggcgagaaggtgcgggggatttcatcaatcattctcctttggcgaaaccgaataaaacggtattcaagtatcagaaaaccttagttcaggatcgcactagctgcatgatcgaaatctcattctgcgaactgtcaggcattttagaaaagggaattaaagggataaataacggtgaaatagagtgatcaaataacgtctgtttattagccagtcagcgacgttgggttcgtgattagcgaagaaaaatcatcataaattggtgaaaaatataacaggtagttaaaaaccattagtgctgagtaaattgccggatgacatcagaacgatgccatccgaacagtggcttaaccctgagagatcccctcataatttccccaaagcgtaaccatgtgtgaataaattttgagctagtagggttgcagccacgagtaagtcttcccttgttattgtgtagccagaatgccgcaaaacttccatgcctaagcgaactgttgagagtacgtttcgatttctgactgtgttagcctggaagtgcttgtcccaaccttgtttctgagc

SEQ ID NO: 130 - DNA, 2950 bp, Escherichia coli
  source 1..2950: mol_type = genomic DNA
accgaaaggagactgccacgcataatttcttcagccctttccattcaaacgtgaaatcaataagttcatcagggacatcgcaaacaatatgaagacggatttcttctctgccgtgactcttttcactcattgcgtaactgtcatgctctgaattatttaattctttcagcggaaatttttcctcaaaggctttatttagccgcccctggtttccttttaccgcgaataaataatcacctccctgtttttgtatcttttctgcaatatctttctggcagcccatcgcatcagttgtgatgatttttcctttaatatccatcatgttaagaagttcaggaatggctgtaatctcattggatttctcatccgtcttgatctgtccgaggaccagactatgcattgttgagaacgcactaatgacatgaatcgctcccctgcgacgactcttgtcataagagtgccggagcgtttttccatcaattgcaatgacgtctttatcatctgaagaatggcagtcacgcatccagttaataaagcactcgtgaaattttgcaggactgatacaggatacaactctggcaatgatatcgtgaacaggaataccattttcaaaatcaccatatcacttcaaaacatcgggatgtgtttccccaaaatcctctatatcttcccagccttctgcaccagaaataacggcacaaatagtcaacagtagaatatccgataatttatgttccactttccaggcttgtctgtaatcggggataatagaaatatgttccatcaattttttaagttccattttgttctccttaattatgtaaggagtatttgatcatgtataagcaataaaaaacagcttcaggtaatgaggaatatctcaatttttaaacataaaatgcgaattatttagtacaaaaagtgaacttttgatgatctttccctaatctcacataggatcagatctcgtctgatcgttccccctgcgctcactaccatggctctttaccacagcagccggggttgtttgggaccgacttccgacagcagatcccggtgggcctgccaccatctcttcacaagcttatgcttattacatgcaaaacgtcccgttttgcatctttgtgcctacggcacaccgatgatctttccctgtgatctttccctgaatctgcccctgagaacctgaatcaaacgtctgactcgcagaaccatctgtttctcgcgctctgtagaacttcatgaaaaagtcatcggtgcttttatcgaaaaatacatgttctactaattgaagtcatcatcaaaaaatttaattaatcgaatcatacctataaccttttaattttacttttttgtcttcaacattaaacacaaaaacctcttggacaattctttttgaatattctgagaaatatatcaatgtaatttcatcgtttgaaaataatccgcgagtgattttttcagttttaagggttgattttttataagtcccaagatctttttcttttgcttcgttcattatgtcgataaattttttttcagatgtggcagtctgaaaatcacttgaagtgattttatatatatcactgtatttccctgtctgatataaaccacgaaagatattaacttcttgtctagctggctctatgtccactggagaacaaccacacaataaaaataaaactaaaaatatatattttttcatatttcctcctgttaattgacccagcattcttgccacgttctacaagccagagtcataactgaagcgtcaacacctgcaccgataccaacagattctgtcgatgattctggattatcaacatccactacataagtatacgcaaaatgccccccaactccgccgccaaccgttacacctactgaattgctgactcccgatgtaggtaaagacttggtctcagaatatgtgatagccgcatttatcccaccaccaattcctgcatgtccgcatgctgtagcataaatacaaatatcagataacatttcacctttctttttagcaaacgcaacgccaagtcctgcatgaccacctaatgatattagatctccactgccagtaatatcaattgatgatgttccatatgaatcatcatgccaaacatcatataataattgatataaattatacaaacccaaaggatccatccttattatcggattcagtgggtaattatacaggttccatccccccgccagcccaatggggtcttgtgtaatatacctcccctgtagcgggtcatagtaccggttccggttatagtacagccctgattcctcatcatgctgctgccccggcagacggtatggctggtgcaggtaatacgggttctcttcattaagctggttgccccattcatcatactccccgcgccacgccgtattgccgtcttcgctgatgagcgccagcggcaggccccggtggtcgcagtggtaaaaatgaacttttcgcgccggtgtgtattccggctccacctgtctggccagttgctccaccgtcagcccgcactgcgcaagccacgcccggctttcactgctcacgcggtctgcccggatttcttcctccagcctgtccagcagccgcaccagttcagccggaaataccacgccgtgcccgtcctcgctcccttcctgctgcagcttctccgccaggctgcggcgctgcgctttctcccgctcgccgttgtctgtttcgatgcggatgagcggcgcgaagctccccggctgatataccgtctggatacgcgtggtgtcggtctgtaccgtcgtcagccggtcgccgtcccacccgtaccacgtcatctccggtttacgcgacagcgacatccaccccgtcaggtcacgctcccgccgccatacccgtttcgccattcgccgtcccagcgggtcgtagaggtagcggctctcgaccagtggctcgccatgctgt

SEQ ID NO: 131 - DNA, 2945 bp, Escherichia coli
  source 1..2945: mol_type = genomic DNA
gcgtcaaaattgagcagaccgaggacggcaaacattatgtcgcgggtattggcctcagcatggaggacactgaggaaggcaaactgagccagtttctggttgccgccaatcgtatcgcgtttattgatccggcaaacgggaatgaaacgccgatgtttgtggcgcagggcaatcagatattcatgaacgacgtgttcctgaagcgcctgacggcccccaccattaccagcggcggtaatcctccggtattttccctgacaccggacgggcggctgacggcgaaaaatgccgatatcagcggtaacgtgaatgcgaactccgggacgctcaacaacgtcacgattaacgagaactgtcgggttctgggaaaactgtccgccaaccagattgaaggcgatctcgttaaaacagtgggcaaagctttcccccgggactcccgtgcaccggaacggtggccatcagggaccatcaccgtcagggtttatgacgatcagccgtttgaccggcagattgttattccggcggtggcattcagcggcgccaaacatgagcgggagaataacgatatttattcgtcatgccgcctgatagtacggaaaaacggtgctgaaatttataaccgtaccgcgctggataatacgctgatttacagtggcgttattgatatgcctgccggtcacggtcacacgacgctggagttttcggtgtcagcatggctggtaaatgactggtatcccacagcaagtatcagcgatttgctggttgtggtgatgaagaaagccaccgcaggcatcagtatcagctgaattttataacccatatacgggcgtcagaaatgacgccttttttattgcagaaaagcgagaggtaattatgcgtaaactttatgccgccattttgtccgcagccatctgtctggccgtatcaggtgcgcctgcatgggcgtctgagcagcaggccacgctgagcgcggggtatcttcatgcctcgacgaacgttcccggcgacgatgatctgaacgggattaacgtgaaataccgttatgaatttacggacacgctggggctggtgacgtcattcagctatgcaggagacaagaatcgccagctgacccgttacagcgatacccgctggcatgaagattcagtgcgtaaccgctggttcagcgtgatggcggggccgtctgtgcgcgtgaatgaatggttcagcgcgtatgcgatggcgggtgtggcttacagccgtgtgtcgactttctccggggattatctccgcgtaactgacaacaaggggaaaacgcacgatgtgctgaccggaagtgatgacggtcgccacagcaacacgtctctggcgtggggagctggcgtgcagtttaacccgaccgaatccgtggccattgatattgcttatgaagactccggcagtggcgactggcgcactgacggtttcatcgtgggtgtcggttataagttctgattagccaggtaacacagtgttatgacaacccgccggttctggcgggcttttttgtggggtgaatatggcagtaaagatttcaggtgtactgaaagacggcacaggaaaaccggtacagaactgcacaatccagctgaaagcaaaacgtaacagcaccacggtggtggtgaacacgctggcctcagaaaatccggatgaagccgggcgttacagcatggacgttgagtacggtcagtacagtgtcaccctgctggttgaaggttttccgccgtcacatgccgggaccattaccgtgtatgaagattcccgacccggtacgctgaatgattttctcggtgccatgacggaggatgatgcccgtccggaggcactgcgccgttttgaactgatggtggaagaggtggcgcgtaacgcgtccgcggtggcacagaacacggcagccgcgaagaagtcagccggcgatgccggcacatctgcccgtgaggcggcaacccatgcgactgatgctgcggactcagcacgcgcagccagcacgtcagccggtgaggccgcgacgtcggctcaggaggctttttccagcgcaggaacggcatcagcaaaggccagtgaggcctcaaaaagtgctgccgccgcggagttctcaaaaagcgcggcggccaccagtgctgaggcagcaaaaacgtcagaagcggatgcggcagcgtcacaacaatcagcagccacttctgcatccaccgcgaccacgaaagcgtcagaagcagtcacttcagcccgggatgcggcggcgtcaaaagaggcggcaaaatcatcagaaacgaacgcatcatcaagcgccagtagtgccgcttcctcggcaacggcggccggcaattccgcgaaagcggccagaacgtccgagacgaacgccaggtcttctgaaacggcagcggaacagagcgcctctgctgcggcaggctcagaaaccgcggctgcatcatcggcccgagagtcatcagtgaaggcagaggaggcctcagccagtgccaccgccgccggaaaatcggcagaaaacgctgcatcctctgcagcagcagccacaacgaaggctggcgaagccactgaacaggctgcggcagcagagatgtctgcttccgcagcgaagacctcggagacgaacgcgaaagcgtcggaaacccgagctggaacctcagaaacggcggccgcatcgtccgcccgttcggcggcatcatcagcatcctctgcttcagtctcagaagctgaagcggaccgccaggcatcagaggcggcggagagtgcgtcagccgcctccacgaaggcggaagaggctgcagacagtgcgacggcagcagcacagagtaaaactgcggcagagtccgcagcagcgcgttcagagaccgcggcagagcgttcagaaagcgccgctgcccgggcagaggaaactgcctccgcggtggggttgtgtgatgcagggc

SEQ ID NO: 132 - DNA, 2944 bp, Escherichia coli
  source 1..2944: mol_type = genomic DNA
cggcgaagacggtggcagtgtggtgttcccgccggtgctggtgcagatgctcgaccggctggaaagtgaaatcctggctgaccgggtgagtgaggaaagccgccgctggctggcatcgtgcggcctgccgctggcgctcatcagcacggaaggggcaacagcgtggtgcgcagaatatgatgaatggggcaacctgctgaatgaagagaacccgcatcagctgcagcagcttatccggctgccggggcagcagtatgatgaggagtccggcctgtattacaaccgccaccgctattatgacccgctgcaggggcggtatatcactcaggatccgattgggctgaaggggggatggaacctgtatacatatccgctgagcccggtgaatagcatggatccattaggattatatgaatttaaatcaaaaaatatagatgatattggaatatttgcattggcaatgtgtaatggagaatcaattaacgagaataaagaatatggtggactaatatgtaagaagcaaggtgaatatttccccatgaatccgataagttcaaatgataatgatagtgtagacttgcgaaatataaaatgccctgaaggttcagagagagtaggcgattatcacactcacggtttttactctgacgataaaggaaataaagtaacaaaagaaaatgatgtttatgatagtctaaatttttcaagcaaagatttaacgaattcttatatgaatggaatgggaaaaaaagaatacagtagttacttgggaacaccaaataacacctatctaaaatataatcccaaagctaaagggaatggagttacaattatcaggcaagggagtaattaaaatgaaggcaatacaatgttgttatttccttgctttagtctccagtcatttaatggctggagttatgggtgatgataatatatttttaagtaattcggattcagctgctttatattgtgtggctaaaatatttccagatggagaaaatattttaatatataaagtaaatataattaatgctagttcaaaaaaagatgttttttttatgaaagcccaacatcaacccacaatgacataatggggggcgggggaatgtcatatgcctatgaatatgatgtaaaatataatatatgtcatttgagaaaaaagagcagaatgaggtaaaaatctttggctgtgtattcagtctggtaatcatccaaggaaagcttatcagaagggtgatgactccaattagtagaacatatattttcgataaaagcaccgatgactttttcatgaagttctacagaacgcgagaaacagatggttctgcgggccagacgtttgattagggttctcagggtcagattgttacgctcaatgtgctgagtaaaaatcttaccagtcagatgcttctccttcggtaactttctagcgtaactaccccattcgtcagtggtcaacatgccgatggtaaaagggtaagcagcgcccgcaattcacgacaggtttcgtcagtccgggggccaaaagtgtaggctagaacaccaccagttttcgtgttgtacacgtaccagagccagtgctgtcgcgctttactgccgacaaagctccattgctgactaagtttgcagatgagtgccacatcagcatgagcgaccggggatgacgttattcttcgtggcgagagttttttaaagttcggatgactgtattaatgccgattttcagcgtacgggcagtatcgcgaaccccggcaccgttgaaagtcatttcagcgatttggtctttaactcccggtttacggggctcgtaacagtaactgagctgaaatacccggtgacagtcacggccgcggaatcgatcatgtctttttgggttctgcccgtgacggtaaacctgaacggactggcaacgggggcaatgaaggttaactgtgaccatgaaacaaccttaaaagcgagtattatatccttaattcaactaattggaggcatcaccgtttaccggagcgacagcttgcggaaaggtcgtgcaactacaaagcaacaaacagactacggcgggaattatttttttcatcatccattaccacgaaaacagcggccactctttggcaaccgtggtgagttgtggcgcgtcgaaaacggcttgtggtgaaactaccgtttcctcaagcggaatatttttaccgtagcgttctttgagcttcgcctggaccagcgggttgctgagatcaaactctttcaacttctgctgttcgcccacgcgcattcccagcgcgttctggtaaaccttccacaccacttccgaacagtactggcgatcgtcgctccatgagaagctgaaatcatacggtttaccgagataacgttttgccgtttgcgccagtttttgctgttgttcaacactcagtccgccttcaacgcggcgaacgacgtatttgcccttttcaccatgggcgatccactgcttgagcggggtgtatttcaccgggccgaccgcttcaaaaacgtagggctttttgttgcgtatcaccagcataccggtgtggctgtaatcggaatgggttgccagttggatcgctttactttgcgatgagcgagagatttgaaagatgatgtcgccagtttgcggctgccaggcaaaggcaggtacagaaaccagcaggctgaggatcagcagcctgtttttcatagttaaacgtccatgtataaaaagcggtgggtcgcagacaacgtgctcgttgtttatgccggatgcggcgtgaacgccttatccggcctacaagttcgtgcaaattcaataaattgcaatatgacgtagatactgttatggcctgcaagttttttcctggtccggtttcccggattgcaggcatgccagacacagcgccgtcaggcgctgtttttttcatcccttccgcgatttttacgccgctaccggatt

SEQ ID NO: 133 - DNA, 2591 bp, Escherichia coli
  source 1..2591: mol_type = genomic DNA
ggtgcttttgccgttacgcaccaccccgtcagtagctgaacaggagggacagctgatagaaacagaagccactggagcacctcaaaaacaccatcatacactaaatcagtaagttggcagcatcaccggtgtaggaaacgttatccatgctgtatagataaagtatatatgtatcgatgccatattacagtcattaagattactacaaaaaattggatgtaaatatgctgaataaaatggcgaacaataccatctctagtaggttgatatatttgtaaatagacccgctttagttccatacattttttgagatcccggcctggtaatgttgttgacgatattcctccggtttcaggttgatcagtgattcatgagggcattcacagttatattctggcagccattgttccgtgattttacgcacttcattcagcgttctgaacagatacaaatcgagaatttctatgcgatatgttctgttaaagtgttcaatgaatgcgttctgtgtcggtttacccagttggataaaatccagttgtactgtatgtttctctgcccattctgccagtgccagcgagataaattccggaccattatccatgtgaagcattacagaatacccccggtttgctgcgatcctgtcgaggacacgaaccactcactgagccggtaaattgaagtctatttcgataggcaacgcctcgcgattaaagtcataaatgacgatgaatatacgaaaacaacgaccacaaatcagggcgtcatgcatgaagtcaacagaccagctctggtttaacgcttcaggcatagcaagtggcgatagatttcgtgccagcagacgctgcttgcctttacgacgaaaattcagcttcagcagacagttaatacggtggccccctttgtgattccacgggtatccctgccgtcgcagaatctaaaacaactctggaaaaccatatcgtggataccgttcagcagcagcctgtagcgcagaaataaccgcttcgtcacgcgtagtattcggacgataatgataaaccgttctactcaggtcaaggctccgacaggcctgacggatactaagcacgaacgtcgttatcagatgagtgaccagctcatgcttaaaggctggtttcaaagctttttttcgataacatctttcaatgtccggctttcaaggctgatgtcagcaaacatctgtttgagatgccagttctcgtcctcaaccccctttatctttttaatatcagaggcctccatatcaccgtatttagatttccaattgtcgtaggtcgcttcagagataccggcctcgcggcaaatatccttgacagttcgtccggcttcaaccgacttaatcacagtgatgatctgatgctcagtaaaacggactttacgcataacgctctccttcgttggcagaatgagtatgccggagcactctaaatgtgaatggttcgattatgcgggatacttacatattgtcagtaaatctccccctctacatgttaaaggtagataaaaataattgatgattttcatctttctgaatcgccacggataatctagacacttccgagccgttgataatactggttttcatattctgtcggtgacatctgttcgctaaaaccatgccgacgcttactgttataaaacatttcgatgtaatcaaaaatatcactgcgggcttcttcccgcgttccgtagatctttttctttatccgttcacgtttcaacaactggaaaaaactttctgcaaccgcattatcatggcagttaccacgacggctcatgctaccctccaggccgtgtgatttcaggaacgactgccactcatggcttgtgtactgactgccctgatccgaatgaaccagcacctgtttttcgggattacgccgccatacagccatcagcagtgcgttcaggacaatgtcctttgtcatccgggattgcatggaccagccgataattttgcgtgagaacagctcaacaacaacggcaagatacagccagccttcgtgggtcctgatgtaggttatgtccgttacccaacgctcatcaggagcatccggattgaactgtcgctggagcctgttgggtgacacgatactggcctcgcctttacgtgcccgcgggcttcggtatccgacctgagcctttattccgacacgtttcatcagtctccagactctgtttactccgcactgttgcccgctgtcacgcagatccagatggattttgcgataaccatagacgcatcccgattccagccagaactgtttaatctgtcctgtcagtctcaggtctgcctgatggcgttgtgaatgcggctgctgaagccaggcgtaaaaaccactgggatgaacatccagcacccgacagagcaggcgaacaggccagcaacaggagttgtcacggataaaggcgtacctcagtcggacagctttgcgaagtacgccgctgtagattcaattggtcaacgcaacagttatgtgaaaacatggggttgcggaggttttttgaatgagacgaacatttacagcagaggaaaaagcctctgtttttgaactatggaagaacggaacagg

SEQ ID NO: 134 - DNA, 2457 bp, Escherichia coli
  source 1..2457: mol_type = genomic DNA
gtaagcgtaaaccgaccgccgtatgtagccattagacaagaattggtaacttagacgcccatctgacacagacggacatctaagtatggaattacaggactggcgaaaagaacctcgtaaaaagtattcgaatgaattcaaacttcgtatggttgaactggcatcacaacctggagcttgtgttgcacagattgcacgagaaaatggcgtcaatgataatgttattttcaaatggctcaggctctggcagaacgaagggcgtgtttcgcggcgtcttccggtaacaacctcttctgacactggcgttgaattattacctgtagaaataacgccggatgagcagaaagaacctgtggcggccattgcgccgtctttatccacttccactcagaccagagtcagtgccagttcctgcaaggtggaattccgtcacggtaacatgacgctggaaaatccatcgccagagctgctcacggtgttaatccgcgaactgagcgggaggggaagatgatttcactcccatcaggtacccgtatctggctcgttgccggcattaccgatatgcgtaaatccttcaacggactgggagaacaggtacaacatgtgctgaatgataatcccttctccggtcacctgtttatcttccgtggccgacggggggacaccgttaaaattctttgggctgatgctgatggtctgtgcctgttcaccaaacgcctggaggaaggccagtttatctggcctgcggtgcgtgacggtaagatatccattacccgctcgcaactggcaatgctcctcgataagctggactggcgtcagccaaaaacatcccgccttaacgccctgacaatgttgtaaaaaacacctggccgcattataaaaacggccatgagtcagaaatacctcattcgcattgcagaactggaaagccagctccgtcagaaagaccagcaactgagtctggttgaagagacggaggccttcctgcgctctgcactggcacgtgccgaagaaaagatcgaagaagatgaacgggaaatagaacatctgcgggctcagatagaaaaactgcgccggatgctgttcggtacccgttctgaaaaactgcgtcgtgaagttgaacaggctgaggccctgctgaaacaacgcgaacaggacagcgatcgttacagtgggcgggaagacgatccacaggttccccgccagttgcgacagtcgcgccatcgtcgtccgttaccggcacaccttccccgtgaaatacagcgtctggagcctgaagaaagctgttgcccggagtgtggcggtgagctggattatctgggggaagtcagtgcagaacaactggaactggtgagcagcgccctgaaagtgatccgcacagaacgggtaaaaaaagcctgtacaaaatgtgactgcatcgttgaagcaccggcgccgtcccgcccgatagagcgtggtatcgcgggccccggattacttgcccgcgtgttaacgggaaaatactgcgaacacctgccactgtatcgtcagagtgaaatctttgcccgacagggtgtcgaactgagccgtgcattactctccaactgggttgacgcgtgctgccagttaatgacgccgctgaatgatgccctgtaccgttatgtgatgaatacccgcaagcttcacactgacgacacaccggtaaaggtactggcaccgggcctgaaaaagacgaaaacagggcgcatctggacgtatgtccgggatgatcgcaatgcgggttcgtcatctcctccggcggtctggttcgcgtactcaccgaaccggcaggggaaacacccggagcaacacctccgccccttccggggtatcctgcaggcggaggcgttcacaggttatgacaggctgttcagtgcagaacgtgaaggtggtgcgctgacagaagttgcgtgctgggcccatgcccggagaaaaatccacgatgtatacatcagcagcaaaagtgcgacggcagaagaagccctgaagcgaatcagtgaactgtacgccatcgaggatgaaatacggggattaccagagtcagagcgtcttgcagtcagacagcagcgaagcaaagcgttactgacgtcgctgcatgaatggatggtggagaagaatggcacgctgtcgaaaaaatccagactgggcgaagcgttcagctatgtactgaatcagagggacgccctctgttattacagtgatgacggactggcggagacggacaataacacagcggaaagagcgcttcgtgcagtctgtcttggaaagaaaaattacgtgttcttcggtagcgatcacggcggcgagcgtggtgcacagctatacgggctgatcggcacctgccgtctgaacggtatcgatccggaagcgtatctgcgccatattctgagcgtactgccggaatggccctccaaccgtgttgacgaactcctgccatgg

SEQ ID NO: 135 - DNA, 2298 bp, Escherichia coli
  source 1..2298: mol_type = genomic DNA
aagaacggcattgcataaccttgcagtggcgatcgagcattacaatgaaaaccatccgcatagtgcgttgggttatcgctctccgcgagaatatcgacgtcagcgggtaatgttaacttaagatacaacccctgtctggaaataagggggcaagaacaacattatagttaataaagtttcctctctcaatcgtcaagaagatgaatgatataccgctaatatatacaacatatttctccattcgtatcaggcattgctactccaagaacaatttataatttaggagagaatcatatggcttttgtatcatcaacaggaactccaacccaagaaggagacaaaggtattctgtatgattttaatgacggagcaagagttttgcttccgaaaggcgagtggcatgttaatatcatagatgaagattctggaaatattttattttcatgcgatacgtcaggagggtgggtaacaagcacaaaaaaatattatgtcaggttcagagtgcaggtatttaaaaaaggagaaacatctccctgtcttgacactgtaatgaatctgaagggtaagcatgttttaatatcatttccaacaggaacgctgggagatattattgcatggtttcattatgctgaaaaattccggataaaacaccagtgcacactggaatgttctgttagtgaagaattcgtaactctactctcagataattatccggatataaaattcactccggcacagaataaatatgaaggtaaaccatatgcaacgtacagaattggtttgttttttaatggagatacagataaccagcctgtagatttccgtctggttggttttcatcgtaatgccggatacatccttggcgtatctcctcaggaagaaccccccagactcaatctctcagctgaaaggaaaattcaggagccttatgtctgtattgccgtgcagtctacagcacaggcaaagcactggaataatggtccgggatgggctgaagtggtcagtcacttaaaggaactggggtatcgggttttatgtattgacaggaatgcacattccggtcatggctttgtctggaatcatattccctggggagccgaagattttaccggagcactgcctctccaggagcgagtggatttattacgacatgccagtttttttgtcggcttagccagtggtttatcgtggctggcatgggcatccagaatccctgtggttttaatcagtggttttagcaggcctgacagtgagttttataccccctggagagtgtttaactcacatgggtgtaatggatgctgggacaatatcaattatgacttcgatcatgctgattttctgtggtgtcctgtgcataaaggtacggacagacagtttgaatgcacccgacttattacagggaaacaggtgtgtggggttattgattccctgcacaattatttaatcaaaaataaggttgttgaagaatgaacaaagcatacagcattgtatggaatagctcccggcaggcatgggttgtggcctctgagttagccagaggacatggcttcgtccttgcgaaaaacacacttctggtattaacagtagcttctgctgtcggaaatgcttttgctcaaacatacaattgctctacgggacaagcatgtaccccaaacattatttcttccggcgatactcaatatgtatttaatactggtgtaaccaataatactgttatctccggtacaggaaaacaggttgttagtagtgggggcaaaacaaattttacaactattaatgataaaaatggcaatcaggttgtaggatataatggaagtgcgacaaatacgaaagtcagctccggcggtttccagcgcgtaagtgcaggtggtacagccaccggtacaaaactgagcggcggtaaccagaacgtctcttctggcggcagtgccactgctgctgaagtgtactctggtggcaagcaaactgtctatgcaggtggcgaggcatctggtactcaaatttttgacggcggcatggtcaatgtgtctggtggtaccgtgtcagatacagttgtgaatgcgtctggtactcagaatatctataccggagggcatgctgtaagtacacatgttagcaatggcggtaatgagtatatttttgctggcggtaatgccagtgggacagttgtcagctccggcggtttccagcgcgtaagtgcaggtggtacagccaccggtacaaaactgagcggcggtaaccagaacgtctcttctggcggcagtgccactgctgctgaagtgtactctggtggca

SEQ ID NO: 136 - DNA, 2237 bp, Escherichia coli
  source 1..2237: mol_type = genomic DNA
ctgacagcggtatccgtctttcggcggtgtggctgatgcacgacccggaatacccggaaaatttacctgccgcgccactggtgtgctacgactggacgccacgcggtgagctggcggcggtgtatgaccgcagcggtacgcagatgcgccactttacttacgatgataaataccggggccggatggtggggcaccgttatgcaggcaggccggagatgcgctaccgctacgacgatgcggggcgggtggtggagcaacttaacccggcaggcctgagttaccgctaccagtatgagcaggaccgcatcaccgtcaccgacagcctgaaccggcgtgaggtgctgcatacagaaggcggggccgggctgaagcgggtggtgaaaaaagaactggcggacggcagcgtcacgcacagcgggtatgacgcggcaggaaggctaacggcgcagacggacgcggcgggacggcggacagagtacggtctgaatgtggtgtccggcgatatcacggacatcaccacaccggacgggcgggagacgaaattttactataacgacgggaaccagctgacggcggtggtgtccccggacgggctggagagccgccgggcatatgatgaaccgggcaggctggtatcggagacatcgcgcagtggggacgtcatccggtatgcttatgataatccgcacagtgaattaccggccacgacaacagatgcgacgggcagcacccggcagatgacgtggagccgctacgggcagttgctggcgttcactgactgctcgggctaccagacccgctatgaatacgaccgcttcggccagatgacggcggttcaccgcgaggaaggtatcagcctttaccgccactatgacaaccgtggccggttaacctcggtgaaagacgcacagggccgtgaaacgcagtatgagtacaacgccgcaggcgacctgactgccgttatcaccccggacggcaaccggagcgagacacagtacgatgcgtggggaaaggcggtcagcaccacgcagggcgggctgacgcgcagcatggaatacgatgctgccggacgtgtcatcagtctgactaacgagaacggcagccacagcgacttcagctacgatgcgctggaccggttggtacagcagggcggctttgacgggcggacgcaacgttatcattatgacctgaccggaaaactcacgcagagtgaagatgaggggcttgtcaccctctggtactacgatgaatcggaccgtatcactcaccgcacggtgaacggcgaaccggcagagcagtggcagtatgatgaccacggctggctgacagacatcagccacctgagcgacggccaccgtgtcgctgtccactacggctacgacgataagggccgcctgaccggcgaacggcagacggtggagaacccggagacgggggaactgctgtggcagcatgagacgaaacacgcctacaacgaacaggggctggcaaaccgcgtcacgccggacagcctgccgccggtggagtggctgacctacggcagcggttacctggcgggcatgaagctgggcgggacgccgctggtcgagtatacgcgggacaggctgcaccgtgagacggtgcgcagcttcggcagcatggcaggcagtaatgccgcatatgaactgaccagcacatacacccccgcaggccagttacagagccagcacctgaacagcctggtgtatgaccgtgactacgggtggaatgacaacggcgacctggtgcgcatcagcggtccgcgacagacgcgggaatacggctacagcgccacgggcaggctggagagcgtgcgcaccctcgcaccggacctggacatccgcatcccgtatgccaccgacccggcgggaaaccgcctgccggacccggagctacacccggacagcacgctcacggcgtggccggataaccgcatcgcagaggatgcgcactatgtttaccactatgatgaatacggcagactgacggagaagacggaccgtatcccgacgggtgtgatacggacggacgacgagcggacccaccactaccactacgacagccagcaccgcctggtgttccacacgcggatacagcatggcgagccactggtcgagagccgctacctctacgacccgctgggacggcgaatggcgaaacgggtatggcggcgggagcgtgacctgacggggtggatgtcgctgtcgcgtaaaccggag

SEQ ID NO: 137 - DNA, 2121 bp, Escherichia coli
  source 1..2121: mol_type = genomic DNA
aagaacggcattgcataaccttgcagtggcgatcgagcattacaatgaaaaccatccgcatagtgcgttgggttatcgctctccgcgagaatatcgacgtcagcgggtaatgttaacttaagatacaccccctgtctggaaataagggggcaagaacataaatgcctgagggatcgtcaggttgagtcgctgctgaccaacatctaaatgcgcagtagcgtcatggatcatggaggttaatggcacgcaggcatcatccgccagcagattcataccggagacagaagccgtattcagccccatactggcaagttgcgcgcgtgtcaggcagggaacaatcccttgttcgctgtcgcccgtattaaatgtgacatcacgcgttgccatataaccattattcaaatagatatcgacacgatacgtccctggcggtaattcttgcccattttcaaaacgcgataaatcagccacagcctggggatcatccgctaaaaagcgcggattaaaatagagttcggcagatgacaaaggtgtctgtgcggcaaaagcacaggcgacaaagagccggacaaaaaaaccagccaaacgatgcttacgaatatgcaagcattgtgtgtttcgctggtaaagtcttaaattcagatatgacattattcctccggtttaaaatcacccggcagtcaattctttttattcaggcgaaaaattccccctgcgttattccattacgcccgtcattttgggggtaagtgcgccataatcatttattgttcggtaagtaatattgcttcctgcatcagaaggcaatttaaccgtgctttcgcccattggaggcaccaatgcattttcaagaacccgggttccggcattcaactctgttaccgtcaggtaatagggtgtcgggttaatcagcgtcagggaattcgcgctacgacgaaatcttaatttttctgcggcctgatcgggtggcaacgctaatttagccggacgatagtacagtttaatgcggctgataattgcgagctgtagcgtattctcagtcaattttgatttatccattgacggaatcgctttaacattcatccagaataaactttcccgatcctgtggcaattggttattagttgcatcaagaatacgcaaggtattctctctttttcccttcatcgcaaacagaggaggcgtcacgataaaacgaccatcctttacaccatcggcattttccacccatgattgaattaaataggtactattttcatcattatttgtcacggcaagttgcacttgtttttgccctgccggataaattacgcgagtcgcacctaaggccactcccgcttcagcgcgtccggcaaccatcattgccatgaacatcaggatacctgccagcaagcagaatgttatttcctgcgatttccttacattgacgtttttattactcactgtcctgttcctgttatcacattatctgctgaacaattactgataggttaaagagaaccaggcctgtgcattggcgatgccgccagtaacccgacgcccggtagcacgatatttggcgatgaaatgtagcgaagtagagcctgagtaaagccgtttccagtttgctggaggacgattaatcggtacgaggtttccttcatcatcaaacaacgctacgccaatatttgtggctatccctggcccctctccaacggaaagcacatctggatttttaccatccgcgacaccgtgaaacgccacacccacatgttcactcaccaccgtgctacattcccgtaaatgaataacaaaaggcaccggtgcgctatcttccccaaccgcatgaaaccggttactgctgatttgccccatattgaccgtcatttgtttatcaccggcttcaatccggcaagtttccgcaataatgacgccctgaaattgcatatttccgccgggcaacgtggtattccatttatttccggccagagcaaacattggcagcaacgacgctaggtaatgactccaacttattgatagtgttttatgttcagataatgcccgatgactttgtcatgcagctccaccgattttgagaacgacagcgacttccgtcccagccgtgccaggtgctgcctcaga

SEQ ID NO: 138 - DNA, 2037 bp, Escherichia coli
  source 1..2037: mol_type = genomic DNA
gagcaataaatattccggcactgtgcaatcattatcttggtgccatcgtccatgaaatgtgcgcgacgggtgtgagcaacatgtccacacgacgggcagtaaatcatgacagcagtcctctggccttaagcactgctccctgctggtctattttgtcctgccacaccttgcgctgtgccggtgtgcctgccacctcataatccatgtgcgggagtgttgccgctgacagtccggtcagccggagaaccggctcgccggtgaggctgatttgcatctgttttattttctgttccagcgatgatttcacctgctgcatgacagctttatcgggtgcgacgtagccctgatgcccggtggtgttggcgagcggattttcctgtaccagaatgctcagatgcattgcccggacaagcgcctcacaggtttcattcagggcgtgttccagctcatgctctgcatacagactcagcaggtgatgatgtgccttccggtaggcggtggccgtgctgtcacacgcccctttcaggcgttcacgttcgaaattcagcaccacggccagattgtcatattcctgtaccagctcccggcgtgccacgcgctcaatgtggcgctgtttcagctcgtcgctcaggacaccaccggctgcacgaaaggccgtgcgccagtcgtcagcgtcgtttccgtcggcctgcgccagcgcatttttttcctgctctgcccgttcaatggccgtgacggtctcatccatcaggcgggcgttctcaagatgggcggctctggccttttccagttgtgccagtgcgggttgcagatattcagggatggtgttgtcagacattttccggctcctcgtcacttcaggttgagaaaattgtgacgtacaccggacaacaacacgacgcattgcagatgtgccagccctgacacaggagactcatcctcagaccggcaagccaggaaaaggtcgcaggaaaaaccggcttactgtttgtttttttatattttactgttcacctctgttcaccataagaaaaaagataagtaatacagtaagttaaagggtgaacaatcgcagtgatgactgttcaccgtctgttcaccactgttcacccgttgatgggctttttatgctgtttattgctgtttatttttattaattaactgaaataaataagaaaaaacaatttgcatttcactataaaaaattccaggtccttcagaaccctttgagacccttccagtccggatggataaaaaacacacagccattgtaaggttgccggaacaaattccccctgttgcgtctgctgaaaatattcacaaaataaagcgctacccgaagccggacggacttatccggtgctgtatggacattaacgaggtagccagatgcaagctgttttttcttccccgtctcccgcccctgttacgccactgatgccgctgccggacatcacgcaggagcgttttttacgtctcccggaagtgatgcacctgtgcggcctgtcacgctcgaccatctatgaactcatccgtaagggggaatttccgccgcaggtgagtcttggcggtaaaaatgtggcctggctgcactctgaagtcaccgcatggatggccgggcgcattgccggacgcaaacgggggtacgacgcatgatgatgcccgctctgcaaaaactccctttttctggcttgcctttttccggcatttgcggatatagtttttccgctgccgcaaaatcggcagccgggcgtgagaacccgagcaattcacaggcgacatatgacgcgccacgcgtctttttttgtgtcgcaatcaatgccacagagcgccagattatggtgtggtgtgtggtcagtcgtgcagatggcattccgtgcatcctgcccgcgtccgctcattataccgcagagtcaatggtagctcaggcggggcagcctccgggctggccggtattcttcgaggccggtattctcacccccgtctgggctatcgccatcgagcgtgagaactccggcgatagcagttatttgctac

SEQ ID NO: 139 - DNA, 2028 bp, Escherichia coli
  source 1..2028: mol_type = genomic DNA
gagcaataaatattccggcactgtgcaatcattatcttggtgccatcgtccatgaaatgtgcgcgacgggtgtgagcaacatgtccacacgacgggcagtaaatcatgacagcagtcctctggccttcagctctgctccctgctggtctattttgtcctgccacaccttgcgctgcgccggtgtgcctgccacctcataatccatgtgcgggagtgttgccgctgacagtccggccagccggagaaccggctcaccgctgaggctgatttgcatctgttttattttctgttccagcgatgatttcacctgctgcatgacagccttttccggtgcgatgtagccctgatggccggtggtgttggcgagcggattttcctgtaccaggatgctcagatgcattgcccggacaagcgcctcacaggtttcattcagggcgtgttccagctcatgctctgcatacagactcagaaggtgatgatgtgccttccggtaggcggtggccgtgctgtcacacgcccctttcaggcgttcgcgttcaaaattcagcaccacggccagattgtcatattcctgtaccagctcccggcgtgccacgcgctcaatgtggcgctgtttcagctcatcgctcaggacaccaccggctgcacgaaaggccgtgcgccagtcgtcagcgtcgtttccgtcggcctgcgccagcgcatttttttcctgctctgcccgttcaatggccgtgacggtctcatccatcaggcgggcgttctcaagatgggcggctctggccttttccagttgtgccagcgcgggttgcagatattcagggatggtgttgtcagacattttccggttcctcgtcacttcaggttaagaaaattgtgacgtacaccggacaacaacacgacgcattgcagatgtgccagccctgacacaggagactcatcctcagaccggcaagccaggaaaaggtcgcaggaaaaaccggcttactgtttgtttttttatattttactgttcacctctgttcaccataagaaaaaagataagtaatacagtaagttaaagggtgaacaatcgcagtaatgactgttcaccgtctgttcaccattgttcacccgttgatgggctttttgtgctgtttattactttttatttttattaattcactgaaataaataagaaaaaacaatttgtatttcactataattttttccagccccttccagagcgttttaaagctatctggcgctgatgtgcaaaaaatacacaaccattgtaagacagcctgaacaaatcccccctgttgcgtctgctgaaaatattcacaaaataaagcgctacccgaagccggacggacttatccggtgctgtatggacattaacgaggtagcccgatgcaagctgttttttcttccccgtctcccgctcctgtaacgccactgattccgctgccggacatcacgcaggagcgttttttacgtctgccggaagtgatgcacctgtgcggcctgtcacgctcgaccatctatgaactcatccgtaagggggaatttccgccgcaggtgagtcttggcggtaaaaatgtggcctggctgcactctgaagtcactgcatggatggccgggcgcattgccggacgcaaacgggggtacgacgcatgatgatgcctgttctgcaaaaactccctttttctggcttgcctttttccggcatttgcggatatagtttttccgctgccgcaaaatcggcagccgggcgtgagaacccgtgtaactcgaaggcgacatatgacgcgccatgcgtctttttttgtgtcgcaatcaacgccacagagcgccagattatggtgtggcgtgtggtttgccgtgcaggtatgatcctgttcgcaatcacatgttatgccactgagtcaatggtagctcaggcggggcagcctccgggctggccggtattcttcgaggccggtattctcacccccgtctgggctatcgccatcgagcgtgagaactccggcgatagcagttatttgctac

SEQ ID NO: 140 - DNA, 2027 bp, Escherichia coli
  source 1..2027: mol_type = genomic DNA
gcgttgtgtttttggtcagcactccagctttacgtttctcttttaaccggtaactctctcctttgatattcagcgtggttgagtgatgtagcaaccgatccagtatcgctgttgccagcacgtgatctccgaacatttctccccagtctgcgaaccctttgtttgacgtcagtatgatgctcgctttttcatatcgacggttcagtagccggaagaacaggctggcttcctctctgttcatcggcagatagcctatttcatccaggatcaacacccgggcataactcagttgctgcagctgacgctccagccggttttcctgtttcgctttcatcagtgtcgcgatcagtctgtccagtggcataaacagtacccgatgtcccgcatccaccgctttcacgccaagagctatggccagatgagtttttccgacaccaggaggtcccagcaggatcacgttttcgctgcgctccacgaacgccagaccagccagttcccggacaaccttacggtcgatgcccggctggaaggtaaagtcgaactgctccagcgttttgacccacggcagacgagcctgcttcagcctggactccataccgcgctgatgcctgccgttccattcctgctgtagcgccatgcacaggaactcccggtagttcagctcttttttagctgcctgttccagcaggctttcaacgtgataactcagatgctccattttcaggcgactcagcaggacttccagctcatgcatcacaacagctcctcataggcactcagtggtcgatgttccacctgactgacctgctgccagagcggggcgtgatgctccggcactgtctgccagccagacgatgccgaacagaggcgatgtgaggccaccagtctctcattactgtagatccgcaactcgtcatccagcgatattcgtatcgataccggctgaccacacagcgcttcgggaacgctgtaacgattaccaccaacctcgatatagctgtcccaggacacatggcggatgtcgaagtaactggtatcgaagtccgtatccggtaacggctgcagatgttcctgctccagcgcgaagcgctgttccggcgtttctttgaactggcgaagttcccgtttgtcagccacatcgtctatccattgctccagttgttgattaacatgagtgaagctgtcgaacctgcggtaccgaacgaagaagttctccttgaggtatttcaccatccgctcaaccttaccttttgttctggccctgcgtggacggcatgcccgtggcaggaagttatagtggtcggccagcaacaggaatccggagttgaacacgactttcccgttgttattcttcagcaccgcagccttctggttatcaaccagcaccgttttcacacaaccaccgaagtagcggaaggcgcgaaccagtgattcgtaggtatgctcagcatcctgttttggtgcggcgaagacatggaagcggcgggagaaccccagcgtattaaccgcaaagttaactttgcaccgttgcccggcaacctccacctcaacttcgccccagtcgtgctggagctggtatccaggctgagtttcgaagcgaactgttctttttgacggacgcattttacgtttgggctggatgtagtaacgcagcatggaacgtccgcccgtataacccattgccttaatctccgcgaagataacctcactattccagacattctctgccaagcgcatgtcgatgtaatccataaacggtttcagcttaaccattttgtggcgggtctttctggctggcggttcagggtatttgaggtagcgtctgaccgtccgttcagagcaaccaatctgagtcgcaatatcgacaatgtacgcgccctgctggcgcatttgctttatcatgtaaaagtcctctctgctcagcatgttgatgtcctttctggtgtgagaaccttaaggaaacaacatgttgggtggagcggacaatccaaatggtgaattaccgtcttatatcactggcgctgaca

SEQ ID NO: 141 - DNA, 2006 bp, Escherichia coli
  source 1..2006: mol_type = genomic DNA
tcatacaccgccgccagctcaccgcgtggcgtccagtcgtagcacaccagtggcgcggcaggtaaattttccgggtattccgggtcgtgcatcagccacaccgccgaaagacggataccgctgtcagcgccgtattccgtaccgggcagtgtgtcggggaaggaaggagctgagagagggcggggactgtcaggggaagataacgaagcggtgtgcggtttacgggcctcttccgcccgctgtgcctgtgtggtcagtaccagacggaactcccgcccggcaccgtccgtcacgccggtgatttccccggccaggtcaccggcggcctcacaccggtacgccagcgtccgtccgaagcggtccgccatcccggtaagcacccggtacggcggcagcggcgctggcagtacgtcctcagcacccggcaccccctcagaccaccccagtatccaccacggcccctgtgcgctgttggtcgccaggtaaagatgcgggcttaaccggatatccggcggcagcgacgcccacagccgtgccagcgtgtggccgtccggctgcactgccttaccgccacgcaccagccacattgactcactgcggctgtacaccgcctcccccggcagcagcggctcaaagtgaatgctccgcccgccgttgtcgttgagtaccagtgcatcatcgcgtatctgtaagcggatatcagaaggcgctttccagccggggccgaaaacgcccaccggtgcaggcgtcttcgtccggtagctgctgtaggtgcgggagagaatgaacggcagcgggccgggcagcgcaaggtccgtctcgccgggcagcaccttcgcccccagcagcggatttaccgggttgcccgaagtcatcccgcccggacacaccgagcacgccacgccggtgggcgcgccaattcttacacctgccgaaccctggacaatgggaccgccatactgagtcatatctccctgacgcgccgctggttttccgctcatgattcaaattccttcttctgtttatttttaatgctggtttgttactgaattccgaacaggtacgggatcagtactctctcatatccggcgtatcctgcttttcatcaggggtcttcggtggggatttcgaggctgcacagttccagttaatcaacagtgagtcaccattaacctgctccttaccctgcaaatgaatttttgtgccgttgagaaaaatttgtccgtccttcgtcagcaccagccttgccttaccacagcagagctccagatgctcaccggcggagtaaatcgcggtctgcccggtatcatcctttttcgttttaccaacggtgaaggtaacgttatttccgactttgacgtcataacccagcccgaccctcaacgatttatgtaaaccgatctgcgaggactgcatcagagccaccgaagtgttcataatgccacctaccgtcgtctggtacgccacgcccacggtcagcgcacgaacaagtccaatcgtttccacctgaacagaacccacgttaatgatctggttactgcccaccgtctctatctggttaacgcccaccgtctgtatctgattgttggtaaccgcaatcatctgattgttgccaatggtctcagcatggttgtttatcacatccgtggtgcggttattcagcacctcggtgttcatgttcttctgcgcgtggatgtagacctgttctttccctgtcgcatcgtcaaacttcagttcattaaacccgctgcccttataggttttcgagcggatcgtcatctgcgtcttcgtccccggcaggctgccgggtgtgcggttttcatggtggtaggtacgccccataataatcggctggtccgggtcgccgttgaggaagtccacaatcacctcctgacccacacgcggtatcgccaggtggccaaaaccggtgcctgcccacgcctgtgccacacggatccagcacgaactgtcttggtctgccgggttataacggtcccagttgaact

SEQ ID NO: 142 - DNA, 1971 bp, Escherichia coli
  source 1..1971: mol_type = genomic DNA
aaggcagtccgctgcataaatctacgcaacaggttagaacccaaggcccgatacggcatgcggactgcaggcagagaaaactggccgattttctctgcactggagggataatacaaggcctgataagacgcgccagcgtcgcatcaggcaacggcaccgcacttattgtcggatgcggcgcgaccgccttattcgacctacacaccacacatttccctgccaaatttgcgccccatatctcactatccattaacggatttgtgacagaaaccattgtctttttttatatttgcttaaatctttttttgcgttacttatggctgaccctggcattttccgctgtgcgttttagcgttcatggtattaatcgctcagatatccaccttttcctcagatttttttcattaaatgcataaaacttaatcaccaaatgttgctaaatattaagctgattgttctggtcatgttggagtagcacaaatttctctgctgcaaatagctgtttgaagtttttttaatctttgtttgtggattctcaccgttggtgtaaatcccggttggctgtattgacgttttcacattctgttgacagattgtaggtcacgaggggcattttatggaggatccgcactgttacactgatgttaattagtacggcatccccacctcataacgttgacccgaccgggcaaaaaacaaaaaaggtcaggcagcgacaacccactgcaaagggttaaaacaacaaacatcacaattggagcagaataatgcgtatttccttgaaaaagtcagggatgctgaagcttggtctcagcctggtggctatgaccgtcgcagcaagtgttcaggctaaaactctggtttattgctcagaaggatctccggaagggtttaacccgcagctgtttacctccggcaccacctatgacgcctcttccgtaccgctttataaccgcctggttgaatttaaaatcggcaccactgaagtgatcccgggcctcgctgaaaagtgggaagtcagcgaagacggtaaaacctataccttccatctgcgtaaaggtgtgaagtggcatgacaataaagaattcaaaccgacgcgcgaactgaacgccgatgacgtggtgttctcgttcgatcgtcagaaaaacgcgcaaaacccgtaccataaagtttctggcggtagctacgaatacttcgaaggcatgggcttgccggagctgatcagcgaagtgaaaaaggtggacgacaacacagttcagttcgtgctgactcgcccggaagcgccgttcctcgctgatctggcaatggacttcgcctctattctgtcaaaagaatatgctgatgcgatgatgaaagccggtacaccggaaaaactggacctcaacccaatcggaaccggtccattccagttacagcagtaccaaaaagattcccgtatccgctacaaagcgtttgatggctactggggcaccaaaccgcagatcgatacgctggtcttctctattacccctgatgcttccgtgcgttacgcgaaattgcagaagaatgaatgccaggtgatgccgtacccgaacccggcagatatcgctcgcatgaagcaggataaatccatcaacctgatggaaatgccggggctgaacgtcggctacctctcgtataacgtgcagaaaaaaccgctggatgacgtgaaagttcgccaggcactgacctacgcggtgaacaaagacgcgatcatcaaagcggtttatcagggcgcgggtgtatcagcgaaaaacctgatcccgccaaccatgtggggctataacgacgacgttcaggattacacctacgatcctgaaaaagcgggtgatgctgccaacttactgatttagtgtatgatggtgtttttgaggtgctccagtggcttctgtttctatcagctgtccctcctgttcagctactgacggggtggtgcgtaacggcaaaagcacc

SEQ ID NO: 143 - DNA, 1722 bp, Escherichia coli
  source 1..1722: mol_type = genomic DNA
gaaatggagccaacttcgacaacacgattttgcgccgttcatacgaacggcaggggatcccctgcccgtggcgttactacaacgatcgcgatgtacgcacaatcgttgagctggggaaagccatagacttcgatgccagaacggctattccattcgaaggtgagcgccataatgcacttgatgacgctcgttaccaggcaaaatacgtttcagctatctggcaaaaactgatcccgagtcaggctgatttttaatgttcaactgtcgccagttgtcgttggtattctgcaactggcgcgttccggagtgatagccatgagcgaacagtacctgataacgctcgatgagtggaagccaaaacggttcagtctcccaataacaaacactaccctggtgaaatacggaaaactaggatacatcgttccaagaccacaaaaaattcgtgggcgttggctgatagatcgccgggcagtatttgttggacctggtgaaacgggaattgcgccggaaattcatactggcgatgatgatgcactgaaggagattttaactcatgtcaccgaggccacgaaaaaacagcactgacgtaaccggtctttacgaaaagtttgatcgcagaactggcagggtttactaccagtataaaaaccctgtgactggaaaatttcacggtctcggaacagacaaaggcaaagcagaaaaaatcgcttccacagccaatcagcgaatagctgcagcagaagctgaatatttcatgcgcaaaattgatgaaagtccgtcagcaacaaaacgtcggggtatcagattaaaggcatgggttgatcgatatctgaaaatacaggacgcgcgactgaaaaatggagatattgcagctacaactcacaaagaaaaagcccgaatggctgcatacctggtttcccgtctgggaaaccacccattgaaagaactggaagtaagagactttgcattaatactggatgagtggctggataaagacatggtcagcacagcgagagtaaatcgtggattatgggttgatatttataaagaagcacagcatgcaggggaagttcctcctggatggaatcctccggaggctacccgtaaaccgatccctaaagtaaccagagccagactcaccctggaggactggcaaaaaatttacaattcaacaccagaaaaacactttatccgtaacgcaatgcttcttgcgattgttactggtcagcgccgtgatgacatttgccacatgcgtttttcagatgtgtggaacgaacacttgcatatcacccagggaaaaaccggaatgcgtctggcgttaccgcttacgctacgctgtgatgccattggaatatcgctaaaagaagtgattgatggatgcaaggacagaatattgagtccatacctgattcatagtcggcaccagaaacaaccaaaaccaatgagtaaagataacctgagcgactactttgctaaagcgcgggatctggcaggaataactccaccagcaggaaaaacaccaccaacatttcatgaacaacgctccctgtcagaacgactgtactgttcttgcccccttatttccagacaggggttgtatcttaagttaacattacccgctgacgtcgatattctcgcggagagcgataacccaacgcactatgcggatggttttcattgtaatgctcgatcgccactgcaaggttatgcaatgccgttctt

SEQ ID NO: 144 - DNA, 1708 bp, Escherichia coli
  source 1..1708: mol_type = genomic DNA
tgaaacgccgtatgcgccgggagaacacattaagggagggcagcaataatgcttcgcattaagcctctttttattctttgtgccgccttactgacggtgacgcctgcagcgtcagcggatgtgaacagcgacatgaatcagttctttaacaagctgggcttcgcctccaataccacacagccgggcgtctggcaggggcaggctgccggctatgcttacggcggctccctgtatgcccgtactcaggtcaaaaatgttcagctgatttccatgacgctgccggatatcaatgccggatgtggcggcatcgatgcctacctcggttcgttcagttttattaatggcgagcagctgcagcgttttgttaagcagattatgagcaatgctgccggttacttttttgaccttgccctgcagacaacggtgccggaaatcaaaaccgcaaaagacttcctgcagaaaatggcaagcgacattaacagtatgaacctcagttcctgccaggcggcgcaggggattattggcgggcttttcccccggacgcaggtgtcccagcaaaaagtctgtcaggacattgccggtgagagcaatatttttgctgactgggcggcttcccggcagggatgtaccgttggcgggaaatctgacagtgtcagggataaagccagcgacaaggataaggagcgggtgaccaaaaacatcaacatcatgtggaatgcgctttccaaaaacagaatgtttgacggcaacaaagagctgaaagagtttgtgatgacgctgaccggctcactggtgtttggtcccaacggcgaaatcacaccgctgtcggccagaaccactgaccgctcaattatccgggctatgatggaaggcggcacagcaaaaatttatcactgcaacgattctgataaatgcctgaaagtggtggcagacacaccggtgaccatcagccgggataatgcactgaagtctcagattactaaacttctggccagcattcagaacaaggcggtcagtgacacgcctctggatgacaaggaaaaaggctttatttccagtaccaccatcctcgtcttcaaatacctggttgacccgcagatgctcggtgtttccaacagtatgatttaccagctgacggactatatcggttacgacatcctgctgcagtacattcaggagctgatacagcaggcccgggcgatggtggccacgggaaattatgacgaagcggttatcgggcatattaacgacaacatgaatgatgccacccggcagattgcggcgtttcagtcacaggtgcaggtacagcaggatgcgctgctggttgtcgatcgtcagatgagctacatgcgtcagcagctttccgcccgcatgctcagtcgttaccagaacaactatcacttcggagggagcacgctgtgaatgaagtttatgtgattgccggtggtgagtggttgcggaataacctgaacgccattgccgcctttatgggaaccaggacgtgggattccattgaaaaaattgcgctcacattgtctgttctcgcggtggccgtaatgtgggtacagcggcacaacgtgatggatttgctgggctgggtggccgtgtttgtgcttatcagcctgctggttaatgtccgcacatcggtgcagattattgataacagtgacctggtcaaagttcaccgggtggataatgtgccggtcgg

SEQ ID NO: 145 - DNA, 1564 bp, Escherichia coli
  source 1..1564: mol_type = genomic DNA
tttttaaagtgaattttgtgatgcggtgaatgcggctaagcgcacgcggaacagttaaaaccaaaaacagtgttatgggtggattctctgtatccggcgttaattgttaactggttaacgtcacctggaggcaccaggcactgcatcacaaaattcattgttgaggacgcgataatgaaaacgttattaccaaacgttaatacgtctgaaggttgttttgaaattggtgtcactatcagtaaccctgtatttactgaagatgccattaacaagagaaaacaagaacgggagctattaaataaaatatgcattgtttcaatgctggctcgtttacgtctgatgccaaaaggatgtgcacaatgaattcagcatttgcgcttgttctgacagtttttcttgtttccggagagccagttgatattgcagtcagtgttcacaggacaatgcaggagtgtatgactgcagcaaccgaacagaaaattcccggtaactgttacccggtcgataaagttattcaccaggataatatcgaaatcccggcaggtctttaaaacagttccgtaataaatatccggtttcattcttatatgccagcaatggcagggatttgttcatccttaaatctgtcatgaggttaaaacaaaatgagtaaagtctttatttgcgccgctattcctgacgaactggcaacaagggaagaaggcgctgtggctgtagccacagccattgaagctggcgacgaacgccgtgctcgagcaaaatttcactggcaattcctggaacattatccggctgctcaggactgcgcttataaatttattgtctgcgaggataaacctggcataccccgccctgccctcgattcatgggatgctgaatatatgcaggaaaaccgctgggatgaggagtctgcttcttttgtcccggttgagactgaatccgatccgatgaacgtcacttttgacaagctggcccctgaagtacagaacgctgtcatggttaagttcgacacatgtgaaaacatcaccgttgatatggttattagcgcacaggaattgttgcaggaagacatggcaacattcgacggacatatcgttgaagcgttgatgaaaatgccagaagttaacgccatgtatccggagcttaagttgcacgccattgggtgggttaagcataaatgtattcctggtgctaaatggcccgaaattcaggcagagatgcgcatctggaaaaaacgtcgcgaaggtgaacgcaaggaaaccggaaaatacacgtctgttgttgatctcgcccgcgccagagccaatcaacagtacactgaaaattcaacaggaaaaatcagcccggtcattgctgccattcatcgcgaatacaagcagacatggaaaacactggatgacgaactggcctacgctctctggcctggtgatgtggatgccggaaacattgacggcagcatccatcgctgggcaaaaaaagaagttatcgacaacgaccgcgaagactggaagcgtatctcggcatcaatgcgcaaacagcctgatgcccttcgctacgaccgcca

SEQ ID NO: 146 - DNA, 1516 bp, Escherichia coli
  source 1..1516: mol_type = genomic DNA
agtgcttttgccgttacgcaccacgccttcagtagcggagcaggaaggacatctgatggaaatggaagccacgcaagcaccttaaaatcaccatcatacactaaatcagtaagttggcagcattacccgagctgcgtataaagttaccgctgggtgcacttagccccgaaatgtgccgccaacaatgtgggctgcaaaataagttgtgtgaatatggctgaatcagaagaagaataagcgcgaatatgcctgatggtgcaacgccatcaggcataataacttacgatttaagtacagtcagtgctgcttcgtaattcggctcggtagtgatttcatctaccagctggctaaaaattacattgtcattttcatcaataaccacaacggcacgcgctgccagacctttcagtgggccatcagcaattgcaacaccgtaggcttgcaggaattcagcgttacggaaagtggagagagtgataacattgttcagaccttctgcgccgcagaaacgagactgggcaaacggcagatcggcagagatgcacagaacaactgtgttgtcgatttttgttgccagttggttaaacttacgtactgatgtggcgcaaacacctgtatcaatactcggaaaaatgttcagtactttgcgtttacccgcaaactgacctagggtgacgtcagacagatcttttgccacaagagtaaaagtctgcgctttgctactagcctgcggcatagaattagctactgtaaccggaacaccctgaaaatgaacaatttgtgacatcattacctttcctgtttacatgtggttaacgtcacgcttagtttatgctaactgtcaataatactacaaacgctatttgcgcttaatccgcagaccaccgtggtaacaaggagtcaagataataaccgtgaaggtatgtgaggaagcctggcccttacatgtcacgttggattaaagcaaagggcgggtcatattactcccgaagatacaaataaagcgtattaagatacggtaatcaggcagccttagttcacactccatatcaccccgcgtcggattgaataattgcggatctttgttctgccaatatcatgagcggttttggcgaaggattttccggcatcattttaccgtgtagaactcgccccttcaggaactggcattgactgtgcaataagagaaggtggagaaaggcggaacaagagcagtcagtcatcgattcttttacccatcaggtgtgatcgccataggcaataacacctgctctagaagaggtggaagatatcgtgaatttgatgagtaccttgtagcctttatttgcaggatataaaggtaaaaactcggttaataatgggtcaggacctttaatagttgtaaacttgggtaatgctgccaacttactgatttagtgtatgatggtgattttaaggtgcttgcgtggcttccatttccatcagatgtccttcctgctccgctactgaaggcgtggtgcgtaacggcaaaagcact

SEQ ID NO: 147 - DNA, 1427 bp, Escherichia coli
  source 1..1427: mol_type = genomic DNA
taatgccgatcagttaaggatcagttgaccgatccagtggctgtgtaagaatccggaaacgctcactcgtttccggatttttttatgcacattggacaggcccttgatttggtatcccgttacgattctctgcgtaacccactgacttctctgggggattacctcgaccccgaactcatctctcgttgccttgccgaatcaggtactgtaacgctacgcaagcgccgtcttcccctcgaaatgatggtctggtgtattgttggcatggcgcttgagcgtaaagaacctcttcaccagattgtgaatcgcctggacatcatgctgccgggcaatcgccccttcgttgcccccagtgccgttattcaggcccgccagcgcctgggaagtgaggctgtccgccgcgtgttcacgaaaacagcgcagctctggcataacgccacgccgcatccgcaatggtgcggcctgaccctgctggccatcgatggtgtgttctggcgcacaccggatacaccagagaacgatgcagccttcccccgccagacacatgccgggaacccggcgctctacccgcaggtcaaaatggtctgccagatggaactgaccagccatctgctgacggctgcagccttcggcacgatgaagaacagcgaaaatgagcttgctgagcaacttatagaacaaaccggcgataacactctgacgttaatggacaaaggttattactcactgggactgttaaatgcctggagcctggcgggagaacaccgccactggatgatccctctcagaaagggagcgcaatatgaagagatcagaaaactgggtaaaggcgatcatctggtgaagctgaaaaccagcccgcaggcacgaaaaaagtggccgggactgggaaatgaggtgacagcccgcctgctgaccgtgacgcgcaaaggaaaagtctgccatctgctgacgtcgatgacggacgccatgcgcttccccggaggagaaatggcggatctgtacagtcatcgctgggaaatcgaactgggatacagggagataaaacagacgatgcaactgagcaggctgacgctgagaagtaaaaagccggagcttgtggagcaagagctgtggggtgtcttactggcttataatctggtgagatatcagatgattaaaatggcggaacatctgaaaggttactggccgaatcaactgagtttctcagaatcatgcggaatggtgatgagaatgctgatgacattgcagggcgcttcaccgggacgtataccggagctgatgcacgatcttgcaagtatgggacaacttgtgaaattaccgacaagaagggaaagggccttcccgagagtggtaaaggagaggccctggaaataccccacagccccgaaaaagagccagtcagttgcttaactgactggcattac

SEQ ID NO: 148 - DNA, 1383 bp, Escherichia coli
  source 1..1383: mol_type = genomic DNA
cctgtgcctggctgaccgtgtgcgaacgtcagcaccgctacccgcatctcacccttgaatcactggaggcggccatcgccgctgagctggaaggcttttatctgcgccagcacggtgaggaaaaagggcgtcagatagcctgtgccctgctggaagatttaatggaatccggccccctgaaggccgcgccgtcgctgtcctttctcgggctggttgtgatggatgaactctgtgcccgtcacataaaagcgccggtactgcactgaaggagaacaacaccatgaaaatgaacgtaaccgccaccgtcagccatgcgctcggccactggccgcgtattctcccggcgctggggattcaggtgctgaagaaccgtcatcagccctgtccggtctgtggcgggagtgaccgtttccgttttgatgacagggaggggcgcggcacctggtactgcaatcagtgtggtgccggtgacggcctgaaactggttgaaaaggtgtttggtgtttccccgtccgatgcggccgcaaaggtggctgccgtgaccggcagcctgcccccggctgacccggcagtgacggctgccgccggtgctgaaacagacgctgcccggaagaacgccgccgcactggcacaaaccctgatggcgaaaacccgtcccggaaccggtaacgcctacctgacccgcaagggctttcccggccgggaatgccggatgctgaccggcacacacagagccggtggcgtgagctggcgcgccggtgaccttgtggtgccactgtatgacgacagcggcgaactggttaaccttcagttaatcagtgctgacggccgtaagcgcaccctgaaaggcggacaggtcaggggcacctgtcacacccttgaaggacagaatcaggccggaaaacgtctgtggatagcggagggatacgcgaccgcacttaccgtgcatcacctgaccggtgaaacggtaatggtggcgctttcttccgtgaacctcctttctctggccagccttgcccggcagaagcatccggcctgtcagattgtccttgccgcagaccgtgacctcagcggtgacggccagaaaaaagccgccgcagccgcagatgcgtgtgagggcgttgttgccctgccgccggtcttcggtgactggaatgatgccttcacgcagtacggcggggaggccacccgtaaggccatttacgatgccatccggccaccggctgaaagcccgttcgacaccatgagcgaagcggagttttccgccatgagtaccagcgaaaaggccatgcgtatctatgagcattacggcgaggcgctcgcggttgatgccaacggccagcttctgtcccgttatgaaaatggtgtctggaaggtgctgcc

SEQ ID NO: 149 - DNA, 1305 bp, Escherichia coli
  source 1..1305: mol_type = genomic DNA
tgtatcttaagttaacattacccgctgacgtcgatattctcgcggagagcgataacccaacgcactatgcggatggttttcattgtaatgctcgatcgccactgcaaggttatgcaatgccgttcttacattcggtttcggcatgaacgcgatgtagtcttcctttatcgttttcacgaaccgttctgccattccattactctgaggactactgattgccgttgtgcagggctccagattcaactctctggcgaactgccgtgtttcatgcgctctgtacgctgaaccgttatctgtcagccactggatcgactgttccggtactttatcgccaaagcgtttttctatcgctcctaacatcacatcctgcactgtcgctttatcgtaacctcccgtgcttgcggcccagtctatggcttcacgatcgcaacagtccaggacgaacgtaacacgcagtttttcgccatcatcgcaaccgaactcaaaaccatcggaacaccaacgctggtcgctttccttcaccgatattcggcctttatgttcccgctgctgtcgtgatggtttgtcatgtaacaacaacaggttattttcgctcattatccggtaaacacgctttgcattcacgaacggtagtccttcatttcgggactgccgcctgagtatcgcccagacacggcgatacccgtatgctggcatatcgccaatgatatccaggatgcgtgataagacttctgcatccgcagcctcatcgcgcctcggacgccgtttatctgacttgttatcagatgccttcatccgtaatgttaactgcgcacgtgacacgcccagaacacggcttaccggggctattccttgtccgaagctaacaagggcacatgcgctatccattttcgcgattgcgcatactccaccgcttctttgaggagctcaacttccatggttttcttgcccagtaaacgctgaagctgattaatctgctttattgcagcggccagttcagaagcaggaacaacgtcttcaccggcagccacagcagtgaggcttccttcctggtattgtttcttccacttaaacaacagactgggctgaattccatgcaaacgcgccacgtgggacaccgtcatgcccggctccatagtctgttgaataattgcgattttttcctgaggtgttttacgtttacgcacctcttttcctaacaaaacgccagccatctcaaaattagaactagtgttagacatatatccaagcctatctcttattttaagatacatctactgtctggtatttcagggggccagctca

SEQ ID NO: 150 - DNA, 1293 bp, Escherichia coli
  source 1..1293: mol_type = genomic DNA
cttatcaggccttgtattatccctccagtgcagagaaaatcggccagttttctctgcctgcagtccgcatgccgtatcgggccttgggttctaacctgttgcgtagatttatgcagcggactgcctttctcccaaagtgataaaccggacagtatcatggaccggttttcccggtaatccgtatttgcaaggttggtttcactatggaacatgaacttcattatatcggtatcgacaccgctaaagagaaactggatgtcgatgtgttgcgtcctgatggtcgtcatcgcaccaaaaaattcgctaacaccactaaagggcacgatgagctggtgagctggctgaaaggtcacaagattgaccatgcgcatatctgcatcgaagcgaccggcacctatatggaacctgtcgctgagtgcctttacgatgctggctacatagtgtcagtcattaatcctgcgctgggtaaagctttcgctcagagtgaaggactgcgtaacaagactgataccgtggatgcgcgcatgctggcagagttctgtcgtcagaagcgccctgcagcctgggaagcgcctcacccgcttgaacgcgcgttgcgtgccctggtagtccgccaccaggcgctgacagatatgcacacgcaggaactgaatcgcactgaaacggcgcgggaagtccagagaccgagcattgatgctcaccttctgtggcttgaagcagagctgaagcgtcttgagaagcagataaaagacctgacagacgatgatccggatatgaaacaccgcaggaaactgctggaaagcatcccgggtatcggagagaaaacatctgcggtattgctggcttatatcggtctgaaggaccgcttcgcccatgccagacagttcgccgcttttgcgggtctgacaccacggcgttatgaatcaggtagcagtgtgagaggggcgagccggatgagtaaggccggacatgtgtcgcttcgcagggcgttgtatatgcccgcaatggtagccaccagtaagactgagtggggacgggcgttccgcgaccgtctggcggctaatggcaagaaaggaaaggtgattctcggcgcgatgatgcgcaagctggcacaggtggcgtatggagtgctgaagtcaggcgtgccgttcgatgcgtcacggcataatccggtagcggcgtaaaaatcgcggaagggatgaaaaaaacagcgcctgacggcgctgtgtctggcatgcctgcaatccgggaaaccggaccaggaaaaaacttgcaggccataacagtatctac

SEQ ID NO: 151 - DNA, 1269 bp, Escherichia coli
  source 1..1269: mol_type = genomic DNA
aagaacggcattgcataaccttgcagtggcgatcgagcattacaatgaaaaccatccgcatagtgcgttgggttatcgctctccgcgagaatatcgacgtcagcgggtaatgttaacttaagatacaacccctgtctggaaataagggggcaagaacacttgcattttttcatatatatgaggctcttgttcctaaaacgctttcaagtcctgggtatgataaaattcaacacttcacttattgtgtaaaaaaaatgtataatgcgacgactgctataaccgatgcagctcaatatgccggtgaagcatatgatttactcacaggcggaagctgggatgatactgtatctgatatggaggctaataacttagggcaggcttatggcaaagaactgtatgaacgatatcatccggtaagagcggctttaaggagtcttgattaggataaaatatgaaagtatttttctctatattaatcatgctatgtgtcagtattattttattttatctgttaaattatgggtattatcgcggagaaatacgtaattacaatgctgtcagtagtggtgacttgacatattaccttaattcattattgcgttttgatgctttgatcgtatgttttaatgcgcttttgttattttctggataccgtgtttactcaagggtaaaatcaattagctctgtggttaaattgcgtatcttaatcattttttatggttttaatattattgatagctttgcgtttgcaataaataattatatagaaaatcactatgaagattttgaattaaatgttttccatgtattgctggagaagtatggcgtgattgctaacctggtttatattgctccgttaatcctgtcagttgttatattttttgtatttctcctttttattaataaaagaatgaatcaattctcttagatgcttcaggtttatcccctgaacgggctaaatgtgatatttctccgctcaacgataacggcagtacggatgacggttatgtctgtttcgtcatgaaactgaaacgggtaatggcgagggtggcagcacaaccctgagagatcccctcataatttccccaaagcgtaaccatgtgtgaataaattttgagctagtagggttgcagccacgagtaagtcttcccttgttattgtgtagccagaatgccgcaaaacttccatgcctaagcgaactgttgagagtacgtttcgatttctgactgtgttagcctggaagtgcttgtcccaaccttgtttctgagc

SEQ ID NO: 152 - DNA, 1266 bp, Escherichia coli
  source 1..1266: mol_type = genomic DNA
gagtcaatggtagctcaggcggggcagcctccgggctggccggtattcttcgaggccggtattctcacccccgtctgggctatcgccatcgagcgtgagaactccggcgatagcagttatttgctactcgaaggaggctgccttatggctacaacccttaccccctcacaccctgaatttgtctttgtgtttgccgctgtccgtcgcgcagaccgtcatccccgtatctgcatgcttcgcaccgtcgccggtgatgaacgcagtgcccgccgttcccttgtccgtgactatgtgctctcccttgctgcccgtctgccggtgatgggggtgtcccgtgcgtaataaaaaagcccctcagaccgtctcagcgcgtcatgacgcccgtgaacacctcagcattgaggcttaccataagctcaaccgcgccagcgccgtatcccagtttgttgggggtgatttgattcaccgtgaactctccggcctgcatcagctctacattccgcatattttcagctacctgaatgaggatattgattttgtgctgaatgagctgaaagccaaaggcctgtgccgtgattttctcgcccagcagaaagaccggggagacaagacgcatgtttgattttccccagcccggtgagatttaccgttctgccggttttcccgatgtggccgtggtcggcattctggaagacggtattccgtgggaaatgccgtaccgctgcccggacattgtctggaacccgtaccgccgtaaattcagtatccttgtgcgtatcctcgctgacggacgcaccacagacatcccgctggggcgttttctgcgggaatttacctgtgaccgtcctgacctgtttaaacgcagccccgtaaaccggcatgcggtactgaaagaaatggccggagacccggaattacagaaatggcgggagaaatatctggatatttacccgcaggcccctgttccggtcagccgggcggcaccggtggcgcgggaatggcgggaaattccccgcacggagtctgacccggaaatcaccccggataacagttaccgcaattatctgtaattaaaaaacgacacccgaaaaattaaatgtgcgtattcgcgcagggatacgcacgtcttcaggagacgcagatatgccttatcagttaatgcaaccggcacggaatgcagtcatctgtcacagggaggaaagcaaatgaaaacacccttaccgcccgtcttacgcgcagccctttaccgtcgtgctgtcgcctgtg

SEQ ID NO: 153 - DNA, 1247 bp, Escherichia coli
  source 1..1247: mol_type = genomic DNA
gcttttgcggtggtttcctttcatctgaaccagtcactctcttcgctcttttccctcgatctctccctggtcagccagcagtttctctcccttgaatttgcgcaggtgctggacaaaatggcctacctgacgatatggcagggcgatgacgtacagcgccgggtgaaaggcgtggtgacctggtttgaactcggggagaacgacaaaaaccagatgctgtacagcatgaaggtgcacccgccgctgtggcgtgccggtctgcgccagaacttccgtatcttccagaacgaggacatcaaaagcatcctcggcacgatgttgcaggaaaacggggtgaccgaatggagtccgctgttcagcgagccgcatccttcccgtgagttttgtgtccagtacggtgagactgattacgatttcctgtgccggatggcggcggaggaaggcatcttcttttatgaggagcatgcttacaaaagtaccgaccagagcctggtgctgtgcgacacagtccgccatctgcccgaatcttttgaaatcccctggaatccgaacacccgtaccgaggtgagcaccctctgcatcagccagttccgctacagcgcacaaatccgcccttcttccgtggtgaccaaagactacacctttaaacgccccggctgggccggacgttttgaacaggaaggccagcaccaggactaccagcgcacgcagtatgaagtgtatgactaccccggacgtttcaagagcgcccacgggcagaactttgcccgctggcagatggacggctggcgaaacaacgcagaaaccgcgcggggaatgagccgctcgccggagatatggccgggacggcgaattgtgctgacggggcatccgcaggcgaacctgaaccgggaatggcaggtggtggcaagtgaactgcacggcgaacagccacaggcggtgccaggacggcagggagcggggacggcgctggagaaccattttgcggtgatcccggcagacagaacatggcgaccacagccgttgctgaaaccgctggtcgacggcccgcagagcgctgtcgtgacaggaccggcaggcgaggaaatcttctgcgacgaacatggtcgcgtgcgggtgaagttcaactgggaccgttataacccggcagaccaagacagttcgtgctggatccgtgtggcacaggcgtgggcaggcaccggttttggccacctggcgataccgcgtgtgggtcaggaggtgattgt

SEQ ID NO: 154 - DNA, 1223 bp, Escherichia coli
  source 1..1223: mol_type = genomic DNA
gcaatgtttcttaccgtattctctgtattccctgtggcactcacactgatgacatgctcatgcccgtcaaccgtgaacatatggctgtgcggtccgataaccacatcatgtatatgtggccccagttcaactgcatgtgcatgaccttcgtccgcaagggctgtccctgacacaccatgaacgtgctctccgtctgtgccggtgaactgaaaacctgtgcaggtgccgcccccagacatgattttcccgccactccccgcctggccgacaatatccatctcatgacgatgctcaccacccggttctgccgtcgctgacaggtcatgctcgtgacgtccgccttcgcttgtcgtcttcgtaccataatcaaaacggctggtctgcttcctgccataatcaaacactgaactttcacgggtgaccggaagggttgcactggcacttgcctcatgcgtgtgtgacatgattccatccatctcctgtgacagaacggcccttccactggccggtttacctttaatcaccccccccctcatatccggcagtaccccggaaggatacgcttccgccagcagcgggtaggctgccctgtcaaaagactggccctgcatgatggcatagccatcaggaacactatccgaaggccacgctatcgcagcccctaccggaaatgtgttcaggggctcaaatccacgctcaaatccatgggtgtcacgggaggaacggtaatacagccctttgtttcggtaatccgcccgcaactgaaatgagcggcaactgcctatccccgtgtaaaaatgggcaacaatataagagctgccagagcctgataccgtatacagccctgttttctcattccacggaacaccgcctgcgtcagccccgtatttgcctgaccagccaagggaataggcattcacatctgctgcagataaccggatatccgatgtcagtggtttatcgttaattctgcggccctcaggcacccgcctgctggcattgtcgttcaccgctttcaccgcctttggggtggctgccagcgattcactgtcactgttcgtggcactgctgagcatcactatccctttttgggtcagccctgcatcacacaaccccaccgcggaggcagtttcctctgcccgggcagcggcgctttctgaacgctctgccgcggtctctgaacgcgctgctgcggactctgccgcagttttactctgtgctgc

SEQ ID NO: 155 - DNA, 1212 bp, Escherichia coli
  source 1..1212: mol_type = genomic DNA
aaaatatcgagttcgcacatcttgttgtctgattattgatttttcgcgaaaccatttgatcatatgacaagatgtgtatccaccttaacttaatgatttttaccaaaatcattaggggattcatcagcgcatagccttcgccatggcaggcgtcatacccgcaaaggcgaaagaggtacgattaacatagtgaacggaacaccaattcacgaacgttcccgaaatatcgataacagacgctctctggggcattgggagggcgatttagtctcaggtacaaaaaactctcatatagccacacttgtagaccgaaaatcacgttatacgatcatccttagactcaggggcaaagattctgtctcagtaaatcaggctcttaccgacaaattcctgagtttaccgtcagaactcagaaaatcactgacatgggacagaggaatggaactggccagacatctagaatttactgtcagtaccggcgttaaagtttacttctgcgatcctcagagtccttggcagcggggaacaaatgagaatacaaatgggctaattcggcagtactttcctaaaaagacatgtcttgcccaatatactcaacatgaactagatctggttgctgctcagctaaacaacagaccgagaaagacactgaagttcaaaacaccgaaagagataattgaaaggggtgttgcattgacagattgaatctacagcggctttttttaatatgtcccgttcgtcggtaacccgtttcagctctttctggagacggcggatctcggcctgagcatctgactgttctttattagtggaagaatccggaccgtacttctttatccaggcataaaggctgtgggtggtgatatcgagacgtgttgcaacgctggcaacagaataaccgcgatcaacaacctgtttgactgcttcagttttaaactcttcgggataacgcttaccgctcatgggcacctctctttaagccatcttaaatgactctgaggtgtctgttaaacccgtggcgattcattcagaaaaagatatgttccattttactcataacaattaaaatcacattatagttaatatgagctggccccctgaaataccagacagtagatgtatcttaaaataagagataggcttggatatatgtctaacactagttctaattttgagatggctggcgttttgttaggaaaagaggtgcgtaaa

SEQ ID NO: 156 - DNA, 1202 bp, Escherichia coli
  source 1..1202: mol_type = genomic DNA
gggcaacctgctgaatgaagagaacccgcatcagctgcagcagcttatccgcctgccggggcagcagtatgatgaggagtccggcctgtattacaaccgccaccgctattatgacccgctgcaggggcggtatatcactcaggatccgattgggctgaaggggggatggaatttttatcagtatccgttgaatccgatctcaaatatagatccattaggattagaaacactaaaatgcattaagccactgcattcaatgggcggaactggtgaaagaagcggtccagatatatgggggaatccgttctatcatcaatatctttgtgtcccagatggtaaaggggactatacttgtggtggccaagaccaacggggagaatcaaaaggagatggtctatgggggccaggtaaagcaagtaatgatacaaaagaagctgctggccgttgtgacctcgttgaaaccgataatagttgtgtggagaactgtttaaaagggaagtttaaagaggtaaggccgcgttattctgtattgcctgatatattcacacctataaatttagggctatttaaaaactgccaagactggtctaatgattctttagaaacatgtaagatgaagtgctccggaaataacattggacgttttattagatttgtattcaccggagtgatgtaatgaaatatattattttttttattcagagctatatggctggctttatcgcttttaatactattcttttccatgcatagactttcactattagactccactcgtgatgtgagcgagttaattagtctcatgtcttatggaatgatggtaatatgttttccaacaggcatagtattctttattgctctaatatttatagggactgtatcagacattattggcgtaaggattgatagtaagtatattatggcgataataatatggctttattttctgtcaggagggtatattcaatggtttgtattaagtaagcgcattataaacaaataaattaagttaattgctcttattattatatgtaacctgggcattgatatcccgtatgccacagacccggcaggtaaccgcctgcccgacccggagctgcacccggacagcaccctcagcatgtggccggataaccgtatcgcccgtgacgcgcactatctttaccggtatgaccgttacggcaggctgacggagaaaaccg

SEQ ID NO: 157 - DNA, 1195 bp, Escherichia coli
  source 1..1195: mol_type = genomic DNA
ggaaggtgcgaacaagtccctgatatgagatcatgtttgtcatctggagccatagaacagggttcatcatgagtcatcaacttaccttcgccgacagtgaattcagcagtaagcgccgtcagaccagaaaagagattttcttgtcccgcatggagcagattctgccatggcaaaacatggtggaagtcatcgagccgttttaccccaaggctggtaatggccggcgaccttatccgctggaaaccatgctacgcattcactgcatgcagcattggtacaacctgagcgatggcgcgatggaagatgctctgtacgaaatcgcctccatgcgtctgtttgcccggttatccctggatagcgccttgccggaccgcaccaccatcatgaatttccgccacctgctggagcagcatcaactggcccgccaattgttcaagaccatcaatcgctggctggccgaagcaggcgtcatgatgactcaaggcaccttggtcgatgccaccatcattgaggcacccagctcgaccaagaacaaagagcagcaacgcgatccggagatgcatcagaccaagaaaggcaatcagtggcactttggcatgaaggcccacattggtgtcgatgccaagagtggcctgacccacagcctggtcaccaccgcggccaacgagcatgacctcaatcagctgggtaatctgctgcatggagaggagcaatttgtctcagccgatgccggctaccaaggggcgccacagcgcgaggagctggccgaggtggatgtggactggctgatcgccgagcgccccggcaaggtaagaaccttgaaacagcatccacgcaagaacaaaacggccatcaacatcgaatacatgaaagccagcatccgggccagggtggagcacccatttcgcatcatcaagcgacagttcggcttcgtgaaagccagatacaaggggttgctgaaaaacgataaccaactggcgatgttattcacgctggccaacctgtttcgggcggaccaaatgatacgtcagtgggagagatctcactaaaaactggggataacgccttaaatggcgaagaaacggtctaaataggctgattcaaggcatttacgggagaaaaaatcggctcaaacatgaagaaatgaaatgactgagtcagccgagaagaatttccccgcttattcgcaccttcc

SEQ ID NO: 158 - DNA, 1183 bp, Escherichia coli
  source 1..1183: mol_type = genomic DNA
atgcttcaccggcagagggagcggaagaggggagagaaggaggagaaggagaaaggggggggaaaaaagaagggaaggggggaaggggagaagaaaaaggaagggaaagagggggaggaaaaagagaagaagagagaggaaaaaaggaaagggggagggaaaaaggagggaaagaaaggggggggagaggaagggaaaaggaaaagaggaaggagagaggagagaggagagagagaaaaaaaagaaagaggaggagggggggaaggggaaggagagagagaaaaggaaaggggaggaaaggaagggaggaaaggagggggaggaaggaaagagagggaggaggaagggagagggggaaagaaaagggaggaaaggaaaggaagaggaggacgaaggagggaaggggtgaagggagaaagaggaaaagagagggagaaaggaaggggggaaggagagagggaagaggaaaagggagagggaagaaaagggagagaaggggaagggaagggagagaaaaagaggggggagagagagaagaaaagaaaagaaggaaagggagagggagaggaaaagaaagggagggaggaaaaggagagggaggaaagagagaaaaaggaaaggaagaaaggaaaaagaaggggggagaaagaagagaaaaagaaagaaaaaaaagaggaaaaaaaaagaggggagagggaaggaaaagagaggaggaagggaggggaaagaggagggagggaggggggggaagggaaaaaaaaaaggggaggggagagaaggagaagggaaaaaagaggggaaggaaagaaagggaggaaggaagggagggaaggaagaaggaggagagaaaagaaaaggagagaaaaggaggagggaagagagaaaaggagagaaaggaggagggagaagaaggaggaagaagaagaagaagagagaagaggaagaaggggagaggaagggggagaagaggaaggaagaaggaaggggaaaggagaaagggaaaagaaaagaaaaaggaggaaaggggagaggaaggggaagaagagaaaaagggaaaaggagagagaaaggggagagagggagaagaagaaaaagaggaggggaggagagaaaaggaaatggttggcttgcccagtaaacgctgaagctgattaatctgctttattgcagcggccagttcaga

SEQ ID NO: 159 - DNA, 1151 bp, Escherichia coli
  source 1..1151: mol_type = genomic DNA
tgtttaaagctgttctgctgggcaataccctgcagtttcgggtgatcgctgagatatttcagggaggctttgtagtcttccagcaacagttcagcaaagtccatttcgaagccgcgacgacacataatgcgcatcaccacgatgtcggtggcttcaccgccgagagtgaaggccggaacctgccagccgcgcagacgcagacgttcagagaggtcgtacagggtgtatcccggatcttcaccatctttcagtttgaagcaaaccgccgggatgccttcgtccgggcgacccgtacagatgaactcatacggccccagtttggcgatttcatccgccagataagcggcaacctggtaagaggcgttctgtactttggtatagccttcacgaccgaggcgcaggaattcatagtactgtgcaattacctgacccgccgggcgggagaagttgatggcaaaagtaccaatttgaccacccaggtagtcaacgttgaacaccagttcctgcggcagcgcttcttcgtcacgccagataacccagccgcagcccagcggagccagaccgaatttatggcctgaagcactgatcgatttcacacgcggcaggcggaagtcccagacgatatccggggcgacgaacggtgccaggaagccaccgctggcagcgtcgatgtgcatgtcgatgtcgataccggtgtcggcctggaatttatccagcgcatcgtgcagcggttgtgggaactcatagttaccggtgtaggtcacgccgaaagtcggcaccacgccgatggtgttttcgtcacaggcttcaatcatgcgtttcgggtccataaacaactgaccggggcgcatagggatctcacgcagctccacatcccagtagcgggcgaatttatgccagcagatttgtaccggaccgcacaccaggtttggtttatccgttggtttgcctgcagcttccatacgcttgcgccaacgccatttcatcgccatcccgccgagcatacaggcctcggaagaaccaatggtgttggtgccaacggcctgaccatttttcggcgcaggcgcatgccacagatcggcaaccatatttacgcaacgcaggtcgatggctgcggattgcggatattcttctttgtcgatccagttttt

SEQ ID NO: 160 - DNA, 1138 bp, Escherichia coli
  source 1..1138: mol_type = genomic DNA
agcagaggcgctctgttccgctgccgtttcagaagacctggcgttcgtctcggacgttctggccgctttcgcggaattgccggccgccgttgccgaggaagcggcactactggcgcttgatgatgcgctcgtttctgatgattttgccgcctcttttgacgccgccgcatcccgggccgaggtggcagcttctgacgctttcgtcgtcgcggtggatgcagaagtggcagcagcctgttgtgacgctgccgcatccgcttctgacgtttttgctgcctcagcactggtggccgccgcgctttttgaggactccgcggcggcagcactttttgaggcctcactggcctttgctgatgccgttcctgcgctggaaaaagcctcctgagccgacgtcgcggcctgtccggctgacgtgctggctgtacgtgctgaatctgcagcatcagtcgcatgggttgccgcctcacgggctgatgtgccggcatcgctggctgacttcttcgcggctgccgtgttctgtgccactgcggacgcgttacgtgccacctcttccaccatcagctcaaaacggcgcagtgcctccggacgggcatcctcctccgtcatggcaccgagaaaatcattcagcgtaccgggttgagaatcttcatacacggtgatggtcccggcatgtgacggcgggaatccctccaccaacagaataacgctgtactgaccgtactcaacgtccatactgtaacgcccggcttcatccggattttctgaggccagcgtgttcaccaccaccgtggtgctgttacgttttgctttcagctgaatggtgcagttctgtaccggtttacctgcaccgtctttcagcacgcctgaaatctttactgccatattcgttccacaaataaaaaggcaccatgtctggagcccgtattggggttataaatatttcaacggatactgataccggaagccgcttttttggtcactatcaccgtacagtcggtgatattacctgccccctgattgcctttctggaaaatcctgaactccagggtgacgttcccaccaccactcggcatatcaataaccgcgctgtaactcccgggaactgcccctctggtttctctggatgcgattaagacac

SEQ ID NO: 161 - DNA, 1099 bp, Escherichia coli
  source 1..1099: mol_type = genomic DNA
gttttcaaattgttccggactgaggccgccacaccaactgtgccgccgccaccgattgtaatcacattcgatataattaaacaccgttgcccgcattatttcccggctgataaagtgttctccatggatacattccactttcagcgaatgaaagaagctttccacgcaggcattatcgtagcagcaaccttttgcgctcatacttccacgcagattatgccgcttcagttgcgcctgataatctgctgaacagtactggcctccacggtccgtgtgaacgataacgttccggggcctcttacgccgccacagcgccatctgcagggcatcgcaggccagttgcgccgtcatgcgtggcgacattgaccagccaataacggcacgtgaccacaggtcaatgaccactgccagatacagccagccttcatctgtacgtaagtacgtgatgtctcctgcccacttctggttcgggccactggcgtaaaaatcctgctccaacagattttctgacacaggcaggccgtgtgcgcggtagctgaccgggctgaacttccgggaggcctttgccctcagtccctgacggcgcaggcttgccgccacggtttttacgttaaaggggtaaccctgagcacgcagttcatccgtcaggcgtggggcaccgtaacgctgttttgaccgggtaaaagccgcgaggacaacgctgtcgcagtgttggcggaactgctgacgcgtgcttatccttgtccgccgctgacaccacgtataccagccgctgcgggccacccggagcacgcggcacattgctttgatgctgaactcagcctgatgtttttcaataaagacatacttcatttcaggcgcttcgcgaagtatgtcgcggccttttggaggatagccagctcttcatcccgttctgccagctggcgtttgagacgtgcaatctcggtagacatctccagttcacgttcagaagacgtctgctgattttgctgtttactgcgccagttgtagagctgtgattcatacaggctgagttcacgggctgcggcagtaacaccgatgcgttcagcaagcttcagggcttcactgcgaaattcag

SEQ ID NO: 162 - DNA, 1073 bp, Escherichia coli
  source 1..1073: mol_type = genomic DNA
ccataacagacaggcgaataagctagcaacaggtgttgtcacggataaaggcgcacctgcgtcgtccctttttcctcctttttctttcccccttctttccctcccttttttttctcttcctttccccttcccctcttccttctctcttctctcttctctctctcccccccctccctcttcttctttttttccttttccttctctctctccccttcccttttcttcccttcctttcttcccttctttttcttccttccctctctttcttcttcctttctctttttccctcccctttcttcccttcccttcctcttcttcctccttctttccttttttcctttctccctcttcccctctctttctcccttccttttttccttctctctttcctcttcccctttctctttcctcccctttctctccttttcctttcctttctctccccctcttttttctctctctcctcccctcccctccttccctttctctttctcttcccctccctttctttcttccccttctctttcttccctctctcccccttcccttcctcccttccccctccttttttctccctcctctccccctccctcccccccctcttccccccccctcttttctctttccttcccctctcttcttcctttcttttccctcttctttctttcttttttttcctttccccccccccttttcttttctctccttctcctttcccccctcttttccttccctccctttcttccttcctttctttccttcctccttcttctctcccctccccttctctccccttcttctttcctctctccccttctctcccttcttctttctcctccttcttcctcctcctcctcctctctcctcttcctccttttctcttcctttttctcctcttccttcctccttccttttccttcccttttcttttcttctctccttccctcttttcccctccttttcctcttctcttttctccttttcttccttttccccttctttttcccttcttcctccttttccttcttctttttttcccccttcctccttctttcccccccttcccggtagtt

SEQ ID NO: 163 - DNA, 1045 bp, Escherichia coli
  source 1..1045: mol_type = genomic DNA
ttacttgactgtaaaactctcactcttaccgaacttggccgtaacctgccaaccaaagcgagaacaaaacataacatcaaacgaatcgaccgattgttaggtaatcgtcacctccacaaagagcgactcgctgtataccgttggcatgctagctttatctgttcgggcaatacgatgcccattgtacttgttgactggtctgatattcgtgagcaaaaacgacttatggtattgcgagcttcagtcgcactacacggtcgttctgttactctttatgagaaagcgttcccgctttcagagcaatgttcaaagaaagctcatgaccaatttctagccgaccttgcgagcattctaccgagtaacaccacaccgctcattgtcagtgatgctggctttaaagtgccatggtataaatccgttgagaagctgggttggtactggttaagtcgagtaagaggaaaagtacaatatgcagacctaggagcggaaaactggaaacctatcagcaacttacatgatatgtcatctagtcactcaaagactttaggctataagaggctgactaaaagcaatccaatctcatgccaaattctattgtataaatctcgctctaaaggccgaaaaaatcagcgctcgacacggactcattgtcaccacccgtcacctaaaatctactcagcgtcggcaaaggagccatgggttctagcaactaacttacctgttgaaattcgaacacccaaacaacttgttaatatctattcgaagcgaatgcagattgaagaaaccttccgagacttgaaaagtcctgcctacggactaggcctacgccatagccgaacgagcagctcagagcgttttgatatcatgctgctaatcgccctgatgcttcaactaacatgttggcttgcgggcgttcatgctcagaaacaaggttgggacaagcacttccaggctaacacagtcagaaatcgaaacgtactctcaacagttcgcttaggcatggaagttttgcggcattctggctacacaataacaagggaagact

SEQ ID NO: 164 - DNA, 1032 bp, Escherichia coli
  source 1..1032: mol_type = genomic DNA
ccggaaacattgacggcagcatccatcgctgggcaaaaaaagaagttatcgacaacgaccgcgaagactggaagcgtatctcggcatcaatgcgcaaacagcctgatgcccttcgctacgaccgccagactatttttggccttgtccgtgaacgtccgatcgacattcacaaagaccctgtggcactgaacaaatacattactgaatacctgactacaaagggcgtgtttgaagatgaaggaagaaatcagagcgcaactgatactctctcgtcgccagtaccagaaactgatgcagtggaaacggcaattccggacaacgaaaaaaccgaatgcaaagtggaagtcgaaccatctgtagagcgtgaagggccgttctacttcctcttcaccgacaaggatagcgaaaaatacggtcgcgcaaacaaactttctggtctggataaggcactggctgcaggggctactgaaatcacgaaagaagaatatttcgcccgcaaaaacggtacatactcaggttcacaacaaaatactggtgcatctgacacgaccgcacaaccagggccggtaaaagttaccgctgacgaagtaaacaaaattatgcaggcagccaatatcagccagcctgacgccgatgaactgcttgcagtatcacgtggtgaatttgttgcagggattagcgatccgaatgatccgaaatgggtgaaggggattgaaacccgcgattctgtgaaccagaaccagcaagaaacggaacagaacgaccagaaagcggaacaaaacagcccaaatacgcaacaaaacgagccagaaacgaaactacctgaaccagtagtgcaacaggaagtggaaaaagtctgcaccgcctgcggtcagaccggcggcggcaactgccctgattgtggtgcggtgatgggcgacgcaacataccaagaaacattcgatgaagagtatcaggttgaagttcaggaagatgatccggaggaaatggaaggcgctgaacatccacacaaggagaacactggcggcaatc

SEQ ID NO: 165 - DNA, 1032 bp, Escherichia coli
  source 1..1032: mol_type = genomic DNA
ccggaaacattgacggcagcatccatcgctgggcaaaaaaagaagttatcgacaacgaccgcgaagactggaagcgtatctcggcatcaatgcgcaaacagcctgatgcccttcgctacgaccgccaaactatttttggccttgtccgtgagcgtccgatcgacattcacaaagatcccgtagcactgaacaaatatatctgcgaatacctgacgacaaagggcgtgtttgagaatgaagaaacaggcctgggcactgttgatgttctccagtcatcagaaacacaaactgatgcagtggaaactgaggtatctgatatcccaaaaaatgaaaccgcgccggaagctgaaccatctgtagagcgtgaggggccgttctatttcctcttcgcagataaggacggagaaaaatacggtcgcgcaaacaaactttctggtctggataaggcactggctgctggcgccactgaaatcacaaaagaagaatattttgcccgaaaaaatggcacatacacgggcttaccgcaaaatgtagataccgctgaagattcagaacaaccagagccgataaaagttaccgctgacgaagtaaacaaaattatgcaggcagccaatatcagccagcctgacgccgataagttgcttgctgcatcacatggtgaatttgttgaagggattagtgacccgaatgatccgaaatgggttaaggggatccagacccgcgattctgtgaaccagaaccagcatgaatcggaacggaactaccaaaaagcggaacaaaacagcccaaatgcgttacaaaacgagccagaaacgaaacagcctgaaccagtggcgcaacaggaagtggaaaaagtctgcaccgcctgcggtcagaccggcggcggcaactgccctgattgtggcgcggtgatgggcgacgcaacataccaagaaacattcgatgaagagtatcaggttgaagttcaggaagatgatccggaggaaatggaaggcgctgaacatccacacaaggagaacactggcggcaatc

SEQ ID NO: 166 - DNA, 137914 bp, Escherichia coli
  source 1..137914: mol_type = genomic DNA
gtttaaatataactgatatccctgaaggttattaacttgaattatgacgcactgatattattcatcaaataataacaaaatagccattgcaccgggttgaacaatttacaaaagaaagatattccatatcgtataatgcgattaaatacgccgtcttatagaaaatgatggttagattaatatgcggattatctttctacgcaaggagtatttatctttactcccgtcaatgattgcatctcttttctctgctaacggtgtcgcggcggtcactgattcatgccagggatatgatgtcaaagcgagttgtcaggccagcaggcaaagcctttcaggcattacgcaggactggagtatcgctgatgggcaatggctggttttttcggatatgaccaataacgccagcggtggggccgtatttttgcaacaaggagcggaattttcactattaccagaaaatgaaactggaatgactctgtttgccaataacaccgttacaggagaatataataacggcggggccatatttgctaaagaaaactcaacgctgaatcttactgatgttattttttccggtaacgtcgcaggcggctatggtggcgcaatctattcttctggtactaacgatactggtgccgtcgatttacgtgtcactaacgccatgtttcgcaataacatcgctaatgatggcaaaggtggcgcaatttataccattaataatgacgtttatttaagtgatgttatttttgataacaaccaggcatatacatcaacaagttacagtgatggcgatggcggggcaatcgatgttaccgataataatagcgacagcaagcatccttcaggttatacgatagtaaataacactgcctttacaaataacactgccggaggttatggcggggcgatatataccaatagcgtgacggctccctatcttattgatatttctgttgatgacagctacagccagaacggaggcgtgttagtcgatgagaacaatagcgcagcaggctatggagatggtccttcctctgcggcgggtggctttatgtatctcggcttaagtgaagttacctttgatattgccgacggaaaaacgctggttattggcaatacagagaatgacggagctgttgactctattgctggtaccgggttaatcaccaaaacaggttccggcgatctggtacttaatgcagataacaatgactttactggtgagatgcagattgaaaacggtgaagttaccctgggccgcagcaactccctgatgaatgtcggcgatacgcattgccaggacgatccgcaagactgctacggtctgacgatagggagtattgatcagtatcagaatcaggctgagctaaacgttggctcgacccaacaaacttttgtgcacgcattgacgggctttcagaatggcactttaaatatcgatgctggtggcaacgttactgttaatcagggcagttttgctggcatcatcgaaggtgctggtcagctcaccattgcgcaaaacggcagctacgtgctggcaggggcgcagtcgatggcgctaaccggcgatatagtcgttgatgatggtgcggtgctttcgctggaaggcgacgcggcagatcttaccgctctccaggacgatccgcagtcgatcgtgttaaacggcggtgtgctcgatctctctgatttctccacctggcagagcggcacatcatacaacgatggccttgaagtcagtggcagcagcggaacggttatcggcagtcaggatgtggtagatcttgcaggtggcgacaatttgcatatcggcggcgacgggaaagatggcgtctacgtggtggtcgatgcgagcgacgggcaggtaagtctggcaaacaataatagttatttgggcacaacacaaatcgcctccggtacgctgatggtgagcgacaactcgcagcttggagatacccactataaccgccaggttatctttaccgataagcaacaagaaagcgtgatggagattacctccgacgttgacacgcgttcagatgcggcaggccacggacgtgatattgaaatgcgcgccgacggtgaagtggcagttgatgcgggggtagacacgcagtggggcgcactgatggctgacagcagcgggcagcatcaggatgagggtagcacattgactaaaacgggggctggtacactggagctgaccgccagcggtacaacgcagtcggcggtacgtgtcgaagaaggcaccctgaaaggtgatgttgctgatatccttccttatgcttcgtcactgtgggttggtgatggggcaacgttcgttactggcgcggatcaggatattcagtcaattgatgctatttccagcggcactatcgacatcagcgatggtacggttttgcgcctgaccgggcaggatacttccgtcgcccttaatgcctcactatttaacggcgatgggacgctggtgaatgccaccgatggtgtgacgttgacaggtgagcttaataccaaccttgaaactgacagcctgacttatctttccaacgtgacggttaatggcaatctgaccaatacgtccggtgcggttagcctgcaaaatggcgtcgctggcgatacgctgacggtaaacggtgattataccggcggcggtacgctactgctcgatagcgaattaaacggcgatgactcggtaagcgatcaattggtgatgaacggtaatactgctggcaacacaactgtggtggttaactccattacagggattggtgagccgacatcgacaggcattaaagtggttgatttcgcagctgatcccacgcagtttcaaaacaatgcgcagttcagtctggcaggcagcggctacgtcaatatgggagcgtatgactacacgctggtggaagataacaacgactggtatctgcgatcgcaagaagtaacgccgccatcgccacctgatccagacccgactcccgatcctgatcccacgccggatcctgatccaacacccgacccggaacctacgcctgcttaccagccggtgttgaatgccaaagttggcggttatctcaataacctgcgggcggcaaatcaggcgtttatgatggagcgacgcgatcacgcaggtggcgatggtcagacgctgaatttacgtgttatcggcggagattatcattacacagcagcggggcaactggctcaacatgaagacacttctacggtgcaacttagcggcgatctgtttagcgggcgctggggcacggatggcgagtggatgcttgggattgttggtggctacagcgataaccagggcgacagccgctcgaatatgaccggaactcgcgccgataaccagaaccacggttatgccgttgggctgacatcaagctggtttcagcacggtaatcagaagcaaggggcctggctggatagctggctgcaatacgcgtggtttagcaatgatgtttccgaacaagaagatggcacagatcattaccactcgtcggggattatcgcctcgctggaggcggggtatcagtggttaccggggcgtggtgtggtgattgaaccgcaggcgcaggtgatttatcagggcgtgcagcaggatgattttaccgccgctaaccgtgcgcgcgtgtcacaatcgcagggtgatgatattcagacgcggctgggtttacacagcgaatggcgtaccgctgttcatgtcataccaacattagatctgaattattatcacgatccccattcgacggaaattgaagaggatggcagcactatcagtgacgatgcggtgaagcaacggggtgaaataaaagtgggagtcacgggcaatatcagtcagcgagtgtccctgcgcggcagcgtggcgtggcagaaagggagtgatgattttgcccagacggcagggtttttgtcgatgacggtgaaatggtaatcactgtctagtcggcacggttgccggatgcggcgtaaacgccttatccggcctacggggagcatttgtaggcctgataagacgcggcaagcgtcgcatcaggcattggcgcggccaaacatcaacctcacttattctgcgtgtgcagcatatagttcacatccacgccggggccgagtttaaaagtattagtgatcgggttgtaatgcagcccagtgatatgccgctcttttaaactggtctgatccacccagcccagcaattctgccggtttaataaacttcttcacatcatgcgtgcctttgggcaccatgcgcaaaatatattccgcaccaaccaccgccatcagccatgacttgccgttgcggttaagtgtcgagaaaaagacatcgccgcctggtttcaccagttgcgcacaggctctgaccactgactgcggatcggggacgtgctccagcatctccatgcaggtcaccacatcatactgcccggcatgttttgcnnnnnnnnnnacggtttcctgcacataatccacctgaatgccgctttccagcgcgtgcagttttgccacctgcaatggctcaaagcccatatccagaccggtcaccgtcgcgccttcgcgcgccatactctcggccagaatgccgccgccacaaccgacatcgagcacctttttgccaaataaaccgccagcacgctcggcaatatagcccagacgcagcgggttaatgcggtgcaacggtttgaactcaccttcaagatcccaccagcgggaggcgacggcttcaaatttagcgatctcttcgtggtctacgttatggttttccggcgatttttcggcattcattggcacttctactccgtaattggcaagacaaacgagtatatcaggcattggatgtgaataaagcgtataggtttacctcaaactgcgcggctgtgttataatttgcgacctttgaatccgggatacagtagagggatagcggttagatgagcgaccttgcgagagaaattacaccggtcaacattgaggaagagctgaagagctcctatctggattatgcgatgtcggtcattgttggccgtgcgctgccagatgtccgagatggcctgaagccggtacaccgtcgcgtactttacgccatgaacgtactaggcaatgactggaacaaagcctataaaaaatctgcccgtgtcgttggtgacgtaatcggtaaataccatccccatggtgactcggcggtttatgacacgatcgtccgtatggcgcagccattctcgctgcgttacatgctggtagacggtcagggtaacttcggttccatcgacggcgactctgcggcggcaatgcgttatacggaaatccgtctggcgaaaattgcccatgaactgatggccgatctcgaaaaagagacggtcgatttcgttgataactatgacggcacggaaaaaattcccgacgtcatgccaaccaaaattcctaacctgctggtgaacggttcttccggtatcgccgtaggtatggcaaccaacatcccgccgcacaacctgacggaagtcatcaacggttgtctggcgtatatcgatgatgaagacatcagcattgaagggctgatggaacacatcccggggccggacttcccgacggcggcaatcattaacggtcgtcgcggtattgaagaagcttaccgtaccggtcgcggcaaggtgtatatccgcgctcgcgcagaagtggaagttgacgccaaaaccggtcgtgaaaccattatcgtccacgaaattccgtatcaggtaaacaaagcgcgcctgatcgagaagattgcggaactggtaaaagaaaaacgcgtggaaggcatcagcgcgctgcgtgacgagtctgacaaagacggtatgcgcatcgtgattgaagtgaaacgcgatgcggtcggtgaagttgtgctcaacaacctctactcccagacccagttgcaggtttctttcggtatcaacatggtggcattgcaccatggtcagccgaagatcatgaacctgaaagacatcatcgcggcgtttgttcgtcaccgccgtgaagtggtgacccgtcgtactattttcgaactgcgtaaagctcgcgatcgtgctcatatccttgaagcattagccgtggcgctggcgaacatcgacccgatcatcgaactgatccgtcatgcgccgacgcctgcagaagcgaaaactgcgctggttgctaatccgtggcagctgggcaacgttgccgcgatgctcgaacgtgctggcgacgatgctgcgcgtccggaatggctggagccagagttcggcgtgcgtgatggtctgtactacctgaccgaacagcaagctcaggcgattctggatctgcgtttgcagaaactgaccggccttgagcacgaaaaactgctcgacgaatacaaagagctgctggatcagatcgcggaactgttgcgtattcttggtagcgccgatcgtttgatggaagtgatccgtgaagagctggagctggttcgtgaacagttcggtgacaaacgtcgtactgaaatcaccgccaacagcgcagacatcaacctggaagatctgatcactcaggaagatgtggtagtgacgctctctcaccagggctacgttaagtatcagccgctttctgaatacgaagcgcagcgtcgtggcgggaaaggtaaatctgccgcacgtattaaagaagaagactttatcgaccgactgctggtggcgaacactcacgaccatattctgtgcttctccagccgtggtcgcgtctattcgatgaaagtttatcagttgccggaagccactcgtggcgcgcgcggtcgtccgatcgtcaacctgctgccgctggagcaggacgaacgtatcactgcgatcctgccagtgaccgagtttgaagaaggcgtgaaagtcttcatggcgaccgctaacggtaccgtgaagaaaactgtcctcaccgagttcaaccgtctgcgtaccgccggtaaagtggcgatcaaactggttgacggcgatgagctgatcggcgttgacctgaccagcggcgaagacgaagtaatgctgttctccgctgaaggtaaagtggtgcgctttaaagagtcttctgtccgtgcgatgggctgcaacaccaccggtgttcgcggtattcgcttaggtgaaggcgataaagtcgtctctctgatcgtgcctcgtggcgatggcgcaatcctcaccgcaacgcaaaacggttacggtaaacgtaccgcagtggcggaatacccaaccaagtcgcgtgcgacgaaaggggttatctccatcaaggttaccgaacgtaacggtttagttgttggcgcggtacaggtagatgactgcgaccagatcatgatgatcaccgatgccggtacgctggtacgtactcgcgtttcggaaatcagcatcgtgggccgtaacacccagggcgtgatcctcatccgtactgcggaagatgaaaacgtagtgggtctgcaacgtgttgctgaaccggttgacgaggaagatctggataccatcgacggcagtgccgcggaaggggacgatgaaatcgctccggaagtggacgttgacgacgagccagaagaagaataattttacttcttcatgccaaaagggagctatctcccttgtttgaattgaaaagtccaggctgcaaagtctgggcttttgtcgtattagggcacggtaaagtttggctgtgcccgtaaaaaatggctggctatacacaaggaatgtggcaatgagtggtgaaaaaaaggcgaaaggctggcggttctatggtcttgtaggttttggcgcaatagcactgctttccgctggcgtctgggcgttgcaatatgctggcagtgggccagaaaaaacgttgtcgccgctggtggtgcacaacaatctgcaaatcgatctcaatgagccggacctctttctcgacagcgactctctgagccagcttcccaaagatctcctcaccattccgtttctccacgatgttctgagcgaagatttcgttttctattatcagaatcatgccgatcgtctgggcattgaaggcagcattcgtcgtattgtctatgaacacgatctcacgctgaaagataagctcttttcgtcactcttagatcagcccgcgcaggcagcgctgtggcacgataaacaaggccatctttcacattatatggtgctgatccagcgcagtggtttaagcaaactgctggagccattgttgtttgccgctaccagcgacagccagttaagcaaaacggaaatcagtagcatcaagataaatagtgaaactattcctgtttatcagttgcgctataacggcaataacgccctgatgttcgcgacatatcaggacaagatgctggtgttttccagcacggatatgctgtttaaagatgatcagcaggataccgaagccacggcgatcgcaagtgatttgttgagcggcaaaaaacgctggcaagccagctttggcctggaagagcgtgctgccgaaaaaacgccagtacgccagcgcatcgtggccagcgccaggttgctgggttttggctaccagcgattaatgccttcttttgctggcgtacgcttcgaaatgggtaacgacggctggcacagttttgtggcgttaaatgatgaatccgccagcgtagatgccagtttcgattttacgccggtctggaacagtatgcctgccggggccagcttctgtgtggcggtgccgtattcacacggtattgccgaagagatgctttcgcacatcagccaggaaaacgacaagctgaatggggcgttagacggtgccgcggggctgtgctggtatgaagactcaaaattgcaaaccccgctgtttgtcggtcagtttgatggcactgccgaacaggcgcaattgccagggaaactgtttacgcaaaatattggtgcgcacgaaagcaaagcgccagaaggtgttttgccggtaagccagactcagcagggcgaagcgcaaatctggcgtcgcgaagtgagttcccgatacggccagtatccgaaagcgcaggcggcgcaacccgatcaattaatgtcggattattttttccgtgtgtcgctggcgatgcaaaacaaaacgctgcttttctccctcgatgacacgctggttaataacgcgctgcaaacactgaataaaacccgcccggcaatggtggatgtaatacccactgatggcatcgttccgctctatatcaatccacaaggaatagcgaaactgctgcgtaacgaaacgttgaccagtctgccgaagaatctcgaaccggttttttataacgccgcacaaactttattaatgccgaagctggacgctttatctcaacaaccgcgttatgtcatgaagctggcccagatggaacccggtgccgcctggcagtggctacccataacctggcagccgctatgaggcacgggctgctggcgctgatttgctggctgtgttgtgttgttgcccatagcgaaatgctgaatgtcgaacaatccgggctgtttcgcgcctggtttgtacgcattgcacaagaacagctccgccaggggccaagtccacgctggtatcagcaggattgtgcgggcctggtgcgatttgcagcgaacgaggcgctgaaagttcacgacagcaaatggctaaaaagtaacggcatagcaagtcagtatttgccgcctgaaatgacgttaaaacctgaacagcgtcaactggcgcaaaactggaatcaggggaacgggaaaaccggtccctatgtgaccgcgattaatttgattcagtacaacagccagtttattggccaggacataaaccaggcgctgcctggcgatatgatttttttcgatcagggcgatgcccagcacttaatggtctggatggggcgttacgtcatctaccacaccggaagcgccacgaaaactgacaacggaatgcgcgcagtcagtctgcaacaacttatgacatggaaggacacccgatggatactcaacgattccaatcccaatttcattggcatttatcgtttaaattttctggcgcgatagcagcgtgcttgtccctgtctcttgtgggaacagggcttgctaatgctgatgattcgcttccttccagtaactatgcgccgcccgcagggggaacattctttttgcttgctgacagcagttttagcagcagtgaagaggcgaaagtgcgactggaagcgccggggcgtgattatcggcgctatcagatggaagagtacggcggcgtggacgttcgcctgtatcgtattcctgacccgatggcatttttgcgccagcagaaaaacctgcatcgcattgtggtgcaaccgcaatatttgggcgacgggctgaacaagacgctaacctggctgtgggataactggtacggcaaatctcgccgcgtgatgcagcgtactttctcttctcagtcaaggcagaatgtgactcaggcgttacccgaattacagctcggcaatgccattattaaaccttcccgttatgtacagaacaaccagttttccccgctgaaaaaatatcccctggtggaacagttccgttatccactatggcaggctaaaccgttcgagccgcagcaaggggtaaaactggaaggcgtatccagcaatttcatctcgccgcagccgggtaacatttatattcctctcggccaacaagagccgggactgtacctcgtcgaggcgatggttggtgggtatcgggcgacgacggtggtgtttgtttccgataccgtggcgcttagcaaagtgtcaggcaaagagcttctggtgtggaccgcgggtagaaaacagggtgaagcgaaaaccggcgcagggagcttgtggactgacggtcttggcgtgatgacccgcggtgtgaccgatgacagcggtaccttgcagttacaacatatatcgccagaacgttcatacattctgggtaaggatgctgaaggcggcgtttttgtctccgagaacttcttctacgaaagcgaaatctacaacacccgcttgtatatttttaccgatcgcccgctatatcgcgcaggcgatcgtgtcgatgttaaagtgatcggccgcgagttccacgatccgttgcattcatcccccatcgtcagcgccccggcgaagctttcggtgctggacgccaacggcagtctgttgcaaaccgtcaatgtcacgctggatgcgcgcaatggcgggcagggaagtttccgcctgccagaaaatgccgtagccggaggttatgagttacgtcttgcttaccgcaatcaggtctatagcagcagttttcgcgtggcaaactacatcaagccacatttcgagattggtttagctctcgacaaaaaagagttcaaaactggcgaagcggtcagcggcaaactgcaactgctctacccggatggcgagccggtaaaaaatgcccgcgtgcagttaagtttgcgcgctcagcaattatcaatggtcggtaacgatttgcgttatgccggacgtttccccgtgtcgctggaaggcagcgaaacggtgtccgacgccagtggtcatgtgacgttaaatctccccgccgccgataaaccgagccgctatttgttaaccgtctccgccagtgacggcgcggcgtatcgcgtcaccaccaccaaagagatcctcattgaacgcggcctggcgcattactctttaagtaccgccgcacaatacagtaatagcggcgagtcggttgtgttccgttatgccgcgctggaatcttcaaaacaggttcctgttacgtatgaatggttgcgtctcgaagaccgcacgagccatagcggagagctaccgtcaggcggcaaatcctttaccgtcaatttcgctaaacctggcaactacaatctgacattacgcgataaagacggcttaattctcgctgggttaagtcatgccgtcagcggtaagggcagcacggcgcatactggtacggtagatatcgtggcggataaaacgctgtaccagcccggcgaaaccgcgaagatgctgattacctttccggagccaattgatgaagcattattgacgctggaacgcgatcgcgtggaacagcagtcgctgctttcgcatccggcaaactggctaacgctacaacgtttaaacgatacccagtatgaagcccgggttcgagtgagcaattcctttgcgcctaacatcactttttcggtgctgtatacccgtaatggtcagtacagttttcagaacgccgggatcaaagttgccgttcctcagcttgatatccgggtgaaaacggacaaaacccattaccagcctggtgaactggtcaatgtcgaattaacctcgtcgctgaaaggtaaacctgtttctgcgcagctaacggtaggcgtggtcgatgaaatgatctacgcgctgcaaccagaaatcgcgccgaatatcggcaaatttttctatccgctggggcgtaacaatgtgcgtaccagctccagtctgtcgtttatcagctacgaccaggcgctctccagcgagccggttgcgcctggcgcgactaaccgcagcgagcggcgagtaaaaatgcttgaacgtccacggcgtgaagaggtggataccgcggcatggatgccgtcactcacaaccgataaacaaggcaaagcgtatttcacgttcctgatgcctgattcgttaacccgctggcgtatcaccgcgcgtgggatgaacggcgacgggctggtcgggcaggggcgtgcttatctgcgttcggaaaaaaatctctacatgaagtggagtatgccaacgatgtatcgcgtgggcgacaaaccggcggcaggactgtttatcttcagtcagcaggataacgaaccggtggcgctggtgactaaatttgcaggcgctgagatgcgccagacgctgacgctgcacaaaggggcgaattatatttcgctgacgcagaatattcagcaatctggcttgttaagtgcagaactgcaacaaaatgggcaagtgcaggacagcattagcacaaaactgtcttttgtggataacagctggcccgttgaacagcagaaaaatgtcatgctcggtggtggcgataacgcgctgatgttgcccgagcaggcgagcaatatccggctacaaagtagtgaaacgccgcaggagattttccgcaacaatcttgatgcgttagtcgatgaaccgtggggtggcgtaatcaacaccggtagccgtctgatcccgctcagtctcgcctggcgttcgcttgccgatcatcaaagtgccgccgctaacgacattcgtcagatgattcaggataaccgtctgcggctgatgcaactggcggggcccggagcgcgctttacctggtggggtgaagatggcaatggtgacgccttccttacggcatgggcatggtacgccgactggcaggccagccaggcgatcggcgtaacgcaacaaccggaatactggcagcatatgctcgacagttatgccgagcaggcagataacgtgccgttattgcatcgggcgctggtgctggcgtgggcacaggagatgaatctgccgtgcaaaacgttgttgaaagggttggatgaagctatcgcccggcgcggaactaaaactgaagatttctctgaggaagaccccagcgatatcaatgacagcctgatcttcgatacaccggaatctccactggcagatgcggtggcaaacgtcttaaccatgacgttgctgaaaaaagcgcagttgaagtccacggtgatgccacaggttcagcaatatgcgtgggataaagcggcaaacagcaatcagccgctggcgcacacggttgtgctgctcaatagcggtggtgacgctacccagacggccgctattttaagtggtttgaccgctgagcaatccactattgagcgcgcgctggccatgaactggctggcgaaatatatggcgacaatgcctccagttgttttgcctgcgcctgcgggcgcatgggctaaacataagttaactggagggggcgaagactggcgttgggttggtcagggtgtgccggacattctctcttttggtgacgaattatcgccgcaaaatgtgcaggtccgctggcgtgaaccggcaaaaacggctcaacaaagtaacattccggtgaccgttgaacgccagttgtatcggcttatccccggtgaagaagagatgagctttactctgcagccggtgaccagcaatgagattgacagcgatgcgctgtatctcgatgaaattacgcttaccagcgagcaggatgcagttctgcgctatggtcaggtggaagtaccgctcccgccgggagccgacgttgagcgcacaacatggggcatttcagtcaataaacccaacgccgcgaaacagcaggggcaattgctggaaaaagcgcgtaatgaaatgggcgaactggcctatatggtgccggtgaaagaactgacgggaacggtcactttccgccatttgctgcgcttctcgcaaaaagggcaattcgttctgcctcctgctcgttatgtgcgttcctatgcacctgcgcagcaaagtgttgcggcagggagtgaatggaccgggatgcaggtgaaataagtgaactggcgcagaatcgtctggctattggcgttggttactctgccaacgcttgcggaggagacgccgttacaactggtgctgcgcggtgcgcagcacgatcaactgtatcagctgtcgtcatcaggcgtgaccaaagtctcagcattacctgactcgctcaccacgccgttagggagtttgtggaaactgtatgtttacgcctggctggaggatacccatcaaccggagcagccctaccagtgtcgcggaaactccccggaagaggtttattgttgtcaggctggggagagcataacgcgcgataccgcgctggtacgttcctgtgggctctattttgcgccgcagcggttgcatattggcgcagatgtgtgggggcaatactggcaacagcgtcaggcacctgcgtggttagcgtctctgcctacgctgaagccagaaacctcggtaacggttaaatcgctgcttgattcattagcgacgttacccgcgcaaaacaaagctcaggaagtcttactggatgtggtgctggacgaggcgaaaatcggtgtcgcatccatgctcggtagtcgggtacgggtgaaaacctggagctggtttgccgatgataaacaggaaatccgtcagggtggttttgctggctggttaaccgatggtacaccgctgtgggttactggcagtggcaccagcaaaacggtactaacccgttatgcgacggtgcttaatcgggttttgccagtgccgacgcaggttgccagtgggcaatgtgtagaggtggagctgtttgcccgctatccgcagaagaaaatcacagcggagaagagtacgacggcagtaaaacccggcgtacttaatgggcgctatcgtgtgacgtttaccaatggtaaccacattacgtttgtcagccacggtgagacgaccttactgagcgaaaagagcaaactgaaattgcagtcgcatctcgatcgtgaagagtacgttgccagagttctggatcgcgaggcgaaaagtacgccccctgaggcagcgaaagccatgaccgtggcgattcgcacttttttacagcaaaacgccaatcgggaaggcgattgcctgaccatccccgacagcagcgccacgcagcgtgtttctgcttcgccagcgaccacgggggcgcgaacgatgaccgcctggacgcaggatctcatctatgcaggcgatccggttcattatcatggcagtcgcgctaccgaagggacactttcctggcggcaagccacggcccaggcggggcagggggagcgttacgaccagatactcgcgtttgcttatcccgacaacagccttagccgctggggagcgccacgctcaacctgccagttattacccaaagcgaaagcctggctggcgaaaaaaatgccgcagtggcggcgtatattacaaggcgagacggggtacaacgaaccagacgtgtttgcggtctgtcgtttagtctcaggtttcccctataccgatcggcagcagaaacggctgtttattcgtaacttctttacgcttcaggatcggctggatttaacccatgagtatctgcacctggcctttgatggttatcccaccgggcttgatgagaactatatcgaaacgctgacccgacaattattaatggactaatgctatgcgaaagatttttcttccgttgttactggtggcactttcgcctgtcgctcacagtgaaggtgtgcaggaagtcgagattgacgcaccgctctctggctggcatccggcagagggcgaagatgccagtttttcacaatcgatcaattacccggcgtcgtccgtcaacatggcagatgatcaaaatatctcagcgcagatccgcggcaaaataaagaattatgctgcggcgggtaaagttcagcagggccggctggtggtcaacggtgccagtatgccgcagagaattgaatccgatggttcatttgcacgcccttatattttcactgaaggcagcaacagcgtgcaggtcatcagcccggatgggcaaagccgacaaaaaatgcagttttactcaacgccgggtacaggaacgattcgtgcacgtttacggctggttctctcgtgggatacggacaataccgatctcgatctccatgttgtcacgcccgatggcgaacacgcctggtacggtaacaccgtgctgaaaaacagtggtgcactggatatggatgtcacgacggggtacggacccgagattttcgccatgccagcgccagttcacggacgctatcaggtgtatatcaactactatggcggacgcagcgaaacggaattaaccaccgcccaactgacgctgatcaccgatgaaggatcggtcaatgagaaacaggaaacatttattgtaccgatgcgtaatgctggcgagctgacgctggtgaaaagttttgactggtgattaatggggttaccttcgctgtcgatgttcaagaaaacgcccgataactttcgctatcgggcgtttttgttcgttaattcaaccgttcaatcaccatcgcaattccctggccgccaccaatgcacagtgttgccagccccagcgttttatcgcgtgcctgcatggcatgtaatagtgtgaccagaatacgagcaccactggcaccgataggatgcccgagcgcgatggccccgccgttgacattcactttctcaggatcaaagcccaaggttttcccaacggcaaggaactgtgcagcaaatgcttcattagcttcgatgagatcaatgtctgccagttgcagccccgccagttgtaacgctttttgcgtggcaggtactggccccatacccatcaatgcgggaggcacgccaccgctggcataacttttaatgcgagccaggggggtaaggcctgctgccagcgccgcagattcttccataatcaccagagcggcagcaccgtcgttaataccagacgcgttcccagcggtgactgttcctgctttatcgaaggccgggcgcaatgcacctaacgcttcagccgttgaattcgctttcgggaattcgtcttgactgaagacgaaggttttcttccgagtgacaacatttaccgggacgatttcggctgtaaaagcaccggactcaattgcggctgccgctttacgctgtgaatgtagcgccagttcatcctgcatttcacgggtaattccgtactctttagccacgttttcggcggtaatccccatatgataaccatgggtggcgcacatcaggccatcgcgcaggattacgtcataaacctgtccgtctccaagacgataaccagagcgtgcttttgcatcgagtaagtagggcgctaaactcatattttccataccccccgccacaatgctctgcgcctgacctgcctgaattgcctgggcggcaagcgccacacttttaagacccgaaccacacactttattgaccgtgaatccgcacaccgtttaacagtgcctgacgtgccggattttgccccaacccggcttgcaacacgttacccataatcacttcatcaatgtgtagtgaatcgatttttgcacgttcaatggcggctttaattactgtcgcccccaggtcgatggcgctggtggaagcgagtgaaccgttaaaactaccgatagcagtacgtaccgcactgacgatgacacaatttttcattttatattccttctgtctgtagggttgccgtcagaacagcgttaaaccaatgacgaaaatgacgccggagaagagcagggcagtgatgcaatagcccatgatgtcgcggacaccgagtccggcgattgccagtgctggcagcgcccagaatggttgtgccatgttcatccattgctcgccgtaggcgatcgccattaccgatttaccgagatcagcgcccagcgcctgggctgcgggtatcacgaaaggtccctgaataacccagtgaccgccgccagacggaacggcgaagttaatcagtgcagaactaaaaaaggtcattaccgggaaggtgtctttgttcgcaacattgatgaagaattcggtaatgagtccacccagaccagaatgctccatcatcagttggatcccagcgtagaaggggaattgcaccagaataccggcagtactgcgtgctgccgcgctgatagcacgcatataagccattggcgttttatgtagcaacagacccgcaatcataaacatcaggttgacggtattgatggtgatgttgaagccatgttcgctgaagtacatcgccaggtaagcgataccgagtgcgccgatgatcaacgtcagaatgcggctttcttccagtcgctcggatggtggggcatctttcggtagctgcttttgaaaatcagcctcttccatgagtagtttcggatcgatactcaccacgtcagacggttttggcatcatcatgcgggtgataaatggcatcaccacaatcaacgtcacagtgatgaaaatgttaaaaccactgaacagagtatcgcccaccgggatcagcccggcgatatgctcaaccgggttgcccggtgttgcagccaacagaggcattgatccagagaagccgccaccccaggtgagaaaaccaatgtaggcgcaggcaatgagcaacggataatcagaaccggggactcgccgggcgacttcacgggcaaacattgcgccgacaaccaaaccaaatccccagttgatgacacaagcgactgaaccgaagaaagtgaccagcatgacgccctgtacgggcgtctttgcggcggaggcggcagtacgcagcaaacttttcaccggagcagagctggcaagggcatgaccggtaacgatgataagcgccatctgcataccaaacgccagcaagttccagaaaccgtcaccccacattttcaccatgctgatcggcgtttgtggtgttaaccaaagcgcgatcacgaatgttagcaatgtcagcaacatggcaaagatcagtggatcgggaagccaccggctgacaaaacgcgtcataaaacgcgatatacgaccaatcataaatcaccccgttgcgtattcagatcggcggcgacttcaaaccgagcttctgttttggcacgcacggtggctaaatcacacccgtcggcaatttcggtgagccacattttgccgtcaataaaacgaaagacagccagttcagtaaccagcatatgcaccgcatgttgcgcagtgagtggcatggtgcagcggcgcaaaatttttgctgaaccatctttggcgcaatgttccatggcgatgatcactttgcgcgacccggtcaccagatccatcgcgccacccataccgggcaccattttcccaggcactacccagttcgcgaggtttgcttcttcgtctacttgcaaaccgccgagcacgcaggcatcaatatgaccgccacggattagcgcaaatgacatggcgctatcaaacatggctgcaccgggtaaaacaccgcacggttgcccgccagcgttcaccagatctggatgcgctgtcgtgaccgggcctaaaccgaggaagccgttttccgattgcagagtgatatgaataccctccggtaaataattggcgaccattgtgggtaaaccgatccctaagttaacgatgtcaccatcacgaagctcttgcgccacacggcgcgcaatacgttgtttcgcatccattatttgctctcctgtgaaacgatgatgtggtcgataacggcaccaggggtgacaatatggtcaggttgcagctcgccggtttcgaccagttcatctggctctaccagcgtgatatcagccgcaagggctatcagggggttaaagttgcgggcgctaagttgataggtcaggttgccaagtgtgtcgcaacgatgagcgcgaattagcgccaggtcggcgcgcagtgggcgttcgagcagccaagttttaccgtcgagtgtcagtgtctgtttgccttcctctacgacggtgccgacacccgttggggtgagaaaaccaccaagtccagctccaccacagcgaatttgctcgattagcgtaccttgcggcaccagaacgacgtccatctcaccagatatcatgcgccgacctgtttccgggttggtgccgatatgtgaagcaatcactttgcggactcgaccattgacgatgagcggaccgatgccggtatcaacaaacgcggtatcattggctatcaatgtcaggtcgcgaacaccagattccagtaatgcttcaaccaggcgggatggagtgccaatccccataaatccgcccaccatgatggtcatgccgtcacgaaagaagccggtggcgtcttgtaatgtcatcaattttgttttcattttttatccctcttgcatacaccgttgtgggtacagtcaggcaatagcaaggggagtgccagaatgagattattggatttagttatttaactaattgaatatgaagggataaattggatggggatttataaggagaatgagcggctatgcagaaaattgcgcactgtgcaaatttctgcatagcaagttttggtgttatacatccgccggatcgataccgtattcctggagtttatacatcaatgcacggcgactgatgcccagcattaaagcagtgcgggttcggtttccttcttgttgttccagcacttccataatgatgcgtttttcgacgcgtttaatttcctcttttaaattacgctcaccgacaggggctgtttttacctcgccagcattacagactggctgacgaatctgtggcggaagatcctcagaaaaaatgatcgggcctgaattcatcacgacggcgcgttcaataacgttggaaagctctcgaatatttcccggccatgaccaggcggtaagcagtgacattgccatcggatcgatgtcgataatatcgcgctgattctcactactgaatttttgcaaaaagtgattagctaacagggaaatatcttcccggcgatcgcgcagaggcggcagtattaaatgaataacgttaaggcgataaaagagatcttcacggaaggtaccttcttttaccattgcctgcaagtcgcggttggtggcagcaatgatgcggatatcaacttttatggtctgatggccgccaatccgttcaaattcccgttcctgtagaatgcgtagtaatttggcttgtagtaccagcggcatttcgccaatttcgtcgaggagcagagtaccttcgttggctcgttcaaataatccctgacgcaaggtttgtgcaccagtaaatgcacctttttcatgaccaaacagttcactttcgagcaacgattccggcagcgccgcgcagttgactttaatgaacggcccctttgcccgccgcgaattgtagtgaatcgctctggcaatcaactctttcccggtgccgctttcaccgctaatcaagacgctggcctgagaaagggcaattttggcggtgtctttgcagatgtccatcatcgccgggctgttggtgagaatgtgcccccattgccagctggtgctcagtgcctggtgcagatgacggatctcttttttcattgactggagttgtaaagcgcgctgaacgattaaattcaactcatcgagatcaaacggtttaataacatagtcgaaggctccgcagcgtagcgcttcgacggcggtttccacttccgcataggccgtcatcagaataacgggtgtccgggtctcatggctgcgcatctcctttagtgccttgatgccgtccatctctggcatgcggatatccatcaacaccacatcagggtgaatatcggcaaacaggtgtaatgctgtgcgtccgttgttcgcacaatgtgtttcgaatccttgtagtgcaaaagcggtgctcagcatacggcgaacattatcttcatcatccacaataaggatgcgattaatagcagtcatacagtctgatttccctgcgggttgatcggtaaaataagcgtgaaggttgcgccgtagcccggcaaactggcgacgcgaatatcaccctgatgggcattaatgatgcgttgacttaacgccagaccaagcccggttcctgaggctttggtggtgaaaaagggatcgaagatctttttttgcagcgagagatcaatgccacagccgttgtcctctatcgaaatggcctgttgtgagtcgctgtattgccaggtttgaatgcgaattttccctcgtgcgctgatagcctggacggcattgatcaggatattcagtagtacctgtttgagcagttcacgatcggcgttaatcgggcttaattcattatccagttcgcttatgaagtcgacccgcgcttgtacgccggcggtttgtaccagtaccagagtttcttcaaccaatgcattgaggctgacttgttgccattgactgtggcgtggacgtgaaaattcgagcaattgctgaataactttgttaattgaatcgatttctttgagtactacggacagatattcctgatgtattgggtcactggtttgttggcgcaagatctgtacataaccacgaatagccgttaacggattacgtacttcatgcgcgacgccagccatcagctcacccagtgtggcgaggcgttctgcttgcgccatgcggcgctgggtttctttgcgggcagttaaatcagagaaaatcaccaaagcacctatcatttcaccgtgcgtgttatgaatacgactggtagtgacactgagttcaatggtgcggtcacgacctggaaaactgatctccagcgccacatgttcggtgccatgttccagcgtatccagtactggactgtagaactgagtattgtcgaacaacatggagtaaggctgccctaccagttcatggcgttgatagccagtgataacttctgctgctgggttcatggtggttacatcaccctggcggtcaatggcaatgacgccatcggcagcgttttcaataatcagatcgttaagtgtccgcgtttcacgcagtgcctgggcgaggttattaacactctgactgatttgccccatttcaccgggcaattgtggtaatcgagtgggaatattttgtgccagagtcgagaggccatcggtgatgatatcaatattggcgctcaggcgacgggagaaaaggacaatcaatagcaggcttatcagcaaaccggcggtgagcacaatgataatcctcacatccattttccaggcctggcggcgaatatcttcggttaattcattggcccagatatagccgaggatttcaccattacgctcaatggggagcattgaattcaaaatatcgccgcgcacctgcctgcctgaataaaccaaaggggtatttgtacgcatgacttcgcgaccagggtgatctgcggcaatggtaacgccgacattattctgatatagcgctgaaggcgcgtaggtgattatcgcatccagcattttgttgtaataaccagcaccgatgccagggaaggcgtgagtgatattttcggtaatgggggcaagttctgcatttaatgcgcggatacgctcctcacgtggtaagtcgatgtagagatcatagcgatcgcctagtgcctgattaagcaggttgaccacggcagaaagttttttctctttttcagataagactgctgaacgtccttccgtttctacgatataaccaatagtaagcgttgggacaatgaccatcaggattgccatcaggatcatttgattgcgtaagcggcgtggataaatccacttcatataatgcatgctgaaatccactagtcttgtccggtatatgacgattatcagaggttaaggtgatgatttctcggcggtgtatcatattccagagaagagagaacattgcggtaacacgcttttaccgctaccttaaccacactccatcggtcacctgaggcggagcttcgcccctttgaaataccttgcttcttttcgtacaaccctgaaagcctcgcgctacatgttcagagcattggcgttagtgctctggctgttgattgctttttcatccgttttttacatcgttaatgcgttacatcagcgagaatcggaaattcgtcaggaatttaatctgagttccgatcaggctcagcgctttattcaacgcacctctgatgtgatgaaagagctgaagtacatcgccgaaaatcgcttatcggcagaaaacggtgtgctttccccgcgtggacgagaaacgcaggcggatgtgcctgcgtttgaaccgctgtttgccgactccgattgttccgcaatgagtaacacctggcgaggttctctggagtcattggcgtggtttatgcgctactggcgcgataatttttctgcggcttacgatctaaaccgggtatttttaatcggcagcgataacctctgcatggccaatttcggtctgcgtgatatgccagtggcacgcgataccgcgttgaaagctttgcatgaacgcatcaataaatatcgaaatgcaccacaagatgatagcggcagtaacctctactggatcagcgaaggtccgcgccctggcgtcgggtatttttacgcgttgacgccagtttatctggcgaaccggttgcaggcgcttttgggtgtcgagcagaccatccggatggagaactttttcttaccgggtacgttgccgatgggggttaccattcttgatgaaaatggtcataccctgatttcgcttaccggaccagaaagtaaaattaagggcgatcctcgctggatgcaggaacgctcctggtttggctatacggaagggttccgggagctggtgctgaagaaaaatctgccaccctcatcgctaagcatcgtgtattcggtgccggttgataaggtgctggaacgcattcgcatgttgatccttaacgcaattttgctgaatgtgcttgccggagctgcattgtttactctcgcacggatgtacgagcgacgtattttcattccggcggaaagcgacgccctgcgactggaagaacatgagcagttcaatcgcaagattgtcgcctccgcgccagtgggtatctgcattttgcgtaccgctgatggcgtcaatattttaagtaacgaactggcgcatacctatctcaatatgcttacgcatgaggaccgccaacgactgacgcaaattatctgtgggcagcaggtcaattttgttgatgtcctgaccagcaacaataccaatctgcaaatcagcttcgtccattcgcgctatcgtaatgaaaacgtggccatttgtgtgctggtggatgtttcttcgcgcgtgaagatggaagagtcgttgcaggagatggcacaagcagcggaacaggcgagccagtcaaaatcgatgttccttgccaccgtcagtcatgagctgcgaacgccgctgtatggcattatcggtaacctggatctgttgcaaaccaaagagttaccgaaaggcgtcgatcggctggtgacggcaatgaacaactcttccagcctgttgttgaaaattatcagcgatattctcgatttctcgaagattgaatcggaacagttgaagatcgaaccgcgtgagttttcaccgcgtgaagtgatgaaccacatcaccgccaactatttaccgctggtggtacgcaagcagctaggcttgtactgctttattgaaccggatgtgccagtggccttaaatggcgacccgatgcgtttacagcaggtcatctccaacctgttgagtaacgccataaaattcaccgataccggctgtatagttttgcatgtccgcgctgatggcgattatctctctatccgtgttcgcgataccggcgtggggattccggcgaaagaagtggtgcgcttgtttgatcccttcttccaggtcggaacgggcgtacagcgaaacttccaggggaccggtctgggtctggcgatttgtgaaaaactgatcagcatgatggacggcgatatctcggtagattcagaaccgggaatgggcagccagtttaccgtgcgtattccgttgtacggcgctcagtacccgcagaaaaaaggcgtggaagggttgagtggtaaacgctgctggctggcggtccgcaatgcgtcgctctgtcagttcctggaaaccagtttgcagcgcagcggcatcgtcgttacaacatacgaagggcaggaaccgactcccgaagatgtgttaattactgacgaggtagtgagtaaaaaatggcagggtagagcggtagtgaccttctgtcgtcgccatattggtattccgctggagaaagcgccaggggagtgggtacacagtgtggctgccccgcatgagctaccggcattgttggcgcgtatttatttgatcgagatggagagcgacgatcctgctaacgctctgccgtcgacggacaaagcggtcagcgataatgacgatatgatgattctggtcgtggatgatcatccgattaaccgacgtctgctggcagatcagttgggatcgttgggctatcaatgtaaaaccgcgaatgatggtgtcgatgcgcttaatgtacttagcaagaatcatattgatatcgtgcttagcgacgtcaacatgccaaatatggatggttaccgcttgacgcaacgcattcgtcagttgggactgacgttgccggtaatcggagtaactgctaatgcgttggctgaagagaagcagcggtgtctggagtccggtatggacagctgcctgtcgaagccggtaacgctggatgtgataaaacagacgctgacggtatatgccgagagggtcaggaaatcgcgggaatcgtaggacggataaggtgtttatgccgcatctggcattcagtgcaaatgccagatgcgacgctgacgcgtcttatctggcctactttaatgtaatctgttgaaataatgggaatcgtaggccggataaggcgtttacgctgcatccggcaatcggtgcaaatgccagataagacactaacgcgtcttatctggcctacagatgattagtctttatctgccggacttaaggtcacagaagagagataattcagcagggcgatatcgttctcgacacccagcttcatcatcgcagatttcttctggctactgatggttttaatactgcggttcagctttttagcgatctcggtcaccaggaagccttccgcaaacaggcgcagaacttcactctcttttggcgagagacgcttgtcaccgtaaccaccagcactgattttttccaacaggcgagaaacgctttccggggtaaatttcttccctttctgcagcgcggcgagagctttcggcagatcggtcggtgcaccttgtttcagcacgatcccttcgatatccagatccaataccgcactaagaatcgccgggttgttgttcatagtcagaacaatgatcgacaggcttgggaaatggcgcttgatgtacttgattaaggtaatgccatcgccgtacttatcgccaggcatggagagatcggtaatcaacacatgcgcatccagtttcggcaggttgttgatcagtgctgtagagtcttcaaattcgccgacaacattcacccactcaatttgctcaagtgatttgcgaataccgaacaagactatcggatggtcatcggcaataattacgttcatattgttcatgtaataggctaccttgctacagcaagctcttgacataactgtcaatgtcgctgatgtatttttctattcctggaacatccttctcacgaatcagatgttccagcgtttcacataactgcttgccgggtaccagatttagcatggcaaatacgcctttaagacgatgagccgtttgggctaacgcagcaaagtcactggttgctgcttcagtatacagcctcttaacatcatccggtactgtgtctacaaagagcgcataatagccgctggcatggagttgcgcattttcatctccgcccagaggcgattctgtcacctcttcctgcgccagttgcacttcaattaattgtaagaccgcttcctgcatagcgttgctcatattgaagttgacgcacaattgaccaggcccaatttcccgtacgccagactcatcatcgcttaaaagcaagccagaggcagtaagattagacggattatccgttaaaaagatatcataatcttgactaattaatctttcatcgggtgtgatacaggttgcaccccaattttctaactggcgagtgacaatattccgaatttctgccgaagtaacatccaccattacgcagacatcatccagtaaacgctcttcttcctcttcaacttccgggtcagcggcgagcattttgatatgcacagagtagcgtgtaccaagcccatcccgcgttttgatgtttaaatgaccgcccagtttacgtgccagttgatcgctcagccagaatgccagcgggtccgcctttccataacgatcgttttgggtctggttgataaacgggaagtgcaaattatccatttcatgaatacttacgccttctcccgtgtccagaatgcgaaacgtcaggcggtcttcggaggactcatcctgatcaacctcaagggtgatttttcccaattgcgttgaggtcacggcatattgcatcagtagcagcaaaatacgtcgtaaggcatcgcgatcgccacggcgcatatcgtgtgctttcagatgattgttaatcagcagttgcagacctttacgcttgatggcaggcaacactgaaggcacaacttcatcaattaaatcctgcacggagaacagcaccgtctcacttttccagctatcgtccgcaagcatgttcgctaactgtatttcatcgaccagccgcaccagcacatctgcctgattcgccagttgtttgctttccggggcgttgagtttagccgcgctctccgccagggactgtgcaggttctttcagcgcatcgccaatgtttttcataaaggtcatccggccctgctggtttttctcatacagacgctgcgcctgcttgagtttcttgtttaccagcacttcgcgatcctgatcgcgaatgatgaaaatttgtgtgcgcggcgcgacctggctgcggaacatgcggatctcatacagctcgttattgatcgtcgcctgaataatcccctgatgctgttccgccatggtggtgatgttttgcagattcaaatgcggcagcaaatgatcggcaattttgttacttatgacagtgcggttcgattcctgatcgtgaaccagcaggccgagcggcagcagtgagactatctcttcattgattgcccgtaaaatgcgcaattcgttattgaccgccgtgttgggtagactttctgtactacgactggagaaatggcggaatgtggtatagccaaataacgccagcgccagcaaaccgatgttcagcagcagtggcagcagaatgttttgcaacgtatccagcaataaggtgccataaggaacctgccagaccaggcgcatatcggtagagttgagtgccgaggcgatttcaatcttcgtactgttaaagtggatactgacgctatccgtcccttctttctcattatcattgtttcccgttgccgtcgcgtcttgctcaaggcggaaactgtccagcggcatacccggtgggatcaaatcattaatcggcagatcaaaagccacgaccgttgccagatgtcccggctggttgaacgtggtacgcaaggtaaagtaatgaccgttctgccaggccaggcggcgcatgttagaaaaactttcgcgttcatcgagggcgttggcctgttgcaacatttctgcacgacgtgaatcaacaatgtcactgacggtcgattctttaaatccggaggtgagatctttgaggggcagggttgagatcagcaccagactgttatcctgaccattcaggtaatacattgaccacggtacattttctgcgccccacaatgtgtccagataggtggacatccgttgagtcatctcaagcgttgagttgtcgtgagagccaaagattaacgcttccgttttgcggcgcggtttttccagatagtagacatcctgtttcaggcgcgtctcttgtaaaccttcgccggaggagggggaggtcgtcgcggcaatattgtcgtagatctgccaggtcacgtaacgccaggtatcgacgcgcttttggatagcgtgggtaatgtcgacaatctggtaacttttatctttcagccaggcgttaacggcgctttgtaccattacacccatcgtcaccagtaacacaatgatcaacagtaaaaagaagcgggtaatgctccccggtaggagtgaaaagcgggtcgtggccgttgtctctttctgacgcattcgtgtttatgacctgttaaaacttcgcgaagtgatagggcagtataaagggtacagtgtgaaattccagactcttacctgattgatgattctctattctcccgtgatatttatcatcctgcattgggggaaatagatgtacaagcgccattttgctgtacaaataacctacaaaaagcccaacaaaaataattgcaaataaacaaagattgctggaaattatgctgatgttaattatttgtgaaatagttaacaagcgttatagtttttctgtggtagcacagaataatgaaaagtgtgtaaagaagggtaaaaaaaaccggatgcgaggcatccggttgaaataggggtaaacagacattcagaaatgaatgacggtaataaataaagttaatgatgatagcgggagttattctagttgcgagtgaaggttttgttttgacattcagtgctgtcaaatacttaagaataagttattgattttaaccttgaattattattgcttgatgttaggtgcttatttcgccattccgcaataatcttaaaaagttcccttgcatttacattttgaaacatctatagcgataaatgaaacatcttaaaagttttagtatcatattcgtgttggattattctgcatttttggggagaatggacttgccgactgattaatgagggttaatcagtatgcagtggcataaaaaagcaaataaaggcatataacagagggttaataacatgaaagttaaagtactgtccctcctggtcccagctctgctggtagcaggcgcagcaaacgctgctgaagtttacaacaaagacggcaacaaattagatctgtacggtaaagtagacggcctgcactatttctctgacaacaaagatgtagatggcgaccagacctacatgcgtcttggcttcaaaggtgaaactcaggttactgaccagctgaccggttacggccagtgggaatatcagattcagggcaacagcgctgaaaacgaaaacaactcctggacccgtgtggcattcgcaggtctgaaattccaggatgtaggttctttcgactacggtcgtaactacggcgttgtttacgacgtaacttcctggaccgacgtactgccagaatttggtggcgacacctacggttctgacaacttcatgcagcagcgtggtaacggcttcgcgacctaccgtaacactgacttcttcggtctggttgacggcctgaactttgctgttcagtaccagggtaaaaacggtagcgtaagcggcgaaggcatgaccaacaacggtcgtggtgctctgcgtcagaacggcgacggcgttggcggatctatcacttatgattacgaaggcttcggtatcggtggtgcgatctccagctccaaacgtactgatgatcagaacagcccgctgtacatcggtaacggcgaccgtgctgaaacctacaccggtggtctgaaatacgacgctaacaacatctacctggctgctcagtacacccagacctataacgcaactcgcgtaggttccctgggttgggcgaacaaagcacagaactttgaagctgttgctcagtaccagttcgacttcggtctgcgtccgtctgtagcatacctgcagtctaaaggtaaaaacctgggtaccatcgctggtcgtaactacgacgacgaagatatcctgaaatatgttgatgttggtgctacctactacttcaacaaaaacatgtccacctacgttgactacaaaatcaacctgctggacgacaaccagttcactcgtgacgctggcatcaacactgataacatcgtagctctgggtctggtttaccagttctaatctcgattgatatcgaacaaagggcctgcgggcccttttttcattgttttcagcgtacaaacacagttttttggtgtactcttgcgaccgttcgcatgaggataatcacgtatggaaataagctttacccgcgtggcactgctggctgccgcgctcttttttgttggttgcgatcaaaaaccacaacccgccaaaacccacgctactgaagttaccgttcttgaaggcaaaaccatgggtaccttctggcgtgccagcatcccgggcattgatgccaaacgcagtgccgaacttaaagaaaagattcagacccagctggacgccgacgatcagctgctttcgacctataaaaaagattccgcgctgatgcgctttaacgattcgcaaagtttatcgccgtggccggtaagtgaagcgatggccgatatcgtcaccacctcgctgcgcattggcgcgaagcccgacggcgcgatggatataaccgtcgggccgctggtgaatctgtggggctttggcccggaacaacagccggttcaaattccgagccaggaacagatcgatgcgatgaaagccaaaaccggcttacagcacctgacggtcattaatcagtcgcatcagcaatatctgcaaaaagacctgccggatttaaatgtcgatctctctaccgtcggcgaaggttatgcggcggatcacttggcacgcttgatggagcaggaagggatttcccgctatctggtgtcggtgggcggcgcgctgaacagccgtggtatgaacggtgaaggccagccgtggcgggtagcgattcaaaaaccaaccgataaagaaaacgcggttcaggctgtggtggatatcaacggtcatgggattagcacctctggcagctaccgtaactattacgaactggacggcaaacgtctttcccatgttatcgatccgcaaaccgggcgtcccatcgaacacaatctggtatccgtgacggtgattgctccgacggcgctggaagccgatgcctgggatactggcttgatggtactcgggccggagaaagccaaagaggttgttcgccgggaagggctggcggtttatatgatcaccaaagaaggcgatagctttaaaacctggatgtcaccacagtttaaaagcttccttgtcagcgaaaaaaattaaagcgcaagattgttggtttttgcgtgatggtgaccgggcagactaaaggctatccttaaccagggagctgattatgaaaaaagccacatgcttaactgacgatcaacgctggcaatctgtcttagcccgcgacccgaatgccgacggcgaattcgttttcgccgtgcgtaccacaggcatcttttgccgtccgtcttgccgcgccagacatgctttgcgggaaaacgtctccttctacgcaaatgccagcgaggcactcgccgctggctttcgcccctgcaaacgttgtcagccagaaaaagccaatgcccagcaacatcggttggataaaatcacccacgcgtgtcgactgctggaacaggaaacgcctgtaacgttggaagccttagccgaccaggtggcgatgagtccatttcatctacatcggttgtttaaagcgactaccggaatgacgcctaaagcctggcaacaggcctggcgcgctcgccgtttgcgcgaatcgctggcgaaaggggagagcgtgacgacgtctattcttaacgccggattccccgacagcagcagttactatcgcaaagctgacgaaacgctgggcatgacggctaaacaattccgtcacggtggcgaaaatctggcggtgcgttacgcgctggctgattgtgagctgggtcgttgcctggtggcagaaagcgagcgggggatttgcgcgatattgctgggcgatgatgacgcgacactaatcagcgagttgcagcagatgtttcccgctgccgacaacgcgcctgccgatctgatgtttcagcaacatgtgcgtgaagtgatcgccagcctcaatcaacgcgatacgccgctgacgttaccgctggacattcgcggcactgcttttcagcaacaagtctggcaggcactgcacacgataccttgcggtgaaaccgtcagttatcagcaactggctaacgccatcggcaaaccgaaagcggtacgggccgttgccagcgcctgtgccgccaacaagctggctatcataataccctgtcatcgggtggtccgtggtgatggcacactttccggttaccgctggggcgtgtcgcgtaaagcgcaactgctgcgccgcgaagctgaaaatgaggagaggtaatgttggatctgtttgccgatgctgaaccgtggcaagagccactggcggctggagcggtaattttgcaccgttttgcttttaacgctgcggagcaactaatccgcgatattaatgacgttgccagccagtcgccgtttcgccagatggtcacccccgggggatataccatgtcggtggcgatgaccaactgtgggcatctgggctggacgagccatcggcaaggttatctctattcgcccattgatccgcaaacaaataaaccgtggcccgccatgccacagagttttcataatttatgtcaacgtgcggctacggcggcgggctatccagatttccagccagatgcttgtcttatcaaccgctacgctcctggcgcgaaactgtcgctgcatcaggataaagacgaaccggatctgcgcgcgccaattgtttctgtttctctgggcttacccgcgatttttcaatttggtggcctgaaacgtaatgatccgctcaaacgtttgttgttggaacatggcgatgtggtggtatggggcggtgaatcgcggctgttttatcacggtattcaaccgttgaaagcggggtttcatccactcaccaccgactgccgctacaacctgacattccgtcaggcaggtaaaaaagaataaaaataagaattattattgctgtgcgcgcgaagatgtttaaactgcgggctgtaattcattgtccgggttttctgcatggaacttcttgtacttgtctggcggcagtatcgctggccatttatcagtgtgatggcgctaagcctcgccagtgcggcattaggcattggcttaattgcttttatcaatcagcgccttatcgaaacggcggataccagtctgctggtgttgccggagtttcttggattattactgctgttgatggcagtcactctcggatcgcaactggcgctcaccactttggggcatcacttcgtttaccgactgcgtagtgaatttatcaagcggattctggatacccacgtcgagcgcattgaacaactcggtagcgcctcgttgctggcgggattaaccagcgatgtgcgcaatatcaccattgcttttgtgcgtcttccggaactggtgcaggggatcattctcactatcggttccgcggcgtatctgtggatgctgtcgggcaaaatgttgctggtaacggctatctggatggcgatcaccatctggggtggttttgtactggtggcgcgggtgtacaaacatatggcgaccctgcgtgaaaccgaagacaagctgtacacggattttcaaaccgtactcgaagggcgcaaagagctgactctgaaccgggaacgcgccgagtatgtgtttaacaacctctacatccccgatgcgcaagagtatcgccatcatattattcgcgcagacaccttccatcttagcgccgtgaactggtcaaacatcatgatgctgggcgctatcggcctggtgttctggatggcgaacagtctcggttgggctgataccaacgttgctgcgacctattcgttgacgctgttattcctgcgtacgccgctgctttcggcggttggcgcattgccgactctgctgacggcgcaggtggcgtttaacaagctgaacaaattcgcgctcgcgcctttcaaagctgagtttccgcgcccgcaggcttttcccaactggcaaacgctggagctgcgtaacgtgacgtttagctatcaggataacgcgttttccgttgggccgattaacctcaccattaaacgtggcgagctgctgtttctgattggtggcaacggtagtggaaaatcgacgctggcgatgttgctgacgggcttgtaccagccacaaagcggcgaaatcttgctggatggcaaacctgtcagtggcgaacaaccggaagattatcgcaaactgttttcggcagtgtttaccgatgtctggctgtttgatcaactgctggggccggagggtaaacccgctaacccgcaactggttgagaagtggctggcgcagctgaaaatggctcataagcttgagttaagcaacgggcgtattgttaacctgaagttatcaaaagggcagaaaaaacgcgtggcgctgttgctggcgctggcagaagaacgcgatattatcctgctggatgaatgggcggcggatcaggatccacacttccgtcgtgagttttatcaggtgttgctgccgctgatgcaggagatgggtaaaactattttcgctatcagtcatgatgatcattactttatccacgccgaccgcctgctggaaatgcgcaatgggcaacttagcgagctgacgggcgaagagcgcgatgccgcttcgcgtgatgccgttgcccggacggcataatattacgacgctgacctggcggactgctgccgtcaggtcaatatgctaaaaatcccttcatttctaataaccctataattaatcaacgaaattataatgtttctaaaattagaatataatttataaacattatttaaatgttgttacttaagtgttaccgttgatgccgcgcaaatctcacctgcaataaagcgactaaaagtaaggcattaacaagatgaaaaaagtgactgccatgctcttctcgatggccgtggggcttaatgccgtttcgatggcggcaaaagcgaaagcgtctgaggagcaggaaactgatgtactgttgattggcggcggcattatgagcgccacgttggggacctatttacgcgagctggagcctgaatggtcgatgaccatggtggagcgcctggagggtgtcgcgcaggagagttcgaacggctggaataacgccggaaccgggcattctgcactgatggaactgaactacaccccgcaaaacgccgatggcagcatcagtattgaaaaagcagtcgccattaacgaagcatttcagatttcccgccagttctgggcgcaccaggttgagcgcggcgtgctgcgtactccgcgttcatttatcaataccgttccgcatatgagctttgtctggggcgaggataacgttaatttcctgcgcgcccgttacgccgcgttgcaacaaagctcgctgtttcgcggtatgcgttactctgaagatcacgcgcagatcaaagagtgggcaccgttagtgatggaagggcgcgatccgcaacagaaagtggcagccacgcgtacggaaattggtaccgatgtgaactacggcgagatcacccgccagttaattgcttccttgcagaagaaatctaacttctcgctgcaactcagcagcgaagtccgcgccctaaagcgtaatgacgataacacctggaccgttaccgttgccgatctgaaaaatggcactgcacagaacattcgtgccaaatttgtctttatcggcgcgggcggtgcggcgctgaagctgttacaggaatcggggattccggaagcgaaagactacgccggtttcccggtgggcggacagttccttgtttcggaaaacccggacgtggttaatcaccatctggcgaaggtttacggtaaagcatccgttggcgcaccaccgatgtcggttccgcatatcgatacccgcgttctggacggtaaacgcgtagtgctgtttgggccatttgccaccttctcaaccaaattcctcaaaaacggttcattgtgggatctgatgagttccaccaccacctctaacgtgatgccgatgatgcacgtcgggctggataatttcgatctggtgaaatatctggtgagtcaggtgatgttgagtgaagaggatcgttttgaagcgttgaaagagtactatccgcaggcgaaaaaagaggactggcgtttgtggcaagcggggcagcgcgtgcagattatcaagcgtgatgccgagaaaggtggcgtactgcgtctgggtactgaagtcgtcagtgaccagcaagggaccattgccgcgctcctgggggcatcgccaggggcgtcaaccgccgcgccgattatgttggatctgctggcaaacgtatttggcgatcgcgtttccagcccgcaatggcaggctacgttgaaagcgatcgttccgtcttatggacgcaagctgaacggtgatgtagcggcaacagaacgcgagttgcagtacaccagcgaagtgctggggctgaaatacgacaagccgcaggcagcagatagtacgccgaaaccgcagttgaaaccgaaacccgttcaaaaagaagtggcggatattgcgttgtaatgatgtgccacatccggcatggtatgccggggatgtggcgtatgctgataagacgcgccagcgtcttatcaggcaaccggctcgggcgttagatgtcggatgcggcgtaaccgccttatccaatctacggggtgcagcacttcacagcggtgtaggcctgataagacgcgccagcgtcgcatcaggcaaccggcttgggcgttagatgtcggatgcggcgtaaccgccttatccaacctacggggtggagcacttcacagcggtgtaggcctgataagacgcgccagcgtcgcatcaggcaaccggcttgggcgttagatgtcggatgcggcgtaaccgccttatccgacctacggggtggagcacttcacagcggtgtaggcctgataagacgcgccagcgtcgcatcaggcaaccggctcgggcgttggatgtcggatgcggcgtgaccgccttgtctgacctacggggtgccgcacttcacggcagtttagcgaactaccgcgttgtcaattttctcttccgccttccagacgcggtacttcacatctacattgtctggcgtatacaccacgatcggcagcttgctgttgtaacgcagcattccagcatcgcccagatacgcggtgacaaatttcttctctttcttgccatccgggcaggccatcatcgtggaaaccggcgagctaactttatcaaagacataataatcatagccccagccttccagcgttttgctttccagcttcccgccgagacgatgcaaattgcaatcgacttccagcgtctgaccgattaacagttctactttcagggtagattcatcttcttgcggggttaactgaatcacctgacgcttcatccctttttcagcttgtggataaggcgcgattttttccagtggctggacgctttctgccgcccaggcggaagtggtagcgaaagcggcaaacaatactgcaggtagaatggtcttcatttttttgctttccttcttcatttataggttttcaccgatgatgtcgctgaaggttaacatattcatcagatttatgaatttgctttataaataacttaaagacaattcaaagaattttacctgcttttttggtgttaaattcggatgagagagcaaaccagcagaaatatctctggtaaattagccgcaatataaatatgttaataactatttgatatgtgagcaagagcccgttttgacagcgctccccgccactcttttgatcctgctacaggttttaccccgatcggggtatgcatctttgacacatcctttaatatcttagcggctataaaaatggcttattaattatgcggtttatttggtcgctctcaattttcagagcgcgttaatgatggaaggtcaatgtgaagattgatgcatcccgtcggggcatactcactggtcgctggcgcaaagccagtaacggtatccgtccgccctggtccggtgatgaatctcattttctgacccattgcacccgttgcgacgcctgtattaatgcttgtgaaaacaacattctgcaacgcggcgcgggcggctatccgagcgttaatttcaaaaataacgagtgcagcttctgttacgcctgcgcgcaggcttgccccgaatcgctattttctccgcgccacaccagggcctgggatttgcagttcaccattggggacgcgtgcctggcgtatcagtcagttgaatgccgccgctgtcaggatagctgtgagccaatggcaattatctttcgcccgacgctctccggaatctaccagccgcaacttaatagccaactttgcaacggatgtggagcatgtgcagccagctgtccggtatcagccataactgcggagtatctccatgcacactaactggcaagtttgcagcctggtcgtgcaggccaaaagcgaacgaatttcagacatcagcacccaactgaacgcctttcccggctgtgaagttgctgtcagcgatgcgccgagcggtcagttgattgtggtggtggnnnnnnnnnngaaacgctgatccaaaccattgagtcagtacgcaacgtagagggcgtgctggcggtgtcgctggtttatcaccagcaggaagagcaaggtgaggaaacaccatgaaactcagtcgtcgtagctttatgaaagctaacgccgttgcggccgctgcggcggctgccggtctcagcgtgccgggcgttgcccgcgccgttgttggtcagcaggaagccattaaatgggataaagcgccgtgccgtttctgcggtactggttgcggcgttctggtcggaacgcagcaggggcgtgtggtggcctgtcagggcgacccggacgcaccggttaaccgtggcctgaactgcattaagggctatttcctgcccaagatcatgtacggtaaagaccgtttgacgcagccgctgctgcgtatgaaaaacggtaaatatgacaaagaaggcgaatttaccccaatcacctgggatcaggccttcgatgtgatggaagagaaattcaaaaccgccctgaaagaaaaaggaccggaatcgatcggtatgttcggttctggtcagtggactatctgggaaggttatgccgcgtccaagctgttcaaagcgggcttccgttcgaacaacatcgacccgaacgcacgtcactgtatggcgtcggcagtagttggctttatgcgtacctttggtatggatgagccgatgggctgctatgacgacatcgagcaggctgacgcgtttgtgctgtggggcgctaacatggcggagatgcacccgatcctctggtcacgcatcactaaccgtcgtctctctaaccagaacgtcaccgtggcggtgctttctacctaccagcatcgtagcttcgagctggcggataacggcatcatctttacgccgcaatctgacctggtgatcctgaactacatcgccaactatatcattcaaaacaatgcgataaatcaggacttcttcagcaagcacgttaacctgcgcaaaggggcgacggacatcggctacggtttacgtccgacccatccgctggaaaaagcagcgaagaatccgggttctgacgcctccgaaccgatgagctttgaagattacaaagccttcgttgccgagtatacgctggaaaaaactgccgaaatgaccggcgtgccgaaagaccagttagaacaactggcgcagctgtatgccgatccgaacaagaaagtcatctcctactggacgatgggcttcaaccagcatactcgtggcgtgtgggccaacaacctggtctacaacctgcacctgctgaccggcaaaatttcccagccgggttgcggtccgttctccctgaccgggcagccttccgcgtgtggtactgcgcgtgaagtgggcacctttgctcaccgtctgcctgcggacatggtggtgactaacgagaaacatcgtgatatctgcgagaagaagtggaatatcccgagcggcaccattccggcgaaaatcggtctgcatgcggtagcacaagaccgtgcgctgaaagacggcaagctgaatgtttactggaccatgtgtaccaacaacatgcaggccgggccgaacatcaatgaagagcgtatgccgggctggcgcgatccgcgcaacttcatcatcgtctccgatccgtatccgacagccagtgcgctggccgccgacttgatcctgccgaccgcaatgtgggtagagaaagagggcgcttacggtaacgccgaacgccgtactcagttctggcgtcagcaggtacaggcaccgggcgaagcgaaatcggatctctggcagttagtccagttctcccgccgcttcaaaactgaagaagtatggccggaagagctgctggcgaagaaaccggaactgcgtggcaaaacgctgtacgaagttctgtatgccacccccgaagtgagcaaattcccggtatccgaactggcggaagatcagctgaacgatgaatcccgcgagctgggcttctatctgcaaaaagggctgttcgaagagtacgcatggtttggtcgcggtcacggtcacgatctggcaccgttcgatgactaccacaaagcgcgcggtctgcgctggccggtggtgaacggtaaagaaacgcagtggcgttacagcgaaggtaacgacccgtacgtgaaagcgggcgaaggctacaagttctacggtaaaccggatggcaaagcggtgatcttcgcgctgccgttcgaaccggcggcggaagcaccggatgaagagtacgacctgtggctctctaccggacgcgtcctggagcactggcacaccggcagtatgactcgccgtgtgccggaactgcaccgcgccttcccggaagcggtcttgtttattcacccgctggatgcgaaagcgcgcgatctgcgccgtggcgacaaagtgaaagtggtttctcgccgtggcgaagtgatctcgattgttgaaacgcgcggtcgtaaccgtccgccacagggcctggtgtacatgccgttcttcgacgccgcacagctggttaacaaactgacgctggatgcgaccgatccgctctcgaaagagacggacttcaagaagtgcgcggtcaaactggagaaggtgtaagccattatgtcccggtcagcgaaacctcaaaatggtcgccgccgctttctgcgcgatgttgttcgcacagcaggcgggctggctgccgtgggtgtggcgctggggttacaacagcaaaccgcacgcgcatctggcgtgcggttgcgcccgcccggagccataaacgagaacgcctttgccagtgcctgtgtgcgttgcggtcagtgtgttcaggcttgcccttacgacaccttaaaactggcgacgctggcctctggtctgtcggcgggcacgccatattttgtcgcacgggatattccttgcgaaatgtgtgaggacattccgtgcgccaaagtgtgcccaagcggtgcgctggatcgtgagattgaatcgatcgacgacgcgcggatggggctggcggtactggtggaccaggaaaactgtctcaactttcaggggctgcgctgcgatgtttgttatcgcgaatgcccgaaaattgatgaggccatcaccctggagctggagcgcaacacgcgtaccggtaagcacgcccgctttctgccgacggttcacagcgacgcctgtaccggttgcggtaagtgcgaaaaagtatgcgtgctggaacaaccggcaatcaaggtgttaccgctgtcactggcgaaaggggagttaggtcaccattaccgcttcggctggctggaggggaacaatggcaaatcgtaaacgtgacgccgggcgcgaggcgctggagaaaaaaggctggtggcgcagtcaccgttggctggtgttacgtcgcctttgtcagttcttcgtgctggggatgtttttgagcggtccatggtttggtgtgtggatcttgcacggcaactacagcagtagcctgttattcgacaccgttccgctgaccgatccgctgatgacgctgcaaagtcttgccagtggtcatctgcctgccacggtggcgttgaccggcgcggtgattatcaccgtgctctacgccctggcgggaaagcgattattttgcagctgggtctgcccgctgaacccgattaccgacttagcgaactggttacgcaggcgctttgacctcaatcagtctgcgacgatccctcgccacattcgctacgtgctgttggtggtcattctggtgggatcagccttaactggcacgctcatttgggaatggatcaaccccgtttctctgatggnnnnnnnnnntagcctggtaatgggcttcggcagcggcgcgctgcttattctcgcgctgtttttatttgatctactggtcgttgaacacggctggtgcgggcacatttgtccggttggcgcgctgtatggcgtgctgggtagcaaaggtgtgattaccgttgcggccaccgatcggcagaaatgtaaccgctgtatggattgttttcatgtttgcccggaaccgcatgtgctacgtgccccggtgctggatgaacaaagcccggtgcaggtcaccagccgcgattgcatgacgtgcggtcgctgcgtggatgtctgttctgaggatgtatttacaataactacacgatggagttcgggagcgaaatcatgaaaagccatgacctgaagaaagcgctgtgtcaatggacggcgatgctggccttggtggtaagcggcgcggtttgggcggctaatggcgtcgattttagccagtcgccggaagtatccgggacacaggaaggggccattcggatgccaaaagagcaggaacggatgccgctgaactatgtgaatcagccgccaatgatcccgcatagcgttgaaggttatcaggtaacgaccaataccaaccgctgcttgcagtgccacggtgtcgaaagctatcgcaccactggcgcgccgcgtatcagtcctactcactttatggacagcgacggcaaagtgggcgcggaagtggctccgcgtcgttatttctgtctgcaatgtcacgtaccgcaggccgataccgcgccaatcgtggggaatacctttaccccatcaaaaggttacgggaaataagaggttattatgggaaattctgaccgtaagcctggtctgattaagcgcctgtggaaatggtggcgtacccccagccgtctggcgctggggacgctgctgttgatcggttttgttggcggcatcgtcttctggggtggctttaacaccgggatggaaaaagccaataccgaagagttctgcattagctgccacgaaatgcgcaacacggtgtatcaggaatacatggattccgtgcactacaacaaccgtagcggcgtccgtgcgacctgtccggattgtcacgttccgcacgagtttgtgccgaagatgatacgcaagctcaaagcaagtaaagagctgtatggtaaaatttttggcgttattgacacgccgcagaaatttgaagctcatcgtctgacgatggcacagaatgagtggcggcgcatgaaggacaataactcgcaggagtgccgtaactgtcacaacttcgagtatatggatacaaccgcccagaaatcggttgccgcgaagatgcatgaccaggcggtgaaagatgggcaaacctgtattgattgccataaagggatagcgcacaagctgcccgatatgcgtgaagtcgagccaggtttttaacagggttattgcgtgggtatgcttgaagccagagagttactttgtgagcgggatgaacgaaccttatttagtggcttgtcatttacgctgaacgcaggagagtgggtacaaatcaccggtagcaacggcgcggggaagacaacgcttctccgtttgctgacggggttgtctcgccctgacgcaggcgaggttctctggcaagggcagcccttgcatcaggtacgcgacagctaccatcaaaacctgttatggataggccatcagccggggatcaaaacccggctgacggcgttagaaaatctgcacttttatcatcgcgatggcgataccgcacaatgtctggaagccctggcgcaggccgggcttgccggattcgaagatattcctgtaaatcagctctcggccgggcaacaacgccgcgtcgctttagcgcgtctgtggctgacccgtgccacgttatggatcctcgacgagccttttaccgcgattgacgttaacggcgtcgatcgtctgacccagcgtatggcgcagcatacggagcagggggggattgtgattctgactacccaccagccgctcaacgttgctgaaagtaaaattcgccgcatttcactgacgcaaacgagggccgcatgatgttctggcgcattttccgtcttgagctgcgtgtagcgtttcgccatagcgccgaaatcgccaacccgctgtggttcttcctgattgtaattaccctttttccgctcagtatcggtccggagccgcaactgctggcgcgtattgcaccgggcattatctgggttgctgcgctgctttcatccttgctggcgctggaacgactgttccgtgacgatttgcaggacggcagtcttgaacaattgatgttgttgccgttacccttgcccgccgttgtgctggcgaaggtgatggcgcactggatggtaaccggtctgccgttactcatcctttcgccactggtagcaatgctactgggaatggatgtttatggctggcaagtgatggcgctgacgctgctgctgggaacgcctacgcttggctttctcggtgcaccgggtgtggcgttgacagtgggacttaagcgcggtggtgtgctgctcagcatactggtgttaccgctgactatcccattactcatctttgccaccgccgcgatggacgcggcttccatgcatttgcccgttgacgggtatctggcaattttaggcgcgttgctggcaggcaccgcgacattaagtccttttgcgacggcggcagcgttacgaatcagcattcaataacgctggattactgatttttgttcgagtctggtatcgaaactatgtggaaaacactgcatcaactggcgatcccaccacggctgtatcaaatctgtggctggtttataccgtggctggcaattgccagtgtggtcgtgcttaccgtcggctggatctggggattcggctttgctccggctgattatcagcagggaaatagctaccgcattatctacctgcatgtgcctgcggcgatctggtcgatgggcatttatgcatcaatggcggtggcggcgtttattggccttgtctggcagatgaaaatggccaacctggcggtggcggcgatggcccccattggtgccgtgtttacctttattgccctggttaccggctctgcatggggaaaaccgatgtggggcacctggtgggtatgggatgcacgtctgacttctgaactggtgctgctgtttttgtatgtgggtgtgattgccctgtggcacgccttcgacgaccgccgtctggcgggccgtgcggcaggtattctggtgctgattggcgtggtgaatctgccgattattcattactccgtggagtggtggaacaccctgcatcagggatcaacgcggatgcagcaaagtatcgatccggcgatgcgttcgccgctgcgctggtcgatttttggcttcctgctactgtctgccacgctgacgctgatgcggatgcgtaatttgattttgctgatggaaaaacgccgtccgtgggtgagtgaactgatactgaaaagaggccgtaaatgacccctgcatttgcttcctggaatgaatttttcgcaatgggcggttacgccttttttgtctggctggcggtggtgatgaccgttattccgctggtggttttggtcgtgcactcggtgatgcaacatcgcgcaattctgcgtggcgtggcgcaacagcgggcgcgtgaggcgcgtttacgtgctgcgcaacagcaggaggctgcatgaatattcgccgtaaaaaccgcttgtggattgcctgtgccgtgttggcagggctggcgctgactatcggtctggtgctatatgcgctgcgctcgaatatcgatctcttttatacgccgggggaaattctctacggcaagcgtgaaactcagcaaatgccggaagtcggtcagcgtctgcgcgttggcgggatggtgatgccgggtagtgtgcagcgcgatcccaattcgctgaaagtgaccttcaccatttacgacgctgaaggctcagtggatgtctcttacgaaggcattttgccggatctgttccgtgaagggcagggcgttgtggtgcagggcgagctggaaaaaggcaatcatatcctcgcaaaagaagtgctggcgaaacacgacgaaaactacacgccgccagaagttgagaaagcgatggaagctaaccaccgtcgcccggcgagtgtttataaggacccagcatcatgatgccggaaattggaaacgggctgctgtgcctggcgttagggattgcgctgctgctgtccgtgtatccgctatggggcgtggcgcgcggagatgcgcgcatgatggcgtcttcccgcttgtttgcctggctgctgtttatgtctgtggctggcgcatttctggtgctggtcaatgctttcgtggtcaacgactttaccgtcacctatgttgccagcaactccaatacccagcttccggtgtggtatcgcgtggcggcgacctggggcgcacatgaaggctcactgctgctgtgggtgctgctgatgagcggctggacctttgcggtggcgatttttagtcagcgtattccgctggatattgtggcccgcgtactggcgataatggggatggtcagcgtcggctttttgctgttcattctctttacctctaacccattctcacgcacgctgccgaacttcccgattgaagggcgcgatcttaacccgctgttacaggatccggggctgatcttccatccgcctctgctctatatggggtacgtgggtttctcggtggcgtttgcttttgccattgcttctttgctgagcgggcgtctggacagcacttatgcgcgttttactcgcccgtggacgctggcggcgtggattttcctgacgctcggcattgtgctcggttccgcatgggcctattacgaactcggctggggtggctggtggttctgggatccggtagaaaacgcctcgtttatgccgtggctggtggggactgcgctgatgcactcactggcggtcactgaacaacgcgccagcttcaaagcgtggacattattgctggcaatcagtgccttctcgttgtgtctgttggggactttcctcgtgcgttccggcgtgctggtatcggtacacgcgtttgcgtctgatccggcgcgcggtatgtttatcctcgcctttatggtgctggtgattggcggttcgctgctgctgtttgccgcgcgtggacacaaagttcgctcacgcgtaaacaatgcgctgtggtcgcgggaatctctgctgttagcgaacaacgttttgctggtcgccgcgatgctggtggtgttgctggggacgctgctgccgctggtgcacaagcaactgggactgggcagtatttcgattggcgaaccgttcttcaacaccatgtttacctggctgatggtgccgtttgcgctactgctgggtgtcggtcctctggtgcgctgggggcgcgatcgcccacgtaaaatccgcaatttattgattatcgccttcatctctacgctggtgctgtctctgctgttgccgtggctgttcgaaagcaaagtggtggcgatgacggtgctcggcctggcaatggcctgctggattgcggtgctggcaattgcggaagctgcgctacgtatttcacgcggcacgaaaaccaccttcagttattgggggatggtggcggctcacctggggctggcagtgacaattgttggcattgcctttagccagaattatagcgttgagcgtgatgtgcgcatgaagtccggcgatagcgtcgatattcatgaatatcgcttcaccttccgtgatgtcaaagaggtgactggcccgaactggcgcggcggtgtggcgactattggcgtaacgcgagagggtaaaccggaaacggtgctgtatgcggaaaaacgttattacaacactgccgggtcgatgatgaccgaagcggcaattgacggcggcatcacgcgtgacctgtacgccgcgctcggtgaagagctggaaaacggcgcgtgggccgtgcgtctttactacaaaccatttgttcgctggatttgggcgggcgggctgatgatggcgttgggcggactactgtgtctgtttgatcctcgctatcgtaagcgcgtgagtccgcaaaaaactgcgccggaggccgtatgaagcgcaaagtattgttaattccgttgattatcttcctggcgattgccgcggcgctgctgtggcagctggcgcgtaatgccgaaggggatgatccgaccaatctggaatcggcgctcattggcaagcctgtgccgaagtttcgtctcgaatcactggacaatccggggcagttttatcaggcggatgtgctgactcagggcaaaccagtactgcttaacgtctgggcgacctggtgtccgacctgccgtgcggaacatcaatatctgaatcagctttcagcgcagggcattcgcgtggtcggcatgaactataaagacgatcgccagaaggcaatcagctggctgaaagagctgggcaatccttacgcgctaagcctgtttgatggcgacggcatgttagggctggatctcggtgtctatggcgcgccagaaacgttccttattgacggcaacggcatcattcgctatcgccatgcgggcgatctgaatcctcgcgtctgggaagaagagatcaagccgctgtgggagaaatacagtaaggaggccgcacaatgaggtttttattgggcgtgctgatgctgatgatctccggctcagcgctggcgaccatcgacgtgttgcagtttaaagatgaagcacaggaacaacagttccgtcagctcactgaagaactgcgctgcccgaaatgccagaacaacagcattgccgattccaactcgatgattgccaccgacctgcgccagaaagtgtatgaactgatgcaggaaggtaaaagtaaaaaagagattgtcgattatatggtggcgcgttacggcaacttcgtcacttacgatccgccgttaacgccgctgaccgtgctgctgtgggtgcttccggtagtggctattggcattggcggttgggtcatttacgcccgttcgcggcgtcgggtacgcgtggtgccggaagcgtttcctgaacaaagcgtgccggaaggtaagcgtgccggatatgttgtttatctgccgggtattgtggtggcgctaattgtggctggcgtcagctactaccagactggcaattatcagcaggtgaaaatctggcagcaggccacggcacaggctccggcgttgctggacagggcgctggatccgaaagccgatccgctcaacgaagaagagatgtcgcgccttgcgctggggatgcgtactcaactgcaaaaaaatccgggtgatatagaaggctggattatgttgggccgcgttggcatggcgctgggtaacgccagtatcgccaccgatgcatacgccactgcgtatcgcctcgatccgaagaacagcgatgctgcactgggatacgctgaagcgttgacacgttcatctgatcccaacgacaaccgtctcggcggcgaactgctgcgccagttggtgagaacggaccatagcaatattcgtgtgttaagcatgtatgcgtttaacgcctttgagcagcagcgatttggcgaagccgttgccgcgtgggagatgatgttgaaactcttacctgccaacgatactcgccgtgcggtgattgaacgtagtatcgcgcaggcgatgcaacatttgtcgccgcaggagagtaaataaaaagaggcccgatggtgatgccatcgggctatttttattgtgccccgcgttgttgcaggaacagaatggtggccgccacgcgtgagcggacattgagtttacgcagcagattgcgaatatgtacttttactgtctgctcggaaatattcaacaccgaggcaatctgtttatttgacagcccctgtgccagctcgtgcagaacatccagctcgcgctccgtcagcacgctgaagggatcttcttccgcgccaaacatttcacgttcacgtaagtactgattgacgcgttcgctaaagactttgctgcctttcgctccggcacgaatcgcttccagcaatacttccgggtcgctgtctttcaacagataaccgtctgcgcctgcgtctatcagcgcaaagacatcgctggaggcatcggatacggtcaggataataatttgcgcggtaacgccatccctgcgcaaggcattgagggtatccaggccactcatacctttcatattgagatccagcaagatcacgtcgatatccagtctattcgccagatcgatcgcgctcgcgccgtcgcccgcttcggcgaccacttcaaagccaggatcaagctccagtaactgacgaacaccgcgtcgcataagtggatgatcatccacaatcatcacctgaaaaggcgttgcttcaggcatagtagtctcctgaggttttattagaatcattatgtttgagcgtagcgttggtaacgctaccaggcgcgtgaatgttaccccattttatgtatggacatgtagtgaaaactacaaccttgtcgttcgctttggcatcattttcattataaagacggaattttgcatcagcttctcatcaagaaaaacaactaaaaaatcaatcacaatacttgtgcatttctttaaacagtttttaaaaactgactccgggtatggagctatgggtattttctgtacccaatgcttttaactgcaattaatttcataggatgaaagctcaatgcatcaatctggttctgtttctctttgtcgttccgcaatatctgttctggtggctacagcgttatattcacccatagcattggcatcaacagttgagtatggtgagacagttgatggtgttgtcctggaaaaagatatccagctggtttatgggaccgccaataatacgaaaatcaatcctggcggagaacagcatattaaagaatttggtataagtagtaatactgaaattaacggcgggtatcagtacattgaaatgaatggcaccgcagaatactcagtattaaatgacggttatcaaattgttcaaatgggtggcgcggcaaaccagactaccctcaataatggtgtgctacaggtttatggcgcagcgaatgatcccacgattaaaggcgggcgcttaatcgttgaaaaagatgggattaccgtccttgccgctatcgaaaagggaggattactggaggttaaagaggggggattagcgattgcggtagatcagaaagcaggcggaaaattaattgtctcaacgaatgcgctggaagtgagtggtacaaacagtaaaggtcaatttagtataaaagatggtgtgtcaaaaaattatgaactggatgatggttccgggctcattgttatggaggacacgcaggccattgatactatccttgatgagcatgccactatgcaatcgctgggaaaggatactgggacgagagtgcaggcaaatgcggtgtatgatctcggtcgatcagatcagaatggaagtatcacgtattcctcaaaagccatctctgaaaatatggttatcaacaatggccgcgctaacgtctgggctggcacaatggttaacgtttcagtcagagggaatgatggcattcttgaggtcatgaagccgcaaataaattatgcacccgcaatgttggtgggtaaggtagtggtttctgagggcgcttcttttagaacgcatggtgccgtggataccagcaaagcggacgtttcgctcgaaaatagcgtatggaccatcattgccgatatcactacgacgaaccaaaacaccctcctcaacttagccaaccttgcgatgtctgacgcaaatgtgattatgatggatgagccagtgactcgttcatcagtgacggcaagtgcggaaaatttcattacgttgaccaccaataccctgtcgggaaacggcaatttttatatgcgtaccgatatggctaatcatcagagcgatcagctcaacgtcaccggtcaggcaacaggtgatttcaaaatattcgtgacggacaccggtgccagcccggcagcaggagatagccttacactggtaacaacgggcggcggtgatgctgcatttacgttgggcaatgctggaggcgttgttgatatcggtacgtatgaatataccttgctggataatggcaaccatagctggagtttggcagagaatcgcgcgcaaattaccccttcaaccactgatgtgctgaatatggcggccgcacaaccgctggtatttgatgcagaactggacaccgtgcgtgagcgtcttggtagcgtaaaaggcgttagttacgatacggcgatgtggagttcggcaattaacacccgcaacaacgtgaccactgatgcgggagctggttttgagcaaacattgacgggcctgacgctcggtatcgatagccgtttctcccgtgaagaaagcagtacaattcgcggcttgttctttggttactctcattctgatattggttttgatcgcggcggaaaaggtaatatcgatagctataccctgggggcttatgccggttgggagcatcagaacggtgcctatgttgatggggtggtgaaagttgaccgttttgccaacaccatccatggcaagatgagtaatggggcaacagcgtttggcgattacaatagtaacggcgcgggtgctcatgttgagagcgggttccgttgggttgacggattgtggagtgttagaccctatctggcctttaccggctttaccacagatggtcaggactacacgttatcaaacggcatgcgcgctgatgtgggaaatacccggatattacgcgctgaagcgggaacggcggtaagctatcacatggacctgcaaaatggtacgacgctggaaccctggctgaaagccgccgtacgtcaggaatacgccgattctaaccaggtgaaagttaatgacgatggcaaatttaataatgatgtggctggagcccgtggcgtttatcaggctgggataaggtcatcgtttaccccgacgttaagcggtcatttgtcagtcagctatggcaatggcgcaggggtagaatcgccgtggaatactcaggcgggtgtggtctggacgttctgataacagaaaataaacaggctgtgatgtgtcacggtctgtttatcgaattaattgcagatataaaaaaaccaaccgtaatggttggttttttttgggatttttggtcggcacgagaggatttgaacctccgacccccgacaccccatgacggtgcgctaccaggctgcgctacgtgccgactcgtggctgctaatactaccgttttccacaccgattgcaagtaagatatttcgctaactgatttataattaatcagttagcgataaaacgcttctcgtctgtcagcacttgcaataacaaacttaactgtggtttttcatctttcactctttcaccacgtaagttgtaagtgcggtatttaccgttattgttcagcaccagcgtctttttcggggtggtaattgccagcgtatcgttatccgctgcggtaacccagtaatgacggcgttgagggttgaacaaatcctgaccttgcgaatattcgctggcaggtgtgctgacatgtagcaggcgttgcatcagcgtcgtcatcagatcggtatgatcagtcagagcattaatacgctgcgccggcgtgcctggccagtgaatcactaatggcacctgcagatgaccgtgggaccagtcaaaggtttcttcctcttcgctcagtggaataccccgaccggcagtgataatcaccaccgtattgtccagtttgccagaatcacgcagtgcattgagcacgcggttgatctggtcatcgacattgcctgccgcccggctatatttccgtgcaaatgcctgctgattgctgtcgtcaatgttagtaccattgaaagaaacccacgagaaccagcggttatcttcttgtgcgtagcgtcccagccagttgatccactgcgtggcggtctgctcgtcggattgggtgcgtacgctcggcatcgagaaatctgacaacaatgcctggcgatacnnnnnnnnnntggtaaagccatctgatgagaataaccccagctgatagccttgctgattaagcgcagtaattaatgccgcaggcgtacgggtcgacagaatgccgtccatatagctcggcgagatgccatagaacaggccaaagatgccgttgtctgtagtgttgccggagctcatatggcgcgtgaacgaaatattttgctcagcaaaacctgccagcgcaggcatctgcttctcgaagcgtgagtagttcaggccatcgacagtaatcaacaagacattctgcccggtgcccatatcgcgatagcgcagttcgcttaacggatactgaacggaaacggcgtctggattaccttgctcaataagacggcgttgatactcctgcgcatcaagcaggccatgcttctcaagaaaacgtcgcgccgtcatcgggtacgaaagcggcaggttagcgcgctgcatggtgatcgggcgatagaagttggcatcggcccagatatacaccacatgcgaggcgataaaggcgataaataagaatgcggccagcgggcgcgcgaagcgtcgacgacgcgtcaggctgcgcagcttttgccagctccacgtcgcaaacaccagttcaagcaataaaataaccggcacgctgatgaacatcagctgccagtcgcgcgccatctcattttcgtctgggttgataaccaactgccagacgatgggattaagatggagatggaaacgagtaaagacttcgctatcgatcagtaatagcgtcattcccgccgttgccagaatgacggacaaaaacctcatcagcctctgggagccgacgataaaggtcagcgggaagaggatcagcaagtaggtggcgaacaccaggaagctgaaatggccgataatgcttacgtaggaataaatgcgaccagcaagcgtggtcggccagtcggcgataaacaggtaacggctgccaatgacgagcgaaagcagaatattgaacagtgcaaaccagtgcccccaactgaccatctgggagactttttcacggtagcgctgacgatgagttaccataacctgttatctgtttcccttagtgcgctttgtcttcgttgatagaggactgtaaggcgcgggcaaaagagttggcaattgcctggcgttgggccggggcaatgctggtgttgataaggttagtgaccatgttgcctaacaccatcagggaaaggtcggtcggagccttatgtttttccagtacgttgagcagctctgcgagcaattgttcaacctgttcatcactgtagcgggaaatttgtggcataaatcgaaatcagttagttgatgaaagggcaacatattaccgtagcaacggttttttttctgcttttttatgcgttaaatcattctcgttacgctgccttctgtaaaatgaccgccatcttttattgcgtcgcttaaccggcggtggttgaataccgcccggtcttaaaggagagtttatcatgagtctggatatcaaccagattgctctgcaccagcttatcaagcgtgatgagcagaaccttgagctggtgttgcgcgattcattgctggaaccgacagaaaccgtcgttgagatggtggcagaactgcatcgggtctatagcgccaaaaataaagcttacggcttgtttagcgaagagagtgaactggcgcagacgctgcgcttacagcgtcagggcgaagaggactttctggcatttagccgcgcggcaactggtcgcctgcgtgacgaattagcgaaatatccttttgctgacggtggattcgtgctgttttgccactaccgttatctggcggtggagtatctgctggtggcagtcctgagcaacctgagcagtatgcgcgttaacgaaaatctcgacatcaacccaacgcactatctcgatatcaaccatgcggatatcgtcgcgcgcatcgatttaaccgaatgggaaaccaacccggaatcgacccgctatttaactttcctgaaagggcgggtagggcgcaaggtcgccgatttctttatggatttccttggtgccagcgaagggctgaatgcaaaggcgcaaaaccgtggcttgctgcaagcggtggatgatttcactgcacaagcgcaactggataaagccgagcggcagaatgtgcgccagcaggtttatagctactgtaacgagcagctgcaagcaggcgaagagattgaactggagtcgctgtcgaaagagctggcaggcgtcagcgaagtgagtttcacggagtttgcggctgaaaaaggctacgaactggaagagagcttcccggcagaccgtagcacactgcgtcagttgacgaagtttgccggtagcggcggtggcttgactattaactttgatgcgatgctgttaggtgaacgcatcttctgggatccagcaaccgataccttgaccattaaaggcacgccgccgaatttgcgcgaccaattacagcgccggacgtctggcggcaattaatcggttttgtgttctgaatgccagatgcggcgtgaacgccttatctggcctgcaaaaaatagcaataccgtaatcaggcataatctgcagatacaaaaaaccccgccggagcggggttttttacaacttattcagcaattaagcgcgaacgaagtcgatgtgctgcagcttcggtttgtacgggtgacgctgtacgtcctgagctttaactttgatttctttaccgtcaacaacgatggtcagaacttcgctgtagaattcagctttagcttgcatgttcatgactttgtcgtgatccagctcgatagccagcggcgcttctttgccaccgtagatgattgccgggaacttgttagcggcacgcaggcggcggctcgcacccttaccctgctctttacgtacttctgcgttgatagtaaacatttctttctctcttaaattaatcctgctacaggcgacccagcaacaggtaagtgatctgctttgcgtatgcaaaagcgggcgagattctatactcaatcgccttatacatcaatcaaaactaccattaaccgcgtaattcgtgcgcccgacgaaaacgaccttcgtaatcgaacactttttcacgcacttgccagtactgacctttcatgcgggcgacgacaaaatccgggtgtcgcagtaacgcttgctgggcgaggatatcggcggcggtgatccagcgcagagggatgcccggtgtgcgcgtatgcgggcggataaaaagctgctcgaaggcagttcgctgggcgggcgtttgcagacggaaacgctcactcacatccgcgccgtcttcatcgtaataggtgattttcaaccattcgcctttctcgtcgtgcccatgttgcaaagacatgccgctacagcgtaataccagcgcgtctttcagtcgtagcgccgcttttaacatatcgtccggatcaaccagtacggtgtcacattcgcggcagcggcgggcggcaatatcattttctgcgttacattgcgggcaatttttaaaacggaaacggaagtcacactgttcgcgatgaccgtcgtcatcttcaaaccatccctgacagcgacgaccaaagtgttcaatcaatgtcccgtcggcggtcgttttcccccaaaaggtgttggcaaaaccgcaggcagggcagaaaacctgtaccgggacgttgtcacttttgcctttcggtgtaccaacttccggcgcgtagagatcgtgaggattacccgcataatcaagaattaagcaatcagtcttgccaggagcgagacgcagaccgcgcccgacaatttgttggtaaagactcactgattcggtagggcgcagaatggcgataagatcgacgtgcggggcgtcaaatccggtggtcagtactgcgacgttgaccagatagcgaaaacgctgggctttaaaatcttcaattaacacatcgcgctcagcgccgggggtgtcgccagtaatcagtgcagcatcttcggcgggcagtaatcccacaatctcttttgcgtgttcgaccgtcgcggcgaaaatcattacccctttgcgcttttcggcgaactccatgatctggctgatgatatgtggcgtaatgcgttgctgttttttcagctcacggttgagatcagcttcgctgaacagcccgttactctgtgcctgcaagcggctgaaatcgtattgtactactggcatatccagccgtttcttcggcttcagatagctgtgtttaatcatatcacgcagcggcagctcataaatgcagtcacggaaaagggctttctcatcgccgcgtaccatgccgtgataatggaactggtagatccagcctttgcccaatcgaaaaggcgtggcagtcagccccagcaggcgtaagtggggattcacttttgtcaggtgagtgaggatttgctgatactggctctcttcatcatcaccaatacggtgacattcatcgacaatcaacagcgaaaattcaccctgaaaggcatcaagattacgggcgaccgactgcacgctgccaaataccactttaccgtggctctctttgcgctttagcccggcggcaaaaatatcggcttccagtcccagtgcctgatattttgcatggttttgcgccaccagttctttaacgtgtgccagcaccagcacgcgaccacgcgccagccgcgccagttccgctatcaccaggcttttacctgcaccagtaggcagcacgataacggcaggggttttatgacgacgaaaatggttgagcgtggcatccacggcttcttgctgatatgggcgaagtgtaaaaatcatggtctcgcgtaggtagattattctgctaatagtatgccatggatctttttcccttgagggatgttattagaccgctatactgggcagacaacagttcagattttcgggtcattacccgacctccgttttttacaggcaaaatcacacacatgcgacttgataaatttatcgcacagcaactcggcgttagccgtgctattgccgggcgtgaaatccgcggcaatcgtgtcaccgtcgatggcgaaatcgtccgtaatgcagcgttcaaactgcttcctgaacatgatgtcgcttacgatggcaacccgctggcgcagcaacacggtccacgttacttcatgctcaataagcctcagggctacgtttgctccacggacgaccctgatcacccaacggtgctctattttcttgatgaaccggtagcctggaaactgcacgccgcagggcgtctggatatcgataccaccggtctggtgctgatgacagatgatggtcagtggtcgcaccgcattacttctccgcgccatcattgcgagaagacctatctggtgacgctggaatcacccgtagctgacgatacggcagagcaatttgctaaaggcgtgcagctgcataacgaaaaagatctcactaagccggcggtgctggaagtgattaccccaacgcaggttcgtctgaccatcagcgaagggcgttatcatcaggtgaaacgcatgttcgccgccgtgggtaaccatgtggttgagctgcatcgtgaacgtattggcggcattacgctggatgctgatttagcccccggtgaatatcgtccgttaactgaagaagaaattgccagcgtcgtctaacttttcaatgactttcaggagcccgttgtgaccacccgacagcattcgtcgtttgctattgtttttatccttggcctgctggccatgttgatgccgctgtcgattgatatgtatctgcccgcgctaccggtaatttcagcgcagtttggcgtaccggcgggcagtacgcagatgaccctcagtacttatattctgggctttgcgttggggcagttaatctacgggccgatggcagacagcttcgggcgtaagccggtggttcttggcggtacgctggtgtttgccgccgccgcggtggcgtgtgcgttggcacaaaccatcgatcagctgattgtgatgcgtttcttccacgggctggcggcggctgcggccagcgtggttatcaacgctttgatgcgtgatatctacccgaaagaagagttctcgcggatgatgtcgtttgtcatgctggtgacaaccattgcaccgctgatggcaccgatagttggcggctgggtgctggtgtggctgagctggcattacatcttctggatcctcgccgtggcggcgattctggcttcggcaatgatcttctttctgatcaaagaaaccttaccaccggagcgtcgccagccttttcacattcgtaccactattggtaactttgcggcgctgttccgtcataagcgtgtcctgagttatatgctggccagcggtttcagctttgccggaatgttctcgttcctgagcgccggaccgtttgtctacattgaaattaaccacgtcgcgccggaaaactttggttattactttgcactaaacattgttttcctgttcgtgatgaccatttttaacagccgcttcgtccgccgtattggcgcgttaaatatgttccgctcggggttgtggatacagtttattatggcggcgtggatggtcatcagtgcgctgctggggctgggattctggtcgctggtggttggcgttgcggcgtttgtgggctgcgtgtcgatggtgtcatccaatgcgatggcggtcattcttgatgagtttccccatatggcgggaacggcatcttcgctggcaggaaccttccgttttggcataggggcaattgttggcgcattgctttctcttgcgacctttaactctgcatggccgatgatttggtcaattgcattctgcgcaaccagctccattctcttctgtctgtacgccagtcgaccgaaaaaacggtgatctattgcacaacgaggaagctaaaaggcttcctttgttgatgcatgtcaaccacaaatctatcattcccccgatatatgtttattttatgtaaaatcaatttatgtaaaaagtcacatcattgtagttaaaaaggttgagttagatcgcagaaacgggtacatatagccccgcaaacgtgaccacgcccgcagatattacttaaatcagagccatagaggccacgcaggcgaggcatcaatctttacgatctgtataaagacggattgttgatgatgtgttaaaattgatgtaaacaaattgtgaagtaaatgtacttccggggaaaataagtgacttcattacaactctcaatcgttcatcgtctaccgcagaactttcgctggtctgctggtttcgcaggttcgaaggttgaaccgattccgcaaaatggaccgtgcggtgacaacagcctggtggcgcttaaattgcttagcccggatggtgataatgcatggtcggtgatgtacaaactaagccaggcgttaagcgacatcgaagttccatgttcggtgctggagtgtgaaggtgagccgtgcctgtttgtaaatcgccaggacgagtttgctgcaacatgccgattgaaaaattttggtgtggcaattgccgaacccttttcaaactacaatcctttttaagcgtcagctcaacgccagtagctgacgcgtatactcctgctgcggtgcggcaaacacgcgcgcgcacggtccttgttccactacttccccttgtcgcagtacgataacctgatgacataacgcgcggacaacgtgcaaatcgtggctgataaacaaataggccagttgatgcttttgttgcaatgatttcaatagcgtcaatatttgcgcctgtaccgttttgtcgagtgatgatgtcggttcatcaagtatgatcagcgagggcttaagaattaatgccctggcaatcgcaatacgttgtcgctgaccaccagagaactccgccggataacggtggcgtgtttcaggatctaatcccacttcatgcatcacggctatcacttgttgttcgcgttgtgcggcagaaagcgtcggctggtgaacccgtaagccttcctcaataatctgcaaaacgttgagtcgtgggttgagcgaggagtttggatcctgaaataccacctgaatgcgatgacgaataggtaacagctggcggcgatttaaattttgcaatggctgaccgtcaaagatgatgctgccctgagaattaatcagtcgcagcagcgccagtcccgtcgtacttttcccggaaccggactcgcccactaaacccagtgtttcacccgctcgtagcgtaaaactgatgtttttcaccaccacattatgatccacaatgcgcttcaaaatccctttgcgaatggggaaggcaacctgaagctgttcaacatccagcaacgttgaggcaggttctggcaacggcaccgggtcgcctgacggttcactgttgagtagcttttgtgtgtaaggatgagtgggtgaggcaaatagcgtagcggcgttattttgctcgacacagcgaccgttttgcattaccgccacgcggtgggccagttttctgacaatgctgaggttatgagtaataaacagcatgcccatattcagctcgccttgcagttcgcgcaacagctgtaaaatctgcgcctggacagagacgtccagtgcggtggtcggttcatcggcaattaataattccggtcgcgttaacagcgccatcgcaatcatcacccgctggcgttcgccgccggagagctgatgcggataatctgtcagccgttttgccgcctggcggataccaacgcgatcaaggcagttaagaatttcgccacgagccgcttcccgacgcatcccgcggtggagtgaaagcacttcataaagctgtttttccagggtatgcaatggatttaacgacaccatcggttcctgaaaaatcatggcgatcttattaccgcgtacaccgcgcaacgtttgatcgctggcatgaagcagcgattcgccatgaaaacgaatatcgccggagagatattcaaccggcggggaagggagcaggcgtaaaattgacagcgcggtaacgcttttgcctgaacctgactcacccaccagcgccagcgtttcgccagcctcaatctgtagtgaaacatcattgactactgtacgtacggtttgctgatggcgaaaacccaccgacaaattttcaatcgctaacagagtttgcgtcatgctacaccgccttattaggatcaaatgcgtcgcggacggcttcaccaataaagatcagcaaagacaataatatcgccaccgacaagaaggcggtgatcccaagccacggggcctgaaggttatttttcccttgtaacagcagttcaccgagtgacggtgaaccgagcggtagaccgaagccgaggaaatcgagcgaggtcagggtggttatcgaactacataaaataaacggtaaaaaggtgagggtcgcgaccatggcattaggcaacatatgacgcaggatgatactgcgatcgctgacgccaagcgcctgtgccgcacgaatgtagtcgaaattacgagtacgtaaaaactccgcccgcaccacgccgaccagactcatccagccaaacaagacagtaattgccagcagccaccagaagttaggctgtacgacgctggaaagtaaaataatcaaaaacagcgtcggcatccccgaccatacttcaataaagcgttgtccccagagatcgactttaccgccgtaatagccttgtagcgcccccgccagcacgcccatcacgctggaacagagagtcagcatcaggccaaacagaaccgagatccgcgtgccatagagaatgcgtgccagcacatcgccgccgttggcatccgttcccagccagttttgccgggagggtggagaagggaagggcttatcggtagcaaagttgatactggtagcaccaaagcgaatcggtgcccacagtacccagccgttattttccagccgttgtttcagccacgggtcctgataatcagcctgacttgccagcgggccgccaaaatcgctttcgctgtagtttttcaataacgggaaataccaactgccgtcataacgcaccagcaacggtttatcgttggcgataagttcagaacacaaactcaaaccaaacaagacgaggaaaatccataacgaccagtagccgcgacggttatgacgaaaacgcgcccatcgggcctgattgacggggctgagtcgcgacattaacgtccctcaaaatcaatacgcggatcaaccagcgtatagctgatatcactgacaatattcagcagcaggccaatcagggtgaaaatatacaaggtaccaaacattacaggataatcgcgcgagacggtcgcttcgtagcccagtaagcccagaccattgagtgaaaacatcacctcaatcagcagcgagccggtaaaaaacatgctgataaacgtcgccggaaaaccggcaatcaccagcagcatggcgttgcggaacacatgtttccagagaatatttttttcacttacccctttcgcacgcgcggtcaccacgtattgcttgcgcacttcatcaaggaatgagttttttgtcagcatggtcagcgccgcaaagccaccaatcactgtcgccagcaccggcagcgtgatatgccacagataatcggtgattttctgataccacggcagcgaatcaaagttagcggaaaccaggccgcgtagagggaacaggtcgaaatagctgccgcccgcgaagaagacaatcagcaggatggcaaacaaaaaggccggaatggcgtagccgatgatgataaatgcgctactccagacgtcaaagcggctcccattataaacagctttgcgaatgcctaacggaatcgacaccagatagataatcagcgtgctccacaatccgagggtgatggaaaccggcagactgtctttaatcagcgtcagcaccgaggcgctgcgaaacaggctatcgccaaaatcaaagcggatgtagtcccagagcattttgaagtaacgttcgtggatcggcttatcaaaaccgtagcgatgagtgatctcagcgatcacttctggatctaatccgcgtccgccacggtaattactgtcgctgatattgccgacacccgtttgcgcatggctggcacgaacaccttcaccgcctgcgccgggtaatactccggcattaccaaactcaatggcggcgatggcctggtcgaccggaccgccaggcgcaatttgcacgatgaaaaagttgatggtgataatcgcccataatgttgggatcaccagcaacagacggcgaatcaggtaagcgcccatctactctccctgtttgctggcggacggcagtttggccgctttattgacgtcataccaccaggtatcgataccgaggctatagatggggcgcacggccggctgggagaatttatcccaccaggcgagacggtcttccgccatgtaccacattggcagcatgtaataattccacgttaatacgcgatccagtgctcgccccaacggcagtaatttttctttatttccctgcgcggcaataatttggttgatcagcgagtcgataaccgggctttgcacgccgggggcattataagtggaattgatatattccgatgaccaggaaatctgtaaatcggaactgggccacggcatcgcccgccatacgcgcggcatcatgtcatagtcgcgactgcgcatgcggttagtgatttgcgagttatccaccttgcgaatgtccatgttgatacccagccgttgcaggctgtgctggaacggcaatacccactgactattgctgcttgcgggaagcaataattcaaagctgagtggctgacccgttgtggcattaacgcgttgctgacccttcagcacccagcccgcttcgttgagaagtttgtcggcttttaacaggttgtcacgatcgtagccatcgcctttggataccggcggctggtagatttgtgtgaagacttctggcggtagatcttttttcattggtgccagaagcaccagctccgcggcgtcggggtaatttctggccgcgtattcggtattctgaaaataactgttcgtgcgactccaggcattgtaaaacaacgccttgttcatccattcaaagtcaaaggcgagagtgattgcttcccgcacccggcgatcgctgaatactggacgttggatattaaacgccagccagcgcgtatcctgggctgattcgttcttttgctcatctttgatgatgtattttttatcgaaatttttaccggtataacgcgtggcccagtttttggcgtcgttttccatacgcaaatcaaaggcacctgctttaaacgcttcaaaggcgacattatcatcgaggtaataatcgtagcgaatggtgtcgaaattccagcgtccgcggtttaccggtaagtttgctgcccagtaatctttcacgcgggaatagacaatattttgccccattttccaggacgtaatgcggtacggaccactggcaagcggaggcgtggcgagcgggtcgctaagtttgtgatccttccagtacttttctggaaataccggcagcgaaaacagactcaacatatcttctttgccgggtttagctaactcaatgcgcacggttaacggcgcaatggctttgacggtggtgcctttgtagaccagacgaaattgcggcacgccttcggtcataaatttttgaaaagtaaactctacatcgcgggcagtaatgggcgaaccatcatgaaaacgggcgcgcggattaatagcgacctccacccaggaataatcgtcagcatagcgtgcgctttcagcaatcagcgggtaataactgcctggttcgtcatcggaagtcgtaaatagcgtgtcgtacagctgctcggtgcgtgcgcccgggttgccgcgcagtgcatagcggttgaaattatcgaaggtgccgagggctgacaacgttatctgcccaccttttggcgcggcggggttcacataatcaaaatggttgaaattaaacgcgtaccggggttcgcccagcacggcaaaggcatagctttccttgatagcctgcgcctgcacaccaaaggtgaacagagcgataaacagcagcagtatgcgcacaatcatctgcaacggatttccttttactcatcattagccgcaatccggcatgctttcactatgaataataagggacgtaagcacaccttaccactgcggcgtatacggtttctttagccagcgaacaaaatcgtccagcggtaacgggcgactaatccagtagccttgcatgaaattaacgccgcgttcgcttagccatcgcgcctgttccggcgtttcgaccccttcagcaaccgtcagcatattgaggcgtttagccagcgtcagcaccgcgtcaagtacgggggaagtgatcgtttccgtaccgatggcgttgataaatccacggtcaattttcagataatcgagcgtaaaacgctcaagatagataagcgcgctgtgcccggtgccgaagtcatcaatagcaatttctacgccgaccgagtgcagccaggcgaagagttgtgtggcttcttgctctttcagcatatcgcgctcggtaatttccagcacaatctggaaatggtgtgcgggcaaggacgtgagcagtttctggatatcagctttaaagctttcgctatgcagatggtccggcgcaatgttaatgccaaatttgacgcctaccggcagtactttttctaattctgcggcatcgcgggcaatcaactcaaacaggtgctgagtcagcggcacaatcatcttttgcgattcggcaaagttaatgaaggcatccgggggaatttctcccgctacaggatgccgccagcgtagcagtacttccaggcccgttactcgcaaagcttgtgtatccaccaccggttgatacgcaacgtaaaattgttcgcgcttgatggcgggcatgatttctctgccggggcgcatacgtacgctcatcaggtaatagcagagcaggccaacgacagttccactcatgccgcccagtaaaaatgcgtaccacacatcgttccatgtccagtcatctgcataaagccgaacggtcagaggaatgcccgcaattttagtttcacggactggcatgtcggttaattcgttaacgttcatcaaacgtgaagaaaaggtagatagcgcagtattaccaataatgagggcgacgccatcgtaatcttcctgccgtgaactataaaagagagaaggcgtcaggttgagattcagagcggcaaagacgccgctatttttcagcaaagggttgcgataccagatgacgattgcgggtttgttcggcaccatcggcgtgccgggtaagatcgccatatcgacgtttttattaatgtcgagcgccggaatcaattcattgagtggaatgtccatctcaccggtcgcagatgaacagaatgtttttttatctttcaccagcacaaacgtacggacattcatgctaaacgccgcgcgggcggtcagttcggggttagcttgctggcaggtatctaaggtcagcggctggagccggtcagtagtggatttcagatcggcaaaataggtatcgagatacttttgtacgtcggtaatcagtgtgtcgtatttgacttcgtgcctatgccaggccactaaaaattgaaggcaactcaccagtatcgcaatcatcacgcctgcaacaatgcaggtaagcaggagcttacgtccagaattgggagcgcgtatgaacatgattccgttaatttcctgaaattacgacaacatttaaaagataacaatgaccggactatagcctggatcaagacgcggaaacatcattttctctgatgaatgaaaacaaaaaagcactgcctaagcagtgctttcagttaactcgtcaggatagccaagggattgcatccaaacggtttattagctgcggctgagaacccggcgtgcttcgttgtaacgcttcttccagtacggttcattcatgctggaaataataacaccactgctggtggaagcatggacaaactgattgttgccgatataaataccgacatggcgtcccgttgaaccggcacggaacagaactaaatcacccgtacgcaaattactgcgggaaacagatttacccatttcctgctgttcgtaagtcgaacgcggaagttctaagccaaattgctcacggaatgtacgctgtacgaaaccagaacaatcgataccttttttagtgctgccgcccagacgataacgtacgcctttccagtcagcatactgatccataattcgcgattttacgtcgacattacgaaccaggttttcaaattcatcctgagaagcttgcagtgatgatgtttcactacccactgcacgtgtctcaggatgcatattctttgcggtgttatttgcactacatgcagaaagcagaaccgctactgcaatcgcgggaatcccgcgcaagatatatctcaaaatcggttgagatttgaccatgttgtttgttttcccttgaagtccttaacgacaaatatcgttataaaaaaatgccaagcgacacgagactaattacctgggcatgttgaaacaattccttaaggccaaatctgtggactaacgcacaaaattatatgctgtgaggataatctaccgccgaggcaaaacgagttcgagattacccgattggtgcggtcttggcgagcggttttacatgattttttataagaaaaagtgatacagaaagttaataagcgggattggtcaattaaagtacgattgagtgaaacgcatgcaatccattcatttacttagagaatgatttttgcgcgcgatggatgaaagcacggtgcgcatcatcaggattatcctcactataaaaataagcctgatgatgttaattactgtgagttatttgttttggaaatgtttgttttttcccggtagtgatttgtcaaaaaaggtgattaatcgatcacttaatggcgtcagcaacacccagggcaaaccgatcaatatcacggtcatcgaaccgacaatgatgtcagtaaaccagtgtgcgccaatcattactctgggaaatgcaaaaaccacaaaaataataagggcgataaggcctgcaactttgccgaaataacgccacatgaatgccgaaaaaataagcagcatcatgccgtgatcgccgggaaagctatctcgtgaggcatctttcgtgggaacagagagcagttcgctgacgcggttaatatcggtaaaagtcaatgttgggctggcccgttttacaggaattaatgcctgacccagctggtttaataccactgcagttaatagcatgaccagacccataatcacgatacgtcgtctgccaggggcgttttctttcagccagaaactcagcatcaacattcccatcgccagcagagaacaaccgtcgaaagcgcgattgttggtcaatgcaaccagccacaaaaaggccttactttcgaccagtttctgattaaagaaataaaaaatatccgcatcaattggcaaccagaatccatgattaacgggaatataccaggaaagaaacagcgcgaggccgacaatattcaacaacactatttgcggcaaatttttaatcatattttctctaattatcttactgaaaaacgcaggcaaccttacgcggtagtcgctaaacgaagcttcaacagcgcgctctgcaaagcattccagtcagcttcgctgctggaaatcagctcaatacggctgtccggtggcgcaacgttttgcgtttcaatgtgcaggtcatcgccctgacggttgattcgtaccagcccttcgggaatacgcagcacgcctttgacgcgttccaccggtgcaagtcgcgcccattccagaatgccaatggtgtcgaataccgtatcagcgtcgaatatccagccgcaggcctgatatccttgcccgctgttcagactgcgacgccagcgttgatgctctggcaggcttaacgctgctaacccttttttcacgacatgctgatgagaatgcggggcgctggcgggcaactcggctaaattgcgacgcggcaaatccagaagatgaccgtcaactttcccatgctcactgtgaattaattgtcgatcgccaccattttgctgccaccaacgctgtagcgcttgctcactttcgggcgtcgcacggtcggatttattggcgacaatgatgtctgcggcagccagctggtcacggaagttttcattgctggcgcttttttcgtccagcagcaggcgtggatcgagaatgcacaaggtggcgcgcagatctatccacggttcatagactggtgcggttaacagatcgaggatctgtttcggatggcccagcccggtcggctctatcaacaagcggtctggttttccctgacgcagtaaggtattcaaccctacctgcatgggtaaaccattaacgcagcacatgcagccgccggggatctctttcagcaatgcgccgctatcggcgagcaaagcaccatcaattccgacttccccaaattcattaaccagtaccgcccatttttcgttgggatctttatgggctaacagatgaagaatcgacgtggttttcccgctgccgagaaaaccggtgatgaggttggtcctggtcacaacggctccgcaatactctggtaagttaactgagcgttaatcctggctaaaaaaggcagaaaagagaaggggagagcggacgaaggtgagcttcatccgctttaaccgcagaaatcgttaaattttgagggtgtttaatagcgcctgatgtgcgccgaattgtacgatttgttgccaggcttgttcgatggcctgcacaaaatgcgggttatctggcagatcatcaccgaaaacttcacgcagggaaagcagggcggttacgcgttgttcactgctgctgcccgcaacaagttcgcgaattttatcgctaagcggatcgcgaacatcaatggcatttccggcatcatcaacgccgctgacgtaacgcatccagccagcaacgcctaatgccagcaacgaccagtccgtttcgcgccccagatgtatgcgaatacctgccagcatacgttgcggtaatttctggctaccatccattgcgatttgccaggtcttatgtttcagcgccggattagcaaaacgtgcaattaacttgtccgcatattgtgttaaatcgacatctttaatttgtagtgtcggcgcttgctcattcagcattaatgttctggcggcatggcgaaatgcgcgatcctgcatgcaatcactgatatgggcgaatcctgaaaggtaacccagataagcgagaaaagagtggctgccattaagcatacgcagtttcatctcttcccatggcaggacatcattcaccatttgtacacctgcgacttcccaggcaggacgcccagcgacgaagttatcttccaccacccactggataaacggttcgcagctaatcgcgcagggatcatttacccccagatgctggctgatttctgccagtgattcgtcggttgcagccggaacaatgcggtcgaccatggttcccggaaaactgacgtgttcttttatccacccggcgagttctggcgaacgtttttctgccattcccagcaccgcgtttttcaccacatggccattgtcgggaatattgtcgcaggagagcacggtaaacggtgtaaggccgcgctcacggcggcgtttcagtgcttcgacgagaatacccggtgcggagtgaggttcttcaggggtttgtagatcgtgaataatccgcggattactggtgtcgagtgcaccggtggccgggtcaatacaatagcctttttcggtaatcgtcagggaaacaattgccacctgtggctcgcaaaatttctcaataattgccgctaaggaatccagttttgcattaaggcattcgtgaacggcaccgacaattatcacctgattgccgtccgcacctttctccagcacggtatataaatggttctgtgcgcggagctggctcatcagttgatcaccgctgaacaagctgatttcacagatcccccagtcgccgccctgggcattcagcacacgatcggtcagtaacgcctgatgagcgcggtgaaaggcgccaaagccaaaatgaacgatacgtgattgcaactgctggcgatcgtagcgtggagcgtgtacatgatgcgggagcgtaacggaggcaattgtcttcataggagtcacgtcttagtaacgataaattaacaatgacagtgtaaagttatatgacagcaattgaaattggtctggattgttaatgcgatgaagtgtgagggcgatcaatcaacgagtgaaaattgagggcgtaaggtgttcaggaagcgcaaaatagaagattggtataataaattaaaaaagggacagcctgagctatcccttttctgcatgcggctgaagttagtcagcacgccccatataacggcgttcttcgatatggatacgaattttttcgcccgggcttaagtattctggtacctgaatcaccagaccagtgctcaatgtcgccggtttgttacgggcgctggcagatgcccctttgatgcctggtgcggtttcaacgatttccagatcaacggtctgcggcagctcaagcgccagcagttgaccgtcccaggtcagcacctgcatgtccggcatgccgccctctggcataaacagcaactcttcttcaatctgatctttggtgaaggtatacggggtatagtcttctttatccataaagacatattcgttgccatcgacataggagaagtcaacgtaacggcgggtcagcgtcacggtgtcaacgatattatcacctttgaaacgcccttctactttcagcccggtatggacatcagaaaaacgtattttgtatagcgtagcggtaccgcgggcagtgggcgactgaatatcaatatccttaaccagcagcagtttgccgttgtaattcagtaccataccttttttaatttcgttcgctcttggcatcgaaaaattcctgtagtcgaaaatgtcaaaaatatcgcgacaaagtactcgcgacgggcctttcgggcaagtggtattcgcacttttgctggtgcaaaaaaggtggtactgtgcgcgctcatcaatccggtggttaaccttaagagaacaacgtatggaatgccgtccgggttgcggggcgtgttgcactgccccttcaatttccagccctattcccggtatgccagatggcaagcccgccaatacgccctgcattcagcttgatgaacagcaacgctgtaaaattttcacctcgccactgcgaccgaaagtctgtgcaggcttacaagccagcgctgaaatgtgcggtaactcgcgtcagcaggccatgacctggcttatcgatctggaaatgctgaccgcgccttaaacatctttaatccgcagtaagcaaaacagagtggcgataatcatcaccatcgcaaaccagaacacagcgtgataattccagatctcggcgacgatgcccgccactgatcctgcgatgatccagcccacgcgcgacgtgttggtatagagcgtggtggctgaacccgcctgaccgggcatcagatcctgaaaatagagcatcccgatgccgcccagaatgccaataaaaatagcatttagcagctgcaagcccaacagaatgacaggtgaatgcgccannnnnnnnnnnnnnnnnnnnnnnnnnnnnnnnnnnnnnnngcgtaaaaacagacgccacccacggcagcaacgcgcattaagaaacgcttacccagacgtttggcgaaatatccggcaatcaacatcgtcgggatttccagcccggcggcggtccccatcatcacaccggccagtttctcgggaagatgcagttcgttgataataaatagcggcatgttgatgatgtacaggctgttcgagccccacatcaatgtacaaatgacaaacagcagcagcgtatcgcgacggttacggcgcggcgcttcaaccgtgccggtcgccagcggaagctctttttgcatcgacggtaaaaacagccacaccatcacgccgcaaacaataaatgctaccgctgcgctcagatacattaccgtaaagctgaaacccatcgctaaggcataagccagcggtgggccaatgacccatgccagtgaaacctgagcgcgtaaaaaagagctgaacatcaccgcttcacgtccggttttgtcggcatgttcacgggcaagggcaaacatttgcgggttagcggtcgagccaaagctgctaagaaagacgccaacgaatagcaaaacaaagtagttgcgattccaggcaaaaagggtgcaggccagcacgcctaacaggcagcaaaagacaatcagcgatttgcgatcgccgcgcttatcagagcgcccggcgagaaactgacttaccagaatcccaatgacagcgctgccggtaaagaagaatcccaccatcgccggacgggcatgtacttcatcagtaagaaaaatactgagtgtcggggtttgcagagcgcccgcaataccggtgagaaaggcaacgattaaaaacgccgtcgaggtcaggtcaaacgatttcgcgctggagactgcgggggagttatgcatgctggtcgatcactggaagaggaagacgcggagtttacgctgcttgtcagaaaataaacagacagcgaaatcaaaagcgccacgaataatcaaaatgccatttcactgttgctgattggctgctgacgctgnnnnnnnnnnacgctgctgaaatgaaattgctgataacggattttcccatcagcaattaggaaaaatgacaaaaaattgtgcagcacatcaaacttttgctcataactttacggctttccttgcgtgctgaatcagaagtattatgctttcttgaaacgtttcagcgcgatcttgtctttaaccctaagccaggttggcgctttttttctcatagaggctgaatcgtttcaattcagcaagagaggagaactatgttccagttatccgtacaggacatccatccgggcgaaaaggccggagacaaagaagaggcgattcgccaggtcgctgcggcgctggtgcaggccggtaacgtagcagaaggctacgtcaatggcatgctggcgcgcgaacagcaaacctcaacgttcctcggcaatggtattgctattccacacggcaccaccgacacccgcgatcaggtgctgaaaaccggcgttcaggtatttcagttcccggaaggcgtcacctggggtgacggtcaggtagcgtacgtggcgatcggtattgctgccagctcggatgaacatctgggcctgctacgccagctgacccacgtactgagtgatgattccgttgctgaacaactgaagtcagcaacaacagcagaagaacttcgcgcattgctgatgggcgaaaagcagagtgagcagctgaagctcgacaacgaaatgctgacactggatatcgtcgccagcgatctgctgactcttcaggcgctgaacgctgcgcgtctgaaagaggcgggggcagttgacgccactttcgtcaccaaagccatcaatgaacaaccgctgaacctcggacagggcatctggctgagcgatagcgccgaaggcaatctgcgtagcgcgattgcggtaagccgtgcggcaaatgcttttgatgtggacggcgaaacggcagccatgctggtgagtgtagcgatgaatgacgatcagcccatcgcggttcttaagcgtctcgctgatttgttgctcgacaataaagctgaccgcttgctgaaagcggatgcggcaacgttgctggcactgctgaccagcgatgatgcgccgaccgacgacgtgttaagcgcggagtttgtggtgcgcaatgaacacggcctgcatgctcgtccaggtaccatgctggtcaataccattaaacaatttaacagtgatattaccgtgacaaaccttgatggcaccggcaaaccggcaaacggacgtagtctgatgaaagttgtggcacttggcgttaagaaaggtcatcgcctacgctttaccgcccagggtggagatgctgaacaggcgctgaaagccattggcgacgctatcgctgctggtcttggggagggcgcataatgagcagacgtgttgctactatcacccttaatccggcttatgaccttgttggtttctgcccggaaattgaacgcggcgaagtgaacctggtgaaaaccaccggtctgcatgcggcgggtaaaggcatcaacgtggccaaagtattaaaagacctgggaattgatgtcaccgttggcggcttcctcggtaaagacaatcaggatggttttcagcaactgttcagcgagctgggcattgccaaccgtttccaggttgtacaggggcgcacccgaattaacgttaagctgacggaaaaagacggtgaagtgaccgacttcaacttctcgggttttgaagtcacccccgccgactgggaacgctttgtgactgattctctgagctggctcggtcagttcgatatggtctgtgtcagcggaagcttaccgtcaggcgtcagcccggaagcgttcaccgactggatgactcgcctgcgtagtcagtgtccttgcattatctttgatagtagccgtgaagcgttagtagcaggtttgaaagcggcaccgtggctggtgaaacctaaccgccgcgagctggaaatctgggcaggccgtaaactgcctgaaatgaaagatgtgattgaagctgcacatgcgctacgtgaacaaggcatcgcgcatgttgttatttcactgggtgccgaaggcgcgctttgggttaatgcctccggcgaatggatcgccaaaccaccgtcagtcgatgtcgtaagcaccgttggcgcaggggattctatggttggtggcctgatttatggcttgctgatgcgtgaatccagtgaacacacactgcgtctggcgacagctgttgcagccctggcggtaagtcaaagcaatgtgggtattaccgatcgtccgcagttggccgcaatgatggcgcgcgtcgacttacaaccttttaactgacagcaggagaggcataatgaaaacgctgctgattattgacgctaatctcggtcaggcacgcgcctatatggcgaagaccctgctgggcgcggcggcgcgaaaagcaaaactggaaatcatcgacaatccgaacgacgctgaaatggcgattgttctcggtgattccatcccgaacgacagcgcgctgaacggtaaaaatgtctggctgggtgatatttcccgggcagttgcgcaccctgagctgttcctgagtgaagccaaaggccatgcgaaaccttacactgcgccggtcactgcgacagcaccggttgccgccagcggtccgaaacgcgtagttgcggtgactgcttgcccgactggcgtagcacacacctttatggcggctgaagccattgaaaccgaagcgaaaaaacgtggctggtgggtgaaagttgaaacccgtggttctgttggcgcgggtaatgcaatcactcccgaggaagtagccgcagcggatctggtgattgtggcggcagatatcgaagtggatctggcgaaatttgctggtaaaccgatgtatcgtacctctaccggtctggcgctgaagaaaaccgcgcaggaactggataaagcggttgctgaagcaacgccgtatgaaccagcgggcaaagctcaaacagcgaccactgaaggtaagaaagagagtgcaggcgcttaccgtcacttgctgacgggcgtctcttacatgctgccgatggttgttgcaggtggtctgtgtatcgcgctttcttttgcttttggtatcgaagcgtttaaagagccgggtacgttggcagcggcgctgatgcagattggcggtggttcagcctttgcgctgatggtgccggtactggcaggttatattgccttctccattgccgatcgtccgggcctcacgccggggctgattggcggtatgctggctgtcagcaccggttctggcttcattggcggtattattgcgggcttcctggctggttacattgcgaagttaatcagtacgcaactgaaactgccacagagtatggaggcgctgaaaccaatcctgatcattccgctaatttccagtctggtggtcggtctggcgatgatctacctgatcggtaaaccggttgctggcattctcgaagggctgactcactggctgcagaccatggggactgcgaatgcggttctgctgggggcgatcctcggtggcatgatgtgtactgacatgggcggtccggtaaacaaagcagcgtacgcattcggtgtgggtctgctgagtactcaaacctatggcccgatggcggcgattatggcggcaggtatggtgccaccgctggcaatgggtctggcaacaatggtggcgcgtcgcaaattcgacaaagcgcagcaggaaggtggcaaagccgctctggtattgggactgtgcttcatttcggaaggtgcaattccgtttgctgctcgtgatccgatgcgtgtgctaccgtgctgtatcgtgggtggtgcgctgactggcgcaatctcaatggcgattggtgcgaaactgatggcaccacacggtggtctgtttgttctgctgatccctggcgctattacgccggtactgggttacctggtagcaattattgccggtacgctggtggcgggtttggcctatgccttcctgaaacgtccggaagtggacgcagtagcgaaagcagcgtaataaaaggtgtgttacagggcagaaatttcctgccctgtatcattggatgagcgcaaagggaatgaccagcttgtgaatgtaattttatgaatttaaatggttttatctttcagtagaaacttgaaacgttcatcaaacactaaggttatttcctcaagggcagattattttctgcccttttttattgttcctgttctgtgcatcccgtcacaaattcctcgcttttgtaattcaggcatttaatcgcattttgtgagcctgctcaaatctgcccatttagcctctctggcggtaatttactttacgtaaaacatgcatactatgagcacatgtttaaatgtgaacacatgtttaaaccgtctttgcagtatctatattcttgtggattgacagggttggtaattttttaccagaggacgtgctatgcgcgaaaaggattatgtcgtaattataggctcggcgaatattgatgtcgccggatattcacatgaatcattaaattatgcggattcaaatccaggtaaaataaaatttacgcctggtggagtcgggcgcaatattgcacaaaacctggcgttgctggggaacaaagcctggctactgagcgccgtaggcagtgacttttatggtcaatcgctgctaacgcaaaccaatcaatctggcgtttatgtcgataaatgcctgattgtgccaggagaaaatacgtcaagctatttatcattactcgataataccggtgaaatgctggttgctataaatgacatgaatattagcaacgctattacagctgaatatctcgcacagcaccgtgaatttattcagagggcaaaggtcattgtcgcagactgtaatatcagtgaagaggcactggcatggattctggataatgccgccaacgtacccgtatttgtcgatccggtttcagcgtggaaatgtgtcaaagtgcgcgaccgtctaaatcagatccacactctcaagccaaaccgccttgaagcggaaaccctgagtgggattgcgctgtcagggcgtgacgatgtggcaaaagttgctgcctggttccatcaacatggcctgaaccgactggtattgagcatgggcggcgacggcgtttattacagcgatatcagcggtgaaaatggctggtctgcgccgatcaaaaccaatgttattaatgttaccggagcgggcgatgccatgatggcgggacttgcttcgtgttgggtagacggaatgccgtttgccgaatctgttcgtttcgcacagggatgttcgtcaatggcgctctcctgtgaatacaccaataaccccgatttatcgattgccaacgttatatcgttagtggagaacgcagaatgtctgaattaaaaatttcccctgaattattacaaatttccccggaagtgcaggacgctttaaaaaacaaaaaaccggttgtggcgctggaatcgaccattatttctcacgggatgccgttcccacaaaatgcccagaccgcaattgaagtagaagaaactattcgtaaacagggcgcagtacctgccactatcgccattattggcggcgtgatgaaagtgggtttaagcaaagaagaaattgaattactgggtcgtgaagggcataacgtgaccaaagttagtcgtcgcgatttaccttttgttgttgccgccggaaaaaatggcgcaaccactgtggcttcaacgatgattattgcggcgcttgccggaattaaagtatttgccaccgggggaattggtggtgtgcatcgcggggcggaacataccttcgatatttctgccgatttgcaagaactggcaaatactaatgtcaccgttgtttgtgccggggcgaaatctattctcgatttaggattaacaacagaatatttagaaaccttcggtgtgccgttaattggctatcagacaaaagcgctgcctgcgtttttctgccgtaccagcccgtttgacgtcagcattcgtctcgacagcgccagtgaaattgcccgtgcaatggcggtgaagtggcaaagcgggctgaacggtggcctcgtggtagcgaacccgatcccggaacagtttgcgatgccggaacacactatcaatgcggcgatcgatcaggcggtagctgaagctgaagcgcagggcgttattggtaaagaaagtacaccgttcctgctggcgcgcgttgctgagctgaccggcggtgacagcctgaaatccaatatccagctggtgttcaacaacgccattctggcgagtgaaattgccaaagaataccagcgtctcgcgggttaatttctgacgggcagaaagccgtcgcccgtactcatcaagcataccaaaacctggcgctgacgccgggtttactggcatgaagggaaaatcattatggatataatgagaagtgttgtggggatggtggtgttactggcaatagcatttctgttgtcagtgaataaaaagagcatcagtttgcgcacggttggagccgcactgctgctgcaaatcgctattggtggcatcatgctctacttcccaccgggaaagtgggcagtagaacaggcggcattaggcgttcataaagtgatgtcttacagtgatgccggtagcgccttcatttttggttcgctggttgggccgaaaatggatgtcctgtttgacggtgcgggttttatcttcgcctttcgcgtacttccggcgattattttcgttactgcgctcatcagtctgctgtactacattggcgtgatggggctgctgattcgcatccttggcagcattttccagaaagctcttaacatcagcaaaatcgaatcttttgtcgcagtcacaactattttcctcgggcaaaatgagatcccggcgatcgttaaaccgtttatcgatcgcatgaatcgcaacgagttgtttaccgcaatttgtagcgggatggcgtccattgctggttcgatgatgattggttatgccggaatgggcgtaccaattgactacctgttagcggcttcgctgatggctattcctggcggtatcctgtttgcacgtattcttagtccggcgacggaaccttcgcaagttacgtttgaaaatctgtcgtttagcgaaacaccgccaaaaagcattattgaagctgcggcgaacggtgcaatgaccgggctgaaaatcgccgccggtgtggcgacggtggtaatggcatttgtggcgatcattgcgctgatcaacggcattattggtggagttggcggctggtttggttttgccaatgtctctctggaaagcattttcggctatgtgctggccccgttggcatggattatgggggtggactggagtgatgcaaatcttgccggaagtttgattgggcagaaactggcgattaatgagtttgttgcttatctcaatttctcgccctatctgcaaacgagcggcacgctggatgtcaagaccattgccattatctcgttcgccctctgtgggtttgcaaactttggttctatcggtgttgtcgttggagcgttttcggctatttcgccaaaacgcgcgccggaaatcgcccagcttggtttacgggcgctggcggcggcgacgctttccaacctgatgagcgcgaccattgccgggttctttattggtttagcttgagtttcattgccggatgtactcgcttattaagcgttgcatccggcaatcgcgtactatactcgtcatacttcaagttgcatgtgctgcggctgcgttcgctcaccccagtcacttacttatgtaagctcctggggattcactcgcttgccgccttcctgcaactcgaattatttagagtatattccagattatttttttactgcatcatcccggagaatttattctccgggtccatctccagcgccagtcctgacaactgctttctgtttttaattagatatcctttcttgcttttaattaataaaccgtcgtgaatgaattgcgcgagaacatataaaagatgtcgataagaaacgcctaaatactctgccgcttgcgtatgcttttcgtgataaagatcaccttcttgcgagagtaatataaatgctgccaggcgattcactaacggaaatgattgattctgagttaaagaaacaatattacgataatttttatgacttaaggtgacgcaaagttttcgtaaaaatagcgtgtcgtttaataacagcggacggtaatgtttcatagggagcgcaaggcaccaacactcttcaatcgcctgtactgcacgtggttcatggtctttatcgattaactcaatctcgccaataaaacagggggcggcaaagaaatcgatcagcgacacgcgaccattagctagcgtggcgtaaagcctggcgcggcctcgcgtcaggtaaaacagccaggacggctgttgcccttcctgcacaatgtagtcacgcgctaaaaaatgaaacagccgcgtatcggctgaaacatccgttaaaaagcaatccttaaacgcggattcactcatcaattgcagcttaagatcattattgtggatttctttcacgatgtttatccgctatgagatttctcatatttagcatacgtacgctgttgttaagattcaatcatcggcccggtcgaattttctttgctgtagaaaaaataacgcaactggaaacagaggaaataaacaatggaaaagagaaaaattattctggattgtgatccggggcatgatgatgctattgcaatgatgatggcagcgaaacatccggcaatagatttattaggcatcactattgtagcgggtaatcagacgcttgataaaacattaattaatggcctgaatgtttgccagaaactggagattaatgttccggtttatgcggggatgccgcagcccattatgcgtcaacaaatcgttgccgataatattcacggtgaaaccggactggatggcccggtattcgagccgctgacccgccaggcagaaagtacccacgcggtgaaatacatcattgataccctgatggcaagcgatggcgatatcactctggtgccggttggtccgctttcaaatatcgcggtggcaatgcgtatgcaacccgcgatcctgcccaaaatccgtgaaattgtgctaatgggcggcgcttacggtacaggcaacttcacgccatctgccgagttcaacatctttgctgacccggaagccgcacgcgtggtgttcacctctggcgttccattagtgatgatgggcctcgatcttaccaaccagaccgtttgcaccccggacgtaattgctcggatggaaagggcaggcggccctgccggagcgctgttcagcgannnnnnnnnngacatcatgaacttcactctcaaaacgcagttcgaaaactacggcctggctggcggcccggtgcacgacgccacctgcatcggttatctgattaaccctgatggcattaaaacccaggagatgtacgtcgaagtggacgtcaacagtggcccttgttatgggcgtaccgtctgcgacgagctgggcgttcttggcaagcccgctaataccaaagtcggcatcactattgataccgactggttctggggcttagtcgaagagtgcgtgcgcggctacatcaaaacccattaagtgttgataacaagccgggccggtatcgcaagatgcaggcctggctatttctgaggggcagaaagccgtcgcccaatatgacatgaagagataatcactatggatgtcatgagaagtgttctgggaatggtggtattgctggcaattgcatttttgctgtcagtaaacaagaagaagatcagcctgcgtaccgttggcgcggcgttagtgttacaggttgtgattggcggcattatgctttggttaccgccagggcgttgggtcgctgaaaaagtcgcttttggcgtgcataaagtgatggcgtacagcgacgcgggtagcgcatttatcttcggttcgctggtcgggccgaaaatggacacgctgtttgatggcgcaggatttatctttggtttcagagtattaccggcaattatcttcgtcaccgcgctggtgagtattctctattacatcggtgtgatggggatcttaattcgcattctcggcggtatcttccagaaagcattaaatatcagcaagatcgagtcattcgtcgcggtcactaccattttcctcgggcaaaacgaaattccggcaatcgtcaaaccctttatcgatcggctgaatcgcaatgaattatttacagcgatttgtagtggcatggcctcaattgccggttcgacaatgattggttacgccgcactgggcgtacctgtggaatatttgctggcggcatcgttaatggcgatcccaggcgggatcttgtttgcccgcctgttaagcccggctacggaatcttcgcaggtttcttttaataacctctctttcaccgaaacaccgccaaaaagcattattgaagccgccgcgacaggggcgatgaccgggctgaaaatcgctgcgggtgtggcaacagtggtgatggcatttgttgccatcattgcgttaattaacggtattatcggcggcgttggcggctggtttggttttgaacatgcctcgctggagtccattttaggttacctgctggccccactggcgtgggtaatgggtgttgactggactgatgcgaatcttgccgggagtttgattggacagaaactggcaataaatgaatttgtcgcttatctcaatttctcaccctatctgcaaacggctggcactctggatgctaaaaccgtggcgattatttccttcgcgttgtgcggtttcgctaactttggttctatcggggtggtggtgggggcgttttctgcggttgcgccacaccgtgcgccggaaatcgcccagcttggtttacgcgcgctggcggcggcgacactttctaacctgatgagtgccaccattgccgggttctttattggtttagcgtagtgtgcgatttatgagccggataagatgcggtcaagcgtcgaatccggcaacattgttacaccattggcactaatgaaagcgcgttatcggcagacagggtagggttgtttaagctgccgctggcgcgtgaaattgccgcgcaggccatcgcaaaacgggcgctgtcacggaaattgtttccttccagaaagctatataccaggcccgccataaaaccatcgtcagcaccaaaactgtctactgtcgtatgcgctggtgcggtcagcaaaaattgttctccatccttttcgctgcaataaactgactcatcgggcaaataaacaaacagttgctgaacaccttgctgatgcaacgcattcactgcagcattacggtcagcatcgctggtgatcgcctgtccccataaaatttccagctccggtaaagtgggtttcagggtgtgaatatgcgccagccagtgtttgattttgcccgctttgaattctgaaacggtatcgacaaacaccgggatctcaccagcgagggtaaagacccattccagcgcctcggctgtcaggttgcaatcagccagtaccacgcccgcatgacgaagtaaatcgcgcgacccgttcaataattgcggcgataactgttccagcagatgggtatcgttaatcgccagcacggtttcatcgtctcgattggcaattgccagatacgtcgatgtgctttgaccatgtaaacgaacgcagccggagacattcacgccggcgcggcgcgtttcttccaggagcatttcgccataaaagtcatcgccaatcactgaaagcaaatggacgtcgcggcctaacagcgccagattgtgggcgatattgcgtccaacgccgcctgccgagcaatgaattgtaccgggatgagaagccgcttgcgggtaatggatatccgccatcccgcgaatatccatattgattgtccccaccactacgcagtattcctgctcggtgagaatgtaacctttgcctttaatccgccctttgcgcattaaatccataatatgcgccgcaacgcgcgaacgactgatttgcagcatgtccgcaatttcgttctgctgaatcagcgggttacgccgtaaaattgcaaggatctccttttcccggttattcatcttcaggctaccgctttttcagtttgttgcgctttcagccaggcgatctcttctgcccagatatccgggttgatggtttcaaggatcagcggaatgccgtcgaaacggtcgtcctgcatgatccagcggaacgcatcatgaccgatattgccttcaccgaggctatgatggcggtcaacgcggctgccaaaggtgcttttcgcatcgttaaggtgcatcccgcgcagatacttaaagccgacaatacgggcaaaatcagcgaacgttttctcgcattcggctggagtacgcaaatcatacccggcagcgaaagcatggcaggtatcaatgcagacgccgacacgggatttatcttccacgccgtcgataatcgccgcgagatgttcgaatttaaaccctaagttactgccctgaccggcggtgttttcaatcaccgcggtcacaccttgagttttatccagcgcaatgttgatggattcggcaatacgcgcaaggcaatcctcttctgaaatctgcatcagatggctgccagggtggaagttgagcaaagaaagccctagttgttcgcaacgctgcatttcatctataaaggcatcgcgcgatttttccagagcttcagtgaccggatgtccgaggttaatcagataactgtcgtggggaagaatttgcgccgatgtgtagtgatatttttcacaggcggctttgaattcatcgatggtttgcgtcgtgagcggtgcggcacgccactgacgttggtttttggtgaacaaggcaaacgcggttgcgtcgatttcggcggcgcgaattgcggcatttgccagaccgccagcagcactaacgtgcgctccaatgtatttcatgcgaggactcctgttaaacccgctggaggaaaacggtaatgatagcgggttaacaggagcaagatgtagtggtttatgcgatgacgctttgaatcacatagttaatcgcaccaccaccaacaatcagccaggcaaacagtaccagtgccatcagcagaggtttcgccccggcttttttcagcgcgctgacgtgagtggtcagacccagcgccgccatcgccattgccagcaggaaggtatccagcgttaccagcatgttcaccacgctctgcggtaacaggtggaacgagttaaagatggcaactacgatgaacaagatggcaaaccacggaatagtgattttgcttttctcgccgctgttcgccccagacagctgtttaacacgcgccgccagcaggatgaggaacggagccagcatcatcacgcgcagcattttggaaataactgctgcgttttccgcatccgggctgatggcatgacctgccgccaccacctgcgccacttcgtgcacagtagaaccaatgtagataccgaaagtttccggactaaaccattgagacatcagcggatatatcgccgggtagaggaaaatcgcgacggtcccgaagataacaacggttgcaacagccacggttactttactggcttccgctttcactaccggctcagtcgccagtaccgcggcagcaccacagatactgctaccggcaccgatcaaccagctggtgtgcttatccagaccaaacactttctgccccaggaagcaagccagcaggaaggtactggacagcgtcagcacgtcaatgatgatcccactgataccgacatcggcaatttgcgagaacgtcagacggaagccataaagaatgatacccagacgtaataaatattgcttggcaaacagcacaccaccgtcacagcttttccagatgtgcgggtaaatggtgttgcctaaaaccatccccaacaagattgcgagggtgagggcactaaacccggcacccgcaaccgcgggaatggaaccaccccacagggcgaccccggtgataactgcactcagggctaaccccggaataaaatgccacagtgtacgatgttgtttctgtaaggtgatattcgtcataaccctctcctttaaccgggcataaggttacgactaactggtttaaaaataaaattgattatatatttataattaatctttataagtggtaagcgactatgcacatcaccctccggcagttggaagtttttgcagaagtattgaaaagtggatcaaccacccaggcgtcggtgatgctggcgttgtcgcaatcagcagtgagcgcagccttgaccgacctggaagggcagcttggcgtgcaactgtttgatcgcgtggggaaaagactggttgttaatgaacacgggcggctgctctatccgcgagcgttggcactgcttgaacaggcggttgaaatcgaacaactgtttcgcgaagacaacggcgcgattcgtatctatgccagtagtaccatcggtaactacattctgcctgcagttatcgcccgttatcgccatgattatccgcagttgccgattgaacttagcgttgggaatagccaggatgtgatgcaagcggtgctggatttccgcgttgatattggctttattgaaggaccgtgccacagcactgaaatcatttctgaaccgtggctggaagacgagctggtggttttcgccgcgccgacttcgccgttggcccgtggtccggtcaccttagagcagctggccgctgcgccgtggatcctgcgtgaacgcggttccggcacgcgggagattgtcgattatctattgctgtcacatttaccgaagtttgagatggcgatggaattaggtaactccgaggcaatcaaacatgcggtgcgtcatgggttgggaattagttgcctgtcgcgacgtgtgattgaagatcaattgcaggcaggcacattaagtgaagttgcggtccctctcccgcgcctgatgcgtacgttgtggcgtatacatcatcggcaaaaacacctttccaacgcgctacggcgctttctggactattgcgatcccgcgaatgtaccgcgttaaggtgctgtacaagaacatgctggtgctgtgtcgatttcgtgacgcagcgccctcagcatgcattcgccagaaaagagattgactgctttacttataatccctgggcgatcatgaaggtgtcttataaccgtgtatttctgccggaaggattgccaatcgtctgctacaatcgcgcctcatttttaagatggatagcatttttgtatggtttccgaaactaaaaccacagaagcgccgggcttacgccgtgaattaaaggcgcgtcacctgacgatgattgccattggcggttccatcggtacaggtctttttgttgcctctggcgcaacgatttctcaggcaggtccgggcggggcattgctctcgtatatgctgattggcctgatggtttacttcctgatgaccagtctcggtgaactggctgcatatatgccggtttccggttcgtttgccacttacggtcagaactatgttgaagaaggctttggcttcgcgctgggctggaactactggtacaactgggcggtgactatcgccgttgacctggttgcagctcagctggtcatgagctggtggttcccggatacaccgggctggatctggagtgcgttgttcctcggcgttatnnnnnnnnnnaactacatctcagttcgtggctttggtgaagcggaatactggttctcactgatcaaagtcacgacagttattgtctttatcatcgttggcgtgctgatgattatcggtatcttcaaaggcgcgcagcctgcgggctggagcaactggacaatcggcgaagcgccgtttgctggtggttttgcggcgatgatcggcgtagctatgattgtcggcttctctttccagggaaccgagctgatcggtattgctgcaggcgagtccgaagatccggcgaaaaacattccacgcgcggtacgtcaggtgttctggcgaatcctgttgttctatgtgttcgcgatcctgattatcagcctgattattccgtacaccgatccgagcctgctgcgtaacgatgttaaagacatcagcgttagtccgttcaccctggtgttccagcacgcgggtctgctctctgcggcggcggtgatgaacgcagttattctgacggcggtgctgtcagccggtaactccggtatgtatgcgtctactcgtatgctgtacaccctggcgtgtgacggtaaagcgccgcgcattttcgctaaactgtcgcgtggtggcgtgccgcgtaatgcgctgtatgcgacgacggtgattgccggtctgtgcttcctgacctccatgtttggcaaccagacggtatacctgtggctgctgaacacctccgggatgacgggttttatcgcctggctggggattgccattagccactatcgcttccgtcgcggttacgtattgcagggacacgacattaacgatctgccgtaccgttcaggtttcttcccactggggccgatcttcgcattcattctgtgtctgattatcactttgggccagaactacgaagcgttcctgaaagataccattgactggggcggcgtagcggcaacgtatattggtatcccgctgttcctgattatttggttcggctacaagctgattaaaggaactcacttcgtacgctacagcgaaatgaagttcccgcagaacgataagaaataagtttcctcccttccttgctaagccctctcaaccgagagggctttttcaattccatttccctgacaaatcatgcggatataaaatttaacatttggattgataattgttatcgtttgcattatcgttacgccacaatcaaaaaaggctgacaaatcagaggctgttccggctttctgggatgatcacctgcataaaaaataagtccaccgcgatgctgccgtacgcaaggggacgtgaagaagatgtgagcgataacccattttattttcgtagttacctcatggagatatggaatgtttaggttgaaccctttcgtacgggtcgggctgtgtttgtccgctatttcttgtgcatggcctgtgttagcggtcgatgatgatggcgaaacgatggttgtcactgcatcttccgtggaacaaaatcttaaagatgcaccagccagtatcagcgtcattacccaggaagacctgcagcgaaaaccggtacagaatctgaaggatgtcctcaaagaagtgcctggcgtacaactgacgaacgaaggggataaccgtaagggcgttagtattcgtggtctggacagcagctacaccctgattcttgtcgacggtaaacgcgttaactcccgcaatgctgtcttccgccacaatgatttcgatctgaactggatcccggttgattccatcgaacgtattgaagtggttcgtggcccgatgtcgtcgctgtacggctccgatgcgctcggcggtgtagtgaatatcatcaccaaaaaaatcggtcagaaatggtcgggtaccgttaccgtcgataccaccattcaggaacatcgcgatcgcggtgatacctataacggtcagttctttaccagcggaccattaattgacggcgtgctgggaatgaaagcttacggcagcctggcaaaacgtgaaaaggatgacccgcaaaactcaacgaccaccgataccggagaaacgccgcgtattgaaggattctccagccgcgacggtaatgtcgaatttgcctggacaccgaatcaaaatcacgattttactgccggatacggtttcgaccgtcaggatcgtgattccgactcgctggacaaaaaccgcctggaacgccagaactactccgtcagccataatgggcgttgggattacggcaccagcgaactgaaatactacggtgagaaagtcgagaacaaaaaccctggcaacagcagcccgataacttccgaaagcaatacggtcgacggcaaatacacgttgccgctgacggcgattaatcagtttctcacggttggcggtgaatggcgtcacgacaaacttagcgatgcggtgaacctgaccgggggaaccagctccaaaacgtctgccagccagtacgcgctgtttgtggaagatgaatggcggatcttcgagccgctggcgctgacgaccggcgtgcgtatggacgatcacgaaacctacggtgaacactggagtccgcgtgcctacctggtttataacgccaccgacaccgtaacggtgaaagggggctgggcgacggcatttaaagcaccttctctgttgcaacttagccctgactggacgagcaattcctgccgtggcgcatgtaagattgtgggtagcccggatctgaaaccagaaaccagcgaaagttgggagctggggctttactacatgggtgaagaaggctggctggaaggggttgaatccagcgttaccgttttccgtaacgatgtgaaagatcgtatcagcatcagccgtacgtctgacgtcaacgctgcaccgggctaccaaaactttgtcggttttgagacgggcgctaacggacggcgcataccggtatttagctactacaacgttaacaaagctcgtattcagggcgtggaaaccgaactgaaaattccgttcaacgatgaatggaaactgtcattcaactacacctacaacgatggtcgtgatgtcagcaacggcgaaaacaaaccgctatccgatctgccgttccataccgctaacggtacgctggactggaaaccgctggcgctggaagactggtcattctatgtttctggtcactataccgggcagaaacgagccgacagcgcgacggctaaaacacctggcggttataccatctggaataccggcgcggcctggcaggtgactaaagacgtcaaactgcgcgcaggcgtgctgaaccttggcgacaaggatctcagccgtgatgactacagctataacgaagacggacgtcgttactttatggcagtggattatcgcttctgatgagaagatgcccggcgaaccgggcggactttcacttcagtaaatactgcgcatggaagcgcaggtgatcctctataaaagaggcgatgaagtagtaactgtgatcatatcccggctgaatacgcagcgtcatcggccacgctttctggcgcgcggcttctgccagaactgcgggttgcaactgatcggcaagaaactgatcattatcaccttgatcgataagcgtcgggatcgcatcctgcgcgttactggcatacatcagcgcgcaactgtcccattccagccatgcatttttgtcctcacctaaatagcggctaaacgctttgatcccccacgggacgctgcacggattcacaatgggcgcaaaggcggaaacgctggtgtatttgcccgggtttttcagcgccataatcagcgcaccgtgaccacccattgaatgaccgctaatggcgcagcggtcgctgacattaaattgcgactgaaccagcgccggtaattcatcgcgcagataatcatacatccggtaatgcgtcgcccacggcggttgcgtggcattaagataaaagcctgcgccctggcctaaatcgtagccatcgtcgttggcaacctgttcgccgcgcgggctggtgtctggcatcaccagtacaatccccagttccgccgctacccgctgggcacccgccttggtggtgaagttctcgtcattgcaggttaatccggaaagccagtacagcactggtggtggggtgtgatcacgaggtggtgggagaaagatactgaacgtcatcgggcagtttaaggtactggagtcgtgtcgccagcgttgctgccagccttcaaaacagcggtgctcttcgagcatttccatgcgtggctccttgttgtgttgtttgcaatttcttcatcataccgtttattcaatgtgctgtgagtaactttcacttccgtatttgcataacgatgttttaacatctgctgatgaaaggcagcggcaattacaataattatcgctgtgaatactggattatgtgcgccgcctcacgcacaataatcaggctgtaaatcagcttaataactttgcccccacgcagggcggaggcgtcacacctgcaggagaaatcataaatgccatcactcagtaaagaagcggccctggttcatgaagcgttagttgcgcgaggactggaaacaccgctgcgcccgcccgtgcatgaaatggataacgaaacgcgcaaaagccttattgctggtcatatgaccgaaatcatgcagctgctgaatctcgacctggctgatgacagtttgatggaaacgccgcatcgcatcgctaaaatgtatgtcgatgaaattttctccggtctggattacgccaacttcccgaaaatcaccctcattgaaaacaaaatgaaggtcgatgaaatggtcaccgtgcgcgatatcactctgaccagtacctgtgaacaccattttgttaccatcgatggcaaagcgacggtggcttatatcccgaaagattcggtgatcggtctgtcaaaaattaaccgtatcgtgcagttctttgcccagcgtccgcaggtgcaggaacgtctgacgcagcaaattcttattgcgctacaaacgctgctgggcaccaataacgtggctgtctcgatcgacgcggtgcattactgcgtgaaggcgcgtggcatccgcgatgcaaccagtgccacgacaacgacctctcttggtggattgttcaaatccagtcagaatacgcgccacgagtttctgcgcgctgtgcgtcatcacaactgattaaaaggcaggaaccatggagcgcaacgtcacgctcgattttgttcgcggcgtcgccattctggggatcctgctattaaacatcagcgcctttgggctaccaaaggcggcttatctcaatcccgcctggtacggcgctattacgccgcaggatgcatggacctgggcatttcttgatctcgtcggccaggtgaaattcctcacgctttttgcgctgctgtttggtgcgggcctgcaaatgttgctgccccgtggcagacgctggatccaatcgcggttaacgctgttagtcttgctgggttttattcacggtttattgttctgggacggcgatattctgctggcttacgggctggtgggcttaatctgctggcggctggtgcgcgatgcgccatcggtaaaaagcctgtttaatacaggcgtcatgctttatctggtggggcttggcgttttgctgttattggggctgatttccgacagccagaccagccgcgcctggacgccggatgcatcggctattttgtatgaaaaatactggaagcttcacggcggcgttgaagcgatcagtaatcgtgccgatggtgttggcaacagtttactggcactgggcgcacagtatggctggcaactggcagggatgatgctcattggtgcggcgctgatgcgcagcggctggctgaaagggcagttcagcttacgtcactatcgtcgtactggttttgtgctggtggcgattggggtgaccattaaccttcctgccatcgccctgcaatggcagctggactgggcgtatcgctggtgtgccttcttacttcaaatgccgcgggaactgagtgcgccgtttcaggcgattggctatgcgtcgctgttttatggcttctggccgcaattgagccgctttaagctggtgcttgcgatcgcctgcgtcggacggatggcgctgaccaactatctattgcaaacgctgatttgtaccatgcttttttaccacctcggtttgtttatgcattttgatcgcctggagctgctggcgtttgttattccggtatggctggcgaatatcctcttctctgttatctggctgcgttacttccgccaggggccggtggaatggctctggcgtcagttaactttgcgtgctgccggaacggcaatatctaaaacatcaagataacgatctggatcacattcgttaacaaaacggctgtaaccgtttccattgctgtgactcgattcacgaagtcctgtattcagtgctgacaaaatagccgccagcaagcagtcatttactgcaatctcataacaggtagtgaatatgatcaccattcgtgatgtagcgcgtcaggctggcgtctctgtggcaacggtttcccgggtgctcaataacagcacgctggtcagtgccgacacgcgtgaagcagtaatgaaagccgtgagtgagctggattatcggccaaatgccaatgcccaggcgctggcaactcaggttagcgataccattggcgtggtggtgatggacgtttctgatgcttttttcggcgcgctggtaaaagcggtggatctggtcgcccagcagcatcagaaatacgtgctaatcggcaatagctatcatgaagcggaaaaagagcgtcacgccattgaggtgttaattcgccagcgttgtaatgcgttgattgttcactcaaaagcattgagtgacgatgaactggcgcaatttatggataacattcccggtatggtgttaatcaaccgcgttgtgccggggtacgcccatcgttgcgtttgcctggataatctcagcggtgcccgaatggcgacgcgcatgttgctgaataacggtcatcaacgtattggttatctttcttccagccacggcattgaagatgacgccatgcgtaaagcaggctggatgagtgcgttgaaagagcaggatattattccgccggaaagctggattggcactggtacgccggacatgccgggcggtgaggcggcgatggttgaactgctggggcgcaatctacaacttaccgctgtatttgcttataacgacaatatggccgctggcgcactgacagcattaaaagataatggcattgcgattccgttacatctctcaatcatcggtttcgatgatattcccatcgcccgttacaccgacccgcaattaacgaccgtgcgttatcccattgcttcaatggctaaattagccaccgaactggccttgcagggggcagcaggcaatattgatcctcgtgccagccactgttttatgccgacgttagtgcgtcgtcattctgtcgcaacgcgccagaatgcggcggcgatcactaactcaacaaatcaggcgatgtaaccgctttcaatctgtgagtgatttcacagtatcttaacaatgtgatagctatgattgcaccgttttaacgttgtaacccgtatgtaacagtgaataatcactttcaccgaggtaatagcgtcataacaacaattaaagccgttttctggagcgttaccgggcatggaagaacgaattttaaaaagtgagcttcggcgttcagtaacacttcattaactctactgccccgccgagcatttatctcaagcactaccctgcataagaaaaaccggagataccatgaataagaaggtgttaaccctgtctgctgtgatggccagcatgttattcggtgccgctgcacacgctgctgatactcgcattggtgtaacaatctataagtacgacgataactttatgtctgtagtgcgcaaggctattgagcaagatgcgaaagccgcgccagatgttcagctgctgatgaatgattctcagaatgaccagtccaagcagaacgatcagatcgacgtattgctggcgaaaggggtgaaggcactggcaatcaacctggttgacccggcagctgcgggtacggtgattgagaaagcgcgtgggcaaaacgtgccggtggttttcttcaacaaagaaccgtctcgtaaggcgctggatagctacgacaaagcctactacgttggcactgattccaaagagtccggcattattcagggcgatttgattgctaaacactgggcggcgaatcagggttgggatctgaacaaagacggtcagattcaattcgtattgctgaaaggtgaaccgggccatccggatgcagaagcacgtaccacttacgtgattaaagagctgaacgacaaaggcattaaaactgaacagttacagttagataccgctatgtgggataccgctcaggcgaaagataagatggacgcctggctgtctggcccgaacgccaacaaaatcgaagtggttatcgccaacaacgatgcgatggcaatgggcgcggtagaagcactgaaagcacacaacaagtccagcattccggtgtttggcgtcgatgcgctgccagaagcgctggcgctggtgaaatccggtgcactggcgggcacagtactgaacgatgctaacaaccaggcgaaagcgacctttgatctggcgaaaaacctggccgatggcaaaggtgcggctgatggcaccaactggaaaatcgacaacaaagtggtccgcgtaccttatgttggcgtagataaagacaacctggctgaattcagcaagaaataagactgattgggcgcagtcgtttactgcgcccttattgtatggccaacaaggtaaaattatatggtcagctcaacgactccgtcttccggggaatacttgttggaaatgagcggtatcaacaagtcctttcctggtgttaaggcacttgataacgttaatttaaaagtccggccacattctatccatgcattaatgggggaaaacggtgcaggaaaatcgacattattaaaatgcctgtttggtatttatcaaaaagactccggcaccattttattccagggtaaagagatcgatttccattccgccaaagaggcactggaaaatggtatttcgatggtacaccaggagttaaacctggtattacaacgttcggtgatggataacatgtggctggggcgatatcccaccaaaggcatgtttgtcgatcaggacaaaatgtaccgcgaaaccaaagcgatttttgatgaactggatattgatatcgatccgcgtgcgcgcgtcggcacattatccgtttcgcaaatgcagatgatcgaaatcgccaaagcgttttcctataacgcgaaaattgtgattatggatgaaccgacttcttcgttaaccgaaaaagaggtcaatcatctgttcactattattcgtaaattaaaagagcgcggctgcggtattgtttatatctcgcataaaatggaagaaatcttccagttatgtgatgaagttaccgtattgcgcgacggtcagtggatcgccaccgaaccgctggcaggactgacgatggacaagatcatcgccatgatggttgggcgttctcttaatcagcgttttcctgacaaagaaaacaagccgggcgaagtcatcctcgaggtgcgtaacctaacgtcactgcgccagccgtcgattcgcgatgtctcgtttgatctgcataaaggggagatcctcggtattgccgggctggtgggggcgaaacgtaccgatattgttgagacattatttggtattcgcgagaaatcggctggcaccattacgttgcacggcaaacagatcaataaccataatgccaacgaagccataaaccacggatttgcactggtaactgaggagcgccgctcaacgggaatttatgcctatctggatattggttttaactcgttaatttccaatattcgcaactacaaaaataaagttggtttactggataactcgcggatgaaaagcgatacccagtgggtgattgattcgatgcgggtaaaaacgccgggtcatcggacgcaaattggttcgctctccggtggtaatcagcaaaaggtgattattggtcgctggctactaacgcaaccagaaatattaatgctcgatgaaccgacgcgcggtattgatgtcggggcgaagtttgaaatttatcagttaattgccgaactggcgaagaaaggcaaggggattattattatctcctctgaaatgcctgagttgttagggataacagaccgtattctggtcatgagcaatggtctcgtttccggaattgtcgatacaaaaacaacaacgcaaaacgaaattctgcgtcttgcgtctttgcacctttaagattaggggcttcccatgagtgcgttaaataagaaaagttttcttacttacctgaaagagggcggtatttacgtcgttcttttagttttgctggcgattattattttccaggacccaacatttttaagtctgttgaacttaagtaatattctcacccagtcatcggtgcgtattattatcgcgctcggtgtggcagggttaattgtcacccaggggaccgatctttctgctggtcgtcaggtagggctggcggcagtggtggctgcgacattattgcagtccatggataacgccaacaaagtgttcccggaaatggcgacgatgccgattgcgctggttattctgattgtctgtgccattggtgcggtgatcggtttgatcaacggtctgattatcgcttatctcaacgtgacgccgttcattaccacgctcggcacgatgatcatcgtctatggcatcaactcgctctattacgactttgtcggggcgtcgccaatttctggttttgacagtggcttctctacctttgctcagggctttgtcgcgctggggagtttccgtctctcttacatcaccttctacgcgttgattgcggtggcgttcgtctgggtgttgtggaacaaaacccgcttcggtaagaacatttttgccattggcggtaacccggaagcggcaaaagtatctggtgtcaacgtcggcctgaacctgctgatgatctacgcgttgtctggcgtgttctatgcctttggcgggatgttagaagccggacgtatcggctctgccaccaacaacctcggctttatgtatgagctggatgctatcgcggcgtgcgtggtaggcggtgtatcgttcagcggcggtgtggggacggtgattggcgtggtgaccggggtaattatttttaccgtcatcaactatggcctgacgtatatcggcgtaaacccatactggcagtacatcatcaaaggggcgattattatcttcgccgtagcgctggattcactgaaatacgcgcgtaagaagtgatgtgattgtggatattgccggatgcgctgcatccggcaatcggtgccaaatgccggatgcgtctctggttttacaacgttaccgggtgttctttctcgcctttcttaaacttcacttccccgagctcaatacaacccaccgggcagacgtgaccacaaagcagacaacccacacatttctcggtattacaatgcggtgtgcgggttttctcgctccattccatcgcctggtgaccgccgtcgtaacaggaaatataacagcgtccacagccaacacatttatcaagattgatacggggatagacaatataactgcggtctaaatcttccgccgggacaatattgttattcgccagacctaccatctcctgcagcgaatcaaatccctgatcggcgagataatgcgacaacccgcttgccatatcttccactatccgatacccgtactgcatgatgccggtggtcacctgtaacgttgctgcgccgagcaataaaaactcagccgcatcctcccaggtttcaatgccgccgataccgctgattgggaaatcgcgcagttctggatgggtgcgcatttgctgaatgaagcgcagggcgatcggttttaccgctttaccggaatatccggaaatactcgattttccgttaacgatcggcataccgattttctgattaagatcgatattggtgatggatttaacggtgttaatcgccgcaatgccatctgcgccgccgcgcttcgccgccagcgccacttcgcacatatcaccgatattcggcgtcatcttcgccagcattggcagcgtggaaccccgtttcactgcccgacaatatttttctaccagctccgggctttgcccgacatcgctacccatcgcatgagaagtcatttgcggacaggagaagttacactcgatcatatccgcgccagcttcttgcaccaggcgcgccagctcctcccattgctgctcattttcccccatgctcgaagcgatcaatactttgtccgggtaatcttccttcagctgacgcagggcggccagattctcttccaacggatgttcagcaatctgctccatatttttgaagccgataaaaccggtatcttctttcaccagatgatcaaaacgcggcgagacttcgttggcgataaaaaagccgatcgttttaaacaccacgccgccccaacctgtgtcgtaggctttggcacacatctcatagcagttgcctacaggcgaagaagagaggcagaacgggttgggaaacttcacgccgcaaaaagtaatcgaaagatctttcgttaacatgagcaagctccctctaaatagtgatgaatcgcctcggcggcttctttcccggttttcacggcatagaccacggttttgtcaccctcaacaatatcgccagcagcaaagacttgcggatcgcgggtctgataattttgtgttttgatggtgttacgctgcggctctaactccgcaaaggcatccagtctggcatgctgaccgacggcgagaataattttatctgccgccatcgtcagttcgcccggtaaccgtacatgcttaaacgtgactttattgccttccacggctactggcgtgaatccatcgatgatcgaaacgcccagctcccgggcgctggcaaactctttttcgcttgccggaaactcatctaactcttcacgcgctacgcaggttaccgcctgacagccgagaactttcagcgtgctggctacgtccatcgcaacatcaccgccgccgataattaatgcgctttgtggaatgctgatatcgccttgcgcctgccgtgcacgttgcaggaagtccacggcaatctcaacgttgctatgctcaaacagcgataacccggaaccgctcgataaccccacggtgaccagtaccgcgcggttttctgctttcagctgctcaagggtgagtgtgttaccgacttcgttgttgcacttaatggtcacgcccattttttcaatacgggcgatctctgcatccagcactgattgcggtaaccggaattgcggaataccgttacgcaaccagccaccggggtgcgcttctttctcataaatcgtgacgtcataaccctggtttgtcagtgttacactggcctgcaatccggcaggacctgcgccaataatcgcgactttgccgagcattttagtaccgggctgataaatttccatcccagtttgttgttcaaaatcagtaacaaaacgctgtaagcgaccgatatcaatgggagtatcaacaccggcacgggtacaaccgctttgacataatttctccgtcgggcacactctggcacaaacggcaccgagggcattattttcgcgaattgtctcggcagcgcctttaaaattacgaaagtagattgagcgaataaatttccccggatcggtctgtgccgggcaagcctgactacagggagcgtcatgacataataaacagcgagaggcttctttaatcgccagtaaaggcgtaaaagccggagtgagttcatccagataattttgttgcggcatgtgatcttccttaatgctatgagtaattaaggcgaacgctaaatatactcgtcatacttcaagttgcatgtgctgcgtctgcgttcgctcaccccagtcacttacttatgtaagctcctggggactcactcacttgtcgccttcctgcaactcgaattatttagagtataaatattgcgtgctgatattaaggctatgcgcgtggggaaatttatactgtgaaaggattcacaaatagctgcggttcagaatgttatatccgcagcttattgagtgaagtaataattattctcaataattaacagaaaagagaaaatattaacgatagaaaataagataaacaatcatgccgatagataaaattccgaagccgatatatgccaccatataagcgaaaaagagtccgggattttttgctcgccagacatacaccggttccggtgcatttttaacccgtttatcaatcgcgcctgcgcgccagcctttccatgcttcgcggaaacaaaatatcggaataaggaaaaaaacggcaacgacaaaaaactgctgtacatccataactactttccttgtttcttttgtaattcaagtaactgttcgggtgtgacggcgggatacccctgcgcatcttccggcacctggtgcatagccggaatagggaccagcggccctaaaaaacgcggttcacgtttaaaaatataaaggtcagccagcgcaccgaaacgggcggcaaattcgcgaatacgtactgacagcatatctttcggtgacggtacggcataacactgagcctgaatccccatatgcagcgcaataaataatgcccgctcacagtggaaacgttgggtgataataatgaaatcattagtatcgaaaactttgcgtgtacgcacgatggaatccagcgtacgaaagcctgcgtaatcgagaacaatatctgatgggtcgacaccagcagcgattaaatctttgcgcatggtcatcggctcattataactttgcaatgcgttatcgccgctcagtaatagataatttaccttaccgctgttataggcattaatcgctccttgaatgcggtagcgataatactgattaattacgccagtacgataatattttgctgttccgagcaccacaccgacctggcggtaggggagatcctgcaattcgtcgtagatataaggcgcggttttccagctcatccagcgatcgaggccgagcacagtcaacagcagcaagccgatcaggactaacaggctgaggaacacgcgctttaacatgcaggagactcgatctaaggaaaatttccatcaggctactttacccgctggttttgcgcaagaaacggcaaactgtttgccgggaatttcgacaccaggagagggctgccaagccggacaaggcgttcacgccgcatccggcaccaggcttaagcgagaagcactcggtcgatactgtgacagccgagagctttcagtgttgcggaggtggcatcccactgaatcaacggcgcatcggctttttctgccagaaccgcgcgctggatatccgggtaatcataacccttgagattcaatagaattaacgctccctgcaacggtggcagagtcgggttgaatgcggcgttttcagcgtagctgccgctgaaaatacgaccgtctttacattccagcgtgacaccgcttggcgacttactgtaaggcatgtgcgaacggtttgccgctgcaatcgccgcctgagaaagcgcatcaccagtcagcgcatagccgtgatcctgctcgtccatcagcagcgttttaatctccagatctttcggcccaaaggcatccggcagatagtcacgcagcgcgtgtgcctcgcggcccggcagatgaatacgcagatccagaccgctgttcagttcattcataaactgacgacagtgaccacaaggcgtgtagttaacggtgatggctgcaagcgctttttcaccactcaaccaggcgtggctgatcgcgctttgttcggcatgaacggtttgctgcattgtcgcaccaataaattccatattggcaccgaaataccaggttccgctcacaccgcgcgcaattgcgccaacattaaaattcgacaatggcgtacgcgcacaggccgccgccagcggaagtagtgcgaatgccagcgcgtcttcgtccagccccgttgcgctcttcagcgatgagacttgctccccggtcaacaaagcggggaagtacttgtctgccagaataggttccagtgcagattgcaagttatccgcaagttgggcaaaagcggtttgaaaacgtggatgcatggcgttgcctcataatcatgtaatgggataacagtttacgaacccgttatggctttatatgtgatctgaatctcattaattatgcaacgcgtgaaacttacatcaaaaatgcgcgacgcatcgcaaattttagcccattactgccagaataatcgggaaaaggaacggtgcgatcagcgaagtaattatcccgcataacaccagcgctagcgaactaaatgcaccttcctgataatccagctcggcgcagcgcgccgtaccgagggcgtgcgaggcagtccccattgccagaccgcgcgcagctttggtacgaatacgcatcgcattaagcaatgtatggccaaataccgcgccgaggatgccgacgaaaatcacgcaaactgcgctgattgccggaataccgccaatactgccgccaaccgccattgcaataggcgtggtgactgatttcggcaggattgacgcggcgatttccggtgaagcgcccatcaacaatgccacggaagtccccgtcaccatcgcaaccacgctgccgataaaacagatggtgatgatcgatttccagcgcgcgcggatctggtgtagctgctcatataaaggataagccaacgcgacaaccgccggttgcagcaaatcgtttagcacttcgctacctttaaagtagctgtcgtaagagatgccggtgagcattaaaaaaggaatgatcaccaccattgctaccagcaacgggttaagcagggggaacttataccgtgccgccagtttgcgggcggcaaaaaagacaatcaacgtcagcggtaatgaccaccagatattcgccatcattcttctgatcctttctgacctacgactttacgttcaccgtgtaccagttgtgaactccagctcaccaccagaaaaaccaccagcgtactgactgcacaggaaaccactaccgggccaaactgtgcgcggagcaaatcaaaatattgcatgacgcctacgccaatcggcacaaacaatagcgccatatagcgaatcagtacgtagcaccccggattgacccattttgccggaagaatttgcaaggccagcaggacaaacaggatcagcataccgatgatgctgcccggaatggttaccggtagcagggaagcaatgaaaatgcctgcatacaggcaggcataaatcaggacgaaagcgcgtaaatattgccagataatgttcagtgtcttactcataatcaacaccccagatgagatggattcatcatacaattaattcgtaaaacgtgctaccgatcacattaagaaatcagcgcttattttttcgctccccggcattacgcaatgcgcaacgaactcaggcatacatcaagcatagagagggattacagtttgcagcaatccctctttgcagacctttaatccgttgaccataggcgctaacatggcgcctcatttttttgcgggtgaagatatgcgtgtgttactggctccgatggagggtgtgcttgactctctggtgcgtgaattgctgaccgaagttaacgactacgatctgtgcatcaccgagtttgtccgcgtggtggatcaactgctgccggtaaaagtctttcatcgcatttgccctgagctacaaaacgccagccggacaccatctggtacgctggtgcgcgtgcagttgttaggtcagttcccacaatggctggcagagaacgccgcccgtgcggtggagttaggttcctggggcgtggatctcaattgcggctgcccgtcgaaaacggttaacggtagcggcggcggcgcgacgttactcaaagatcctgaactcatctaccagggtgcaaaagcgatgcgtgaagctgtaccagcgcatttgcccgtcagcgtaaaagtgcgtctgggctgggacagcggtgagaagaaatttgaaatcgccgatnnnnnnnnnngttcaacaggctggcgctacggagctggtggtgcatggacggacaaaagagcagggttaccgcgcggagcatattgactggcaggcgattggcgagattcgccagcggctgaatattccggtgattgccaacggcgaaatctgggactggcagagcgcgcaacaatgcattgcgatcagcggctgcgacgcagtgatgattggtcgcggggcgctcaatattcccaacctgagccgggtagtaaaatataacgaaccgcgaatgccgtggccggaggtggttgctttgctgcaaaaatatacccgtctggaaaagcagggcgataccgggttatatcacgttgcgcggattaaacagtggttgagttatttgcgtaaagaatacgatgaagcaacggaattatttcagcatgttcgggtgttgaataattcccctgatattgcaagggctattcaggcaattgatatcgagaaactctaaaaaaccatagtgatgttttttgacaatgtgttagctctttatcaataggccgcacggttgtttggtggcgtcaaaattgccgaggcgttccctgaaggccggggcagcccacatggatgtgggctgagggcgcgttttacagggatgttacctcgcgcccgacccggtagccgtaagggataagccgagggcaccgcgcagcggcgattttgttcgccagagcccgggggtgcagggggcggcggcgattggccgccctgcgcgctccttgcgccagtgattatatgaagcaatgcacatgacaggagcgcaacaggatgagagactgaaatattctcgttattttcggacctgatgacattaattaattttaaaatatcatcttaaatacgccagtcaccaccagtagcccaatcaggaaaataatcaatacagcccagagtataattttcattggcgttcctttatttgtgagtgctgaataagtataggaaaaaacgaagccctttgccgttatccataaacgattaagataaatcggaagatatcatttacttagtctatatttttctggatatgtcgttttattgctactgatgtattgccacgcgaaactaaaaaatatatcgcaacacacggtaatctccgcgcaccttttcttacctgattattcccccatgaatcgtgattccttttatccagccatcgcctgttttccgctgttactgatgctggccgggtgtgcacctatgcatgaaacccgccaggcgttaagccagcaaacgcctgctgcacaagttgacaccgcattacccacggcgctgaaaaatggttggccagacagccaatggtggctggagtatcacgataatcaactcacttccttaattaacaatgcactacagaacgcaccggatatgcaggtggctgaacagcgcattcagctagctgaagcccaggcgaaggcaattgctactcaggatggtccgcagatcgacttttctgcggatatggagcggcaaaaaatgtcggcagaaggcttaatggggccgtttgctctgaacgatccggccgcaggtacgaccggtccgtggtacaccaacggaacttttggcttaacggcgggctggcatctcgatatctggggaaagaatcgggcggaggttactgcccgcctgggtacggttaaagcacgggcggcggaacgcgagcaaacccgccaattgctggctggcagcgtagcccgcctgtactgggagtggcaaacccaggcggcgttaaacacggtcttgcagcaaatagaaaaagagcagaacaccattatcgcgaccgatcgccagctatatcagaacgggattacttcttcagttgaaggtgtggaaaccgatattaatgccagcaaaacccggcagcagctcaacgatgtcgcggggaaaatgaaaattattgaggcacggttaagcgcacttacaaataaccagacaaagtcattgaagcttaaaccggtcgcgttgccgaaagtggcaagccagcttcctgatgaactggggtactccttactggcccggcgggcagatttgcaggcggcgcactggtacgttgagtcatcgctaagcaccattgatgcggcaaaagcggcattttatcctgacatcaacctgatggccttcctgcaacaggatgcgttgcacttaagcgatctgttccgtcattccgcgcagcaaatgggcgttacggcaggcctgacgctacccattttcgatagtggtcgtcttaacgccaatctcgatatcgcaaaagccgaaagcaacttgtctatcgccagctacaacaaagcggtggttgaagcggtgaatgacgtggcgcgggcagccagtcaggttcagacacttgcggagaaaaaccagcatcaggcgcaaattgagcgcgatgccttgcgtgtggtaggtcttgcgcaggcgcgctttaacgcgggcatcattgctggttcccgcgtcagcgaagccagaatccccgcgctgcgtgagcgggccaatggcctgttattgcaagggcagtggctggatgcttccattcaactcactggtgcgttgggcgggggttacaaacgctgatgatatgcgccttctatacttaacgtttattcagcgttaagtggagaactcgatggcacaggttgcgattattaccgcctccgattcggggatcggcaaagagtgcgcgttattactggcgcagcaggggtttgatattggcattacctggcactcagatgaagaaggggcaaaagataccgcgcgtgaggtagttagccacggcgtacgtgcggagatcgtgcagctggatctcggtaaactgccagaaggtgcgcaggcgctggagaaactcattcaacggctggggcgtattgatgtgctggtgaataatgcgggcgcaatgaccaaagcgccgtttcttgatatggctttcgatgagtggcgcaagatttttaccgttgatgtcgatggtgcatttttatgctcacaaattgcggcccgccagatggtgaaacaagggcagggcggtcgcatcatcaacattacgtcggtacatgaacatacgccgctgccggatgccagcgcttacacagccgctaaacatgcgctcggcgggttaaccaaaacgatggcgctggagctggtcaggcataagattttggtgaacgcagtcgcgcctggggcgatcgccacgccaatgaatggcatggatgacagcgacgtgaagcccgacgcggagccttcgattcctctgcggcgttttggcgcaacgcatgagattgccagcctggtagcgtggctgtgctcagagggcgcaaattacaccaccgggcagtcgttgatagtggatggcggctttatgttggcgaatccgcagttcaacccagaatagcgcagtgaggtgcgtggttatttcaatgggtaaaattttggtaggcatgataagacgcacaagcgtcgcatcaggcatggtgcaccggatgtcggatgcggcgcgaacgccttacccagggcaatggttttacgcctgatgatccggctttttcttcccgcgccgtttcagccaccagcgcacgcccaccaccagaaccacgaccagaatcaaccagacccagtgcttcaaatgctggtcgagattgtgcaaccacggcgcaatcacctgaccaccagcgtaaccaatagtggtaaaaatcaacgcccaggcaaatgcgccgagaatattcagcggcagaaagattttcggcggcagctggctggcaccaatcagcgtcgggccaatcacccgaaagccatacataaagcgcgtaccaatgacaaacagatacggatggcgttggataagtttctgcgcccgctcaattttatcctgatgtttcgagaaacggcgtaacagcttgccgccaaaccgccgcccgcacagatagagcacctggtcgccaatcatgccgccaagcgccacagaaagtaccaccagcgggaactttaatagcccctgatgcgccgcaacgcctcccagcaaagtcacggtttcaccttccgccaggctaccgatcaccagcgcggcataaccatattgtgagataagtgtattgagatccataggccagtctgtctccctttggttgccagtaagcatacaccctgtgaatcattcacgctgaaaaaggacgttcatcagacagtgaaaattacatgggcgaacaaaaaataatcacaagctgacttatacttgaactgtcaggttcatgaactcacaacaagggggcggtatgagccatgtctggggactgttttcccatcccgatcgtgaaatgcaggtgattaatcgcgaaaacgaaacgatttctcaccattacacccaccacgttttgctgatggcggcgattccggtgatttgcgccttcattggcactacacagattggctggaattttggcgatggcactatcctgaagttatcctggtttaccggactggcgctggctgtcttgttttacggcgttatgctggctggggtcgcggtgatggggcgggtcatctggtggatggcgcgtaattatccgcagcgtccgtcacttgcgcactgcatggtcttcgcgggctacgttgcaactccgctgtttttaagcggtctggtggcgctttatccactggtctggttgtgtgcgctggtcggcacggtggcgctgttttacaccggctacctgctttaccttggtattccgagcttcctgaatatcaacaaagaggaaggccttagcttctctagttcgacgctggcgattggcgtgctggtactggaagtgctgctcgccctaaccgttatactatggggctacggttatcgtttgttctagaaagttctctgacgttgcattgctggcgtaaatgtcagcaatgcagcatttcctcacgattctcctttgacgatcgcactttttgctcgttatgatggcgtcgctagcctcagtaaatccttactccggcggtgcgcaacccgtgcgcgtgaaccactatctgaatgctcatcatgccgaaatttcgagtttctttatttagcctggccctgatgctggctgtgccttttgcaccgcaggccgttgcgaaaacggcagccgctaccaccgcttcacaaccggaaattgcctccggtagcgcgatgattgttgatctgaataccaacaaagtgatctattcgaaccacccggatctggtgcgtccgattgcgtctatcagcaaattaatgaccgcgatggttgtgctggatgcacgactgccgctggatgaaaaactaaaagtggatatcagccagacgccggagatgaaaggggtctattcgcgcgtacgactgaatagcgaaatcagccgtaaagatatgctgttgctggcgctgatgtcttcagaaaaccgcgcggcggcaagccttgcacaccattatcccggtggttacaaagcctttattaaggcaatgaatgcgaaagcgaaatcgctcggaatgaacaacacgcgctttgttgaacctaccggattgtcggtgcataacgtttcaactgcccgtgacttaaccaaactgctcattgccagcaaacaatatccgttgatcgggcagttaagtactacccgggaagatatggcaaccttctctaacccgacgtatacgctgccgttccgcaatactaatcatctggtgtatcgcgataactggaatattcagttaaccaaaaccggctttaccaatgcggcgggccattgtctggtgatgcgtacggttatcaataataaaccggtggcgctggtagtgatggacgcgtttggcaaatatacccattttgccgatgccagccgcctgcgtacctggattgaaaccggtaaagtgatgcctgtgccggcagcagcgttgagctataaaaaacaaaaagccgcccaaatggcggcggcggggcagacggcacagaacgattaagtgaattcggatggcgatactctgccatccgtaatttttactccacttcctgccagtttttccgtttactggttttaccgatccccggattcatgctgttggtcggatcgttctcgcgatagaacttctgcaacgtctccggtgctttatacaaatgaccgacgttatgctcggcagggtattgcgcgccgcgctgctgtagcagttccagcatctgttcttttaacgcatgcacatccacgccttttttcactatgtaatcctgatggaagacatagcacataaaatggccgtaatagagcttgtgcaccagctggctgtcgatctccggcggtaaatgctcataccactcggtgtcgttacgccgcagagcgatatccaacgccagaatgtcttcgacttcatcggaatgcaccgcctgataacgaattgctgcgcccgcagcggcgaaacggtgtaaaaacgctttgctgccttcctccggcgtacagacaaagaaatcgccttcggcctgtttgaaataatccaccaaccacgatttggcttcgcccacgccatcgcccgccatttttaacagcagatgatgctcgtatttatcgcgccagtttttcatgcgcggcggtaaatggctggggaacaggtgaccgaatttttgcatcgcacggtcagtaaaatgcggacggaagaatttcactttctccagcatcgcatcggtgcgtcccttgagattaaagaagaacggcatcttgtcggtgcctaacttatcaatcatcaggaaggtgtctttgccgtatttttccgcaatatcgtagatatcccggtgcatatattccccggcaaccggcagattttcgaagttagccagaatatgacggcggatttcggtcagcacttccggctggttggtgccgatataaaacacctgctgatttttttccgcttcgaaggtatctagacgtaccgcaaagacggccagcttcccggcgcaaccagaagattcaaataaccgatccggatcggcgttataacgtgcgggcgtgtcggcttcaatatcacgaacgcggtggacatagtcataatcgtgggcgtgacgaccatcgtgacgcacatcgtcatctttgatgcgatcatcatccagcttgctaaggatctgctccggcgtttcgcccagatcaatccccagatggttcaccagcgtcagtttgccgcgttcatttatacgcgcgaataacgacatttcggtatacgccgggccacgttgcaccagcgagccgccggagttgttacaaataccgccgataaccgatgcgcctatacacgacgatccaatcaccgagtgcggttcgcgtcccagcggtttgagggctttttccagcgaatagagcgtggtgcccggataggccagcacctgttcgcccttgccaagaacgtgcagcttgtcgagacgcagggtgctgatgatcacgatatcgcgatcatagtcgttaccgtttggcgtcgatccttcggtcaggcctgtattggcagcctgcatcagaataattttgtcggcggtgacacaggctttcagcacccgccacaattccagtagtgagccagggaaaacgacagccagcgcgtcgccctgaccagaacggaagcccttgcgatagcgggccgtttttgcgggatcggtgagcaggtgtgaatgaccgaccagacgggcaagttcattcaaaaaggctttattatcagttgttgtcatggaagacattttccactccttgtggtggcgaaaaaatatcacaaactagaatagcgccttgtatgacaattcagcgagtgaatattttgaaaattcagacaataaactgagcattctttttctctctccatcatgcttatggcaaactacggtttttgcaccattttcgctgcctcgtcgggcaacagaggaagaaaaatccatatgaaatggctatnnnnnnnnnncgcggtgagtctggccctgcagccagcactggcggatgatttattcggcaaccatccattaacgcccgaagcgcgggatgcgttcgtcaccgaactgcttaagaaaatgacagttgatgagaaaattggtcagctgcgcttaatcagcgtcggcccggataacccgaaagaggcgatccgcgagatgatcaaagacggtcaggttggggcgattttcaacaccgtaacccgtcaggatatccgcgccatgcaggatcaggtgatggaattaagccgcctgaaaattcctcttttctttgcttacgacgtgctgcacggtcagcgcacggtgttcccgattagcctcggtctggcctcgtcttttaacctcgatgcagtgaaaacggtcggacgtgtctctgcttatgaagcggcagatgatggcctgaatatgacctgggcaccgatggtcgatgtctcgcgcgatccgcgctggggacgtgcttccgaaggttttggcgaagatacgtatctcacctcaacaatgggtaaaaccatggtggaagcgatgcagggtaaaagcccggcagatcgctactcggtgatgaccagcgtcaaacactttgccgcatacggcgcggtagaaggcggtaaagagtacaacaccgtcgatatgagtccgcagcgcctgtttaatgattatatgccgccgtacaaagcggggctggacgcaggcagcggcgcggtgatggtggcgctgaactcgctgaacggcacgccagccacctccgattcctggctgctgaaagatgttctgcgcgaccagtggggctttaaaggcatcaccgtttccgatcacggtgcaatcaaagagctgattaaacatggcacggcggcagacccggaagatgcggtgcgcgtggcgctgaaatccggaatcaacatgagtatgagcgacgagtattactcgaagtatctgcctgggttgatcaaatccggcaaagtgacgatggaagagctggacgatgctgcccgccatgtactgaacgttaaatatgatatgggattgtttaacgacccatacagccatttggggccgaaagagtctgacccggtggataccaatgccgaaagccgcctgcaccgtaaagaagcgcgtgaagtggcgcgcgaaagcctggtgttgctgaaaaaccgtctcgaaacgttaccgctgaaaaaatcggccaccattgcggtggttgggccactggcggacagtaaacgtgacgtgatgggcagctggtccgcagccggtgttgccgatcaatccgtgaccgtactgaccgggattaaaaattccgtcggtgaaaacggtaaagtgctgtatgccaaaggggcgaacgttaccagtgacaaaggcattatcgatttcctgaatcagtatgaagaagcggtcaaagtcgatccgcgttcgccgcaagagatgattgatgaagcggtgcagacggcgaaacaatctgatgtggtggtggctgtagtcggtgaagcacaggggatggcgcacgaagcctccagccggaccgatatcactattccgcaaagccaacgtgacttgattgcggcgctgaaagccaccggtaaaccgctggtgctggtgctgatgaacgggcgtccgctggcgctggtgaaagaagatcagcaggctgatgcgattctggaaacctggtttgcggggactgaaggcggtaatgcaattgccgatgtattgtttggcgattacaacccgtccggcaagctgccaatgtccttcccgcgttctgtcgggcagatcccggtgtactacagccatctgaataccggtcgcccgtataatgccgacaagccgaacaaatacacttcgcgttattttgatgaagctaacggggcgttgtatccgttcggctatgggctgagctacaccactttcaccgtctctgatgtgaaactttctgcgccgaccatgaagcgtgacggcaaagtgactgccagcgtgcaggtgacgaacaccggtaagcgcgagggggccacggtagtgcagatgtacttgcaggatgtgacggcttccatgagtcgccctgtgaaacagctgaaaggctttgagaaaatcaccctgaaaccgggcgaaactcagactgtcagcttcccgatcgatattgaggcgctgaagttctggaatcaacagatgaaatatgacgccgagcctggcaagttcaatgtatttatcggcactgattccgcacgcgttaagaaaggcgagtttgagttgctgtaatgctttagtaagggcgcgacgtttgcgccctttgtaggccggataaggcgctcgcgccgcatccggcaggaaacgccggaccgaatatgccccttaagtatttatctgattctgcaactgaatccttccgctcaagctaaccccgccattatcaactatgcttttctcttaattcgctgaaaacaacagtaaaagaatgaggaaagcatcatgccactcttaaagctctgggcaggttcactggttatgttggcagccgtgagcctgccgctacaggcggcttcccccgttaaagtcggttcaaaaatcgataccgaaggtgcgctactcggcaatatcattttgcaggtgctggaaagccacggcgtaccgacggtgaataaagtgcaactcggaacgactcctgtggtgcgcggggcgattacttccggtgaactggatatctatccggaatataccggcaatggcgctttcttctttaaagatgaaaacgatgcagcgtggaaaaacgcgcagcaaggttacgagaaagtcaaaaagctcgattcggagcacaacaagttaatctggctgacgcccgcgcctgcaaataacacctggactatcgccgtgcgtcaggatgtggcagagaaaaataaactcacttcgcttgccgacctgagtcgttatctgcaagagggcggcaccttcaaactggcagcctcggcagagtttatcgaacgcgccgatgcgttacccgcgtttgaaaaagcctatggctttaagctcggtcaggatcagttgctgtcactggctggtggcgacacggcggtgacgatcaaagccgctgcccagcaaacctctggcgttaatgctgcaatggcttacggcactgacggcccggtagcggcgctggggctgcaaaccttaagcgatccgcaaggcgtgcaacctatctatgcgcctgcaccagtggtgcgtgaatcggtgttgaaggagtatccgcaaatggcacagtggctacagccagtcttcgccagcctcgatgcaaaaacattgcagcaactgaatgccagcattgcagtggaaggactggatgccaaaaaagtggctgccgactacctgaaacaaaaagggtgggcgaagtaatttcccgtgacttatctacgtattaatcctgttctggcgctgctgctgttgctgacggtaatcgcagcggcgctgccgtttatcagttacgcgcctaatcgtttagtctcgggtgaagggcgacatctctggcagctgtggccgcaaacgatctggatgctggtgggcgttggttgcgcctggctgacagcctgttttattcccggtaaaaaaggcagcatttttgcactcattctggtgcaattcgtcttcgtattgctggtgtggggagctggaaaggcggcgacccaactggcgcaaaatggcagtgcgctggcgcgtaccagcctcggcagtggtttctggctggctgcggcgctggcattgctggcctgtagcgatgccatccgccgaatctccacgcatccgctgtggcgctggttgttgcatatgcagattgccattattccgctgtggttgctgtactccggcacgcttaacgatctctcactaatgaaagaatacgccaaccgtcaggatgtgtttgacgacgcgctggcacaacatcnnnnnnnnnntgtttggtgcggtgctgcctgcgttagtgattggtgtgccgttgggcatctggtgctacttttccactgcgcggcagggggcaattttttctctgctcaatgtcattcagaccgtgccttcggtggcgctctttggcctgttgattgcgccgcttgccgcgctggttacggcctttccgtggctggggaagctcggcatagcaggaaccggaatgacacccgcactgattgcgctggtgctctatgccttgctgccgctggtgcgcggcgtggtagtcggtttgaaccagatcccgcgcgatgtgctggagagcgccagagcgatggggatgagcggggcgcagcgtttcctgcatgttcagttaccgctggcgttaccggtatttctgcgcagcctgcgggtggtgatggtgcaaactgtaggtatggcggtgattgcggcgttaatcggcgcaggcggttttggtgcgctggttttccaggggctgctaagcagcgccattgatttagtgttgctgggggtgatcccggtaattgttctggcggtgcttaccgacgcgctgttcgatttgcttatcgcactgctgaaggtgaaacgtaatgattgaatttagccatgtcagcaaactgtttggcgcacaaaaagccgttaacgatctcaatctcaattttcaggaagggagtttttcggtgctgattggcacatctggctccggcaaatccaccaccctgaaaatgattaaccgcctggtggaacatgacagcggcgtgatccgctttgccggagaagaaattcgctcgctgccagtactggagttgcgccgccggatgggctatgccattcaatctattggcctgttcccccactggagcgtggcgcaaaacatcgctaccgtgccgcaattgcaaaaatggtcgcgggcgcggattgacgatcgtatcgacgaattaatggcgctactggggctggagtcaaatttgcgtgagcgttatccgcatcagctttccggtggtcagcagcaacgtgtgggagtggcgcgcgcactggctgccgatccgcaagtcttactgatggatgaaccttttggcgcactggacccggtaacgcgcggcgcgttgcaacaagagatgacgcgcattcaccgtttgctggggcgcactattgtgctggtcactcatgatattgatgaggcgctaaggctggcagaacatctggtattgatggatcacggtgaagtggtgcagcaggggaatccgctgacgatgctgactcgtccggcgaatgattttgtccgccagttttttggacgtagtgaactgggtgtgcgcctgctttcgttacgtagtgtggcggattacgtgcgtcgcgaagaacgggcagaaggtgaggcactggcagaagagatgacgctacgcgatgcgctctccctgtttgtcgcgcggggatgcgaggtgctgccggtggtgaacacgcagggccagccttgcggcacgctgcattttcaggatctgctggaggaggcgtaagcgtatgaagatgttgcgcgatccgctgttctggctcattgctttgtttgtggcactgattttctggctgccttacagccagccgctgtttgctgccttgttcccacaactgccacgacccgtttatcagcaagaaagttttgcagctctggcactggctcatttctggctggtgggaatttcgagtttgtttgcggtgatcattggcactggtgccggaattgctgtcactcgcccgtggggcgcggaatttcgcccactggtggaaactattgccgccgttggacagacttttccgcctgtcgcagtgctggcgattgccgttccggtgatcggctttggtctgcaaccagcgattatcgccttgatcctttacggtgtgctgcccgtcctgcaggcgacacttgccgggctgggagcgattgatgccagcgtgacagaagttgcgaaaggtatgggaatgagtcgtggtcagcgactgcgtaaggtcgagctaccgctggcggctccggtgattctggcgggcgtgcgaacttcggtgattatcaacattggtacggcgacgatcgcctcaacggtaggggccagcacgctgggtacgcccatcatcatcgggcttagcggatttaataccgcgtatgtgatccagggggcgttactggtggcactggcggcgatcatcgcagaccgcctgtttgaaaggctggtgcaggcgcttagccagcacgcaaaataaaggtataacctgcgagcatgacgccaccaattccgcctaacgccataaacaggaacagggcgatgaccccaattttagctatgcgcatattgcactccttatgttaacgaaaggattgtacagtaaagcgcatttgttaacgaatcattaaatgccgagtgggaaaatatcatggccttgttcttgccaactggtgagttgctgctgttgggcggaggttcgattttcaccgcaccacaccagcaatgtacggccttcgaatagttcagggcgtagttgattgagcgagtgggcgaggacatcaatgcgccatccttgttgactggcaatccagccctccagccacagacgggtggtatcctgaatattccagccaaccaccagcgcatctttaccctgttttttacgtgccgaagccagacaaatggcgatgtagttgatcagtacgccgtcgaggatcgccagcagcgcctggagagtcggttgttggcattgaagtcgtcggcgcagaggaataaacagatgtgtggtgagtgtctgggcggggtaatcctgaccgcgctctttgatccacgttcgcaggctatgcagattgccgctttgcaggtaggtcagtaatgtttcttgctgatcgcgccagccgttctgcacatcaacattttcattactgagcagcattttaactttgctgacctgcacgccgttgtcgatccagcgtttgatctcgcggatacggtcaatatcggcatcgttgaacagtcgatgaccgccgtctgtccgttgcggtttcagcaacccgtaacgcctctgccacgcgcgtaacgtgacagggttaatatcacaaagcaacgccacttcaccaattgtgtaaagcgccatcgtctcacccttgctcgcgaggtcccggtttaactttagacgcagttttgcgaaccaggtagttttgcccgttttttgtgcatctatagggtgattttatttttgccaggcgattttgagtgatcgtactcacgaattctcatttttctgcaagagttcaaagaaagttaaacgcaggcaatgtatgttacgcgttttaaagggaagtgtggtttgcgggtatgtacgattttaatctggtgttgctgctgcttcagcagatgtgcgtttttttagtcattgcgtggttaatgagtaaaacgccattattcataccgttaatgcaggtcacggttcgtctgccgcataaatttctctgctacatcgtcttttccatcttctgcatcatgggcacctggtttgggttgcacattgacgattctattgccaatacccgtgcgataggcgcggtaatgggcggcttactcggcggtccggtcgtcggtgggctggttggtctgaccggcggcttacatcgatattcgatggggggcatgaccgcgctaagttgcatgatctcaaccatcgttgaaggattgctcggcggcctggtacacagcatcctgatccgtcgcgggcgcactgataaagtctttaaccccattaccgccggtgccgtcacgttcgtcgctgaaatggtgcaaatgctgatcatccttgcgatcgcccgaccttatgaagatgcggtgcgtctggtgagtaatattgctgcaccaatgatggtcaccaataccgtcggcgcggcgctgtttatgcgtatattgctcgataaacgcgcgatgtttgaaaaatacacttctgctttttctgccactgcgctgaaagtggcagcctcgacggaaggcattttgcgacaggggtttaacgaagtgaacagcatgaaagtggctcaggtgctgtatcaggagctggatattggtgcagtcgcgattaccgatcgagagaaattgctggcctttaccggaattggtgacgaccaccatttacccggcaaaccgatttcttcgacttacaccttaaaagcgattgaaaccggtgaagtggtctacgctgatggcaacgaagtaccttatcgttgctctttgcatccgcaatgcaaactggggtcgacgctggtaattccgttgcgtggcgaaaatcagcgcgtgatgggcaccatcaaattgtatgaagccaaaaaccgtttattcagttcaataaaccgcacgctgggcgaggggattgcgcaactgctttcggcgcagattcttgccgggcaatatgagcggcaaaaagcgatgctcacccagtcagaaatcaaactgcttcacgcccaggtgaatcctcattgtttgtttaatgcgcttaacaccattaaagcggtgatccgccgcgacagcgaacaggccagccagctggtgcagtatctttccacttttttccgcaaaaacttaaagcggccttcggagtttgttactctcgccgacgaaattgaacatgtgaacgcttatctgcaaattgaaaaggcgcgcttccagtcgcggttgcaggtcaacattgctattccgcaagaattatcccagcagcaattgcccgcgtttaccctgcaaccgatagtggaaaacgccattaaacatgggacatcacaactgctggatacagggcgagtggcaatcagcgcccgacgtgaggggcaacatttgatgctggagatcgaagacaatgccggtttgtatcaaccggtaaccaatgccagtgggctggggatgaatctggtggataagcgtttacgtgaacggtttggcgatgactatggaataagcgtcgcctgtgagcctgatagttacacccgaataacgttacgactaccatggagggacgaggcatgattaaagtcttaattgtcgatgatgaaccgttagcacgggagaacctgcgcgtatttttgcaggagcagagcgatattgaaatcgttggagagtgttcaaacgccgtggaagggatcggcgcggtgcataaactgcgcccggatgtgctgtttctcgatatccagatgccgcgcatcagtggtctggaaatggtggggatgctcgacccggaacatcgtccgtatattgtttttctcaccgcgtttgacgaatacgctattaaagcctttgaagaacatgcctttgattatctgctgaagccaattgatgaagcgcgactggagaaaacgctggcgcgtttgcgtcaggaacgcagcaagcaggatgtttcgctgttaccggaaaatcaacaggcgctgaaatttatcccttgtacggggcatagtcggatttatttgctgcaaatgaaagatgtggcatttgtcagcagtcggatgagcggcgtctacgttaccagccacgaagggaaagagggctttaccgaattgacattacgtaccctggaaagtcgtacaccactactgcgctgccatcgtcagtatctggttaacctcgcgcatttacaggagattcgtctggaagataacggccaggccgagttgattttgcgtaatggcttaaccgtgccggtcagccgccgttatctgaaaagcttaaaagaggcgattggcctgtaaaagactgctaaaatggctttttgcctcatcaacacctgaaggcctcatgctaagtaacgatattctgcgcagcgtgcgctacattttgaaagccaataataatgacctggtgcgtattctggcgctgggtaatgtcgaagccaccgcggaacagatcgccgtctggctacgtaaagaagacgaagagggttttcagcgttgtccggacattgttttgtcgtcattcctcaatggcctgatttatgaaaaacgcggcaaggatgagtctgctccggcactggagccggaacgtcgcattaataacaacatcgtgctgaaaaaattacgcatcgcgttttcgctgaaaaccgatgacattctggctatcctcaccgaacagcagttccgcgtttcgatgccggaaattacagcgatgatgcgcgcaccggatcataaaaacttccgcgaatgcggcgatcaatttttacgttattttctgcgtggactggcagcgcgccagcatgtgaagaaaagctaagacgggtatggcggccatgcgaaacatggccgccgacagattatttcacttctttaaaaccagcggctttcatcaccagttccatttgcgccatagtgataccttttttggcatcttcagcagaaacgttgattcctgaaataccctgcagggctttaaaatccactttttccatatcgatagtcacgttttcctgcgcgtaggtatctgtataggttaatttttcttcaacacccgcgatgtttttgtatttggcgcttaacggctcaagtgtcttggcagcgtcttctttggtggttgcaccaatagaagcaaattgaattttggtttcagaagattgcttaagcaccttgtcacctttgtagacataggtaatggcaatttcagtgccgttcagattggcgctgaatttcttcgattcttctttgtcaccgcagccagcaagagagaaaaccagaacagatgcaacaacgagggaaaacagcttattgaaagccttcatgtaaaactccattttatttaatcaagaaactggtgactctcaccaggggctatatagaatatgcctaataccgtgacgtgagcagtccggaactggagtagaactcttagtaaaaagcactatttcatccttgttgctgaagcatggggaataattgttcgcaaagtaaaacaccgttattcattgcttctacccgtgcctcgctttctgtattacgaaattgtcccaacacatgtgccagccgataaaaaccgaccgcggagaggtcattcgccagcaactctgcctgactaatagcgctctgttcctgatagcgccagccgttatggagcagttgaataagtaacgcctggcagcgcatcagcaactgatgagcggtagacggcacaggcaaaacgctggcagaaggtagcggtgccacaggcgcagtttctgcgtccagcgcccaggcgcgggtttttgtcatcatcacccgtggttccagtgtcaattgcccatcaacaaaactgacaaagccagaaaccagactcacggggtcgtctgtttgttgcaaaagcgccgccatgcgttcaacggcaaaaggagaacaggcagatgccggaagggataacgtcaggagattatcttcaccttcgccgctgattacctgcgcatccagcgtctggcggctgctatcccaaccgagcgaaatacactcagcgaccggcagaataaataagttatcgacctgattaagaggccgtatgcaggcggggggacgctggcgtaaatattcccgcaaagccacaatgcccggctggcgtaacggcgcgctcaacatttgccaggcatcaggcgacagcggcacaacgctgcttaagcggttgcgggtagctaacagcagctcgccatcggcactgcgttttgctgcttgtgaaacaatttgcccacccgccagtgcgccagcctgaaaactaaacagccgacgcgtagctgccggtgagttttcctgttcacttcgcggccaactgcgcgaaaggtgcaaaatactgccggtgtcgggatcggtaaaccagatgcgtaaaccataatgctcaatatcctgccagcaacgcatacctaaagacaccagccgcagatgatcaagctttgcttctccggcaatgccagagccaacgaccgtgcgccacggcacaggaggaacttcaccaacactgtcgcgccgggccatctcttgtgcgcaatttaatcgactgtttaatgccgcaagctgacgtaagcattctccggcatgatagtggctggcgcggacgtggaaggcatcaacgcttgcccgtagctgtcgtagtgattcactcacccatcgccagttgcagcgttccgccgcctgctgcgcgcgactgaaagcggcctcgtagtgaataagcggctggctgatgccgcccagccataatgcctggcttaattgctgaacatattgacgacacgcgttaccctcgtcgttggcaaacggatcgtcagatgatgtgacgtgttcgctgcgcatctgccagattaaatgagtaaattccgcttgctgagttttggcctcgacgaaggcctgcacagccagtacgacatgttcgcaaagtgtgccttcaatacaatcacaacgggcgaaacgaatactgctgcgggaataaaaacgcacatcgctcatcggtaagcgggcagagggaatttcgcccggcgtacagaacaactcaatggtgatgcctttaccgaccaacgcctgtgcgcgtttgcgggtggcatcgggcagggtagccagttcttccagccagattgccggatcccacgcttcttctttttccgtaggctgggcggtagtacaaagtcgttgataacttaacacaagcatcacgcgatgacggcacataccgctggccccgcagctgcactgagcctctttcagtgcctggccgttcgccagctgggtacggacaccgtcactgaaggtggcgattaaagcgctgttctcatggctgatttccgggacgttgccattttccagttccttaagactgcgcttaacaaaaccggcattgcttaacgccgtcagggcctgcggtgtcagttctaataattccggacgtagtgaattcatgactgaagattctccgcaagccatgatgccagctcgcccggtgtcatggcggctatttgtgcgccgacatttaccagcgcctgggccgtatcgtggtcatagcaaggtgttgctgtgctatcgagcgctgccagtcccagcactttgatgccgctctggacacactttttcacctgatgcgtcagtaatgatgatgaacccccttcgtaaaaatcgctcacgaggataatgacgcttttcgctggttgttcaataagttgccgaccatactccacggcactggcgatattggtcccgccgcccaactgtactttcattaataactctaccggatcggcaacgtctgccgtgagatcaacgacgcttgtgtcaaacgccaccagatgggtacgaatgccgggtaactgccacaaacaggccgccatcaccgcagagtggatcaccgagtccaccatcgatccgctttgatcaaccagtaagaccagttgccattgttcgctttggcgtttaatgcggctgttaaagcggggggattcgatatacaacttgccgtgttgcgggtgccagtgttgcaggttggcgcgcagagtacttttgaaatcaaagtttcgcgccagtggaattaatgagcggcgacggcgatcgcggacaccagaaaaagcctgacgaacttcctttgccagtcgcgccataatttcttcaacaacctggcgcactatctggcgggcggcagccagtacttcgggattcatcagatgtttggtgtgcaaaacggcgcgtagcaggctttccgaaggctgcatacgttccagcacgtcgagatttgtcaccacatcttcaatgccgtagcgcagtacggcatcgctttccagccgctcaatcacctgttgcggaaacagcgtgtggatactgttgatccactcaggagtggtgagatttgagccacctaatccaccagagcgttcaccacgctggagccgttcaggatcgcgcccatacagccactccagcgcgtgatctatctgccgggcgttgtcatccagcccacaaagcgtcgtttctgccgcttcgccaagaattaatcgccagcgttgtagctcacgggtggtcagaagatcgttcagttcagacatggaaaactccccagtgttgcagcgatgccagtgcctgctgttcgagttgttgatgatgtgcaatggcttgcggtggacaatgcaacggcatttgcagtgccgaaacgggaagttgcgccagttgataatgctcaagcacctgatgcgccagcgttccgcgttctcgtggcggtagccaggccatcgccgcgcgtaaatcgggcagggcattgataaaattggcatcactcagttgattcaaatggctgctgaaaccggcgataaatgcaggttgacaggccagttgatgacgggctaatgccagcaaaccgtgcagcgcctcgccggattgtgccggggataactgcgccagcatcgtcagcgccgcttcggcactggcgttgggatgttccagacgcattagtgcgccaagagccgcgccgcgatccagcgccggggcatgaatcgcctgactgcgtcgctccagtaaggctaccgccgcagaaagcgaaacgccggataaattaacgccgctatgtagatcgcgcagaatatggcaaagcgcttgccagctatgcaggtgagcgtgaaactccttttcatccggtctgccgttagattcacacagccacagcgtgcgatcgatagccgcgcataacgtcgtttgtaatatctgcgcgccttgcataccgctaatttcatccagccgccataaggcatatagcacttccagcgcctggcccatttcggcaaattgattttcctgggcgattaataatgtgagttgctccagtaattgttgactgaaggacgccagacccgctaacgccgcctggctaagacatgtggtgatactgccgattccacccgcgtccagcatatcggcttctaatttatggcgtgcggcttcctgaagtgttgcaccaaagcatgcggcctcaatcaatgccgcatgctggctaagcgggcgggttaatttccagtgttcttcaccgttgcctgcaagtgtcagtgtacttccctgctggcgtacaatcccagggatctccagtattgccagccgatgtaacacctgactttgcgccagcccatcgggggtaaagcgatttaaggtaagctccgccggaagagagattgcggtacgttccagttcgcaggtgacatcttttggcagaggcggttgtggcgtggaaggggcaagtttaccgaatccgtcacccgctaatgtgtctatcaacgttagcagaatcggatcggtatcgggatgaataacgccgcgatagctccacggcaacggtgcattcagggcttctttaatcaacgagcctgctatggcatccagccagtcagtgcgtaacggtagtgtatgaccgcgcaactgtgccagtgccattgcatgcagatgtgcggcagccatatccgcggtcgaagcaggcaagttgtgctggcgcaaacgggtgagaaccgtttttagcagttgttcaccggcctgctgtaagccccactgccagcaccagttttgccagaccggggcaggcataccggaaaggtatcctgccagcacatcaaggcgcttttcactgtagggcgtgagataacaacctgtaatggcatctgccagcgagggcaattccggcgtgttaatgtcctgcgggcattcgcgccacatttttgccagtgccggagcgtgccagccaccgcagacgactaacacgtcgccattattttgctgcaccgcccatgcaatccagcgagccataaaggcttcgcgctgacgattgagtgcatcgccggggaaatcgccccgcagttgggcaaaatagtgcgccagcgcagagggtaatgcagtttgctggctttcatcttcgaacaagtgatcccacagggtatcgctgttatccatgcgggtggcacgcagcagtaaggcctggctttcatcttgcgtatcaggcgaatcgtcctcttcttcactctgcgcccagcaaggcaaatcgatgaagtaagtttgtgcctgaatacgacgtgcggcttgtagcgcctgccactccggcgaaaattcagcaaatggcgtccaggcaccacgcccgggggctgcaccgtcctgatactggcaataactgtaaatagctaccggaagctggtgggaaaaaaaaagttcgtctacccggtcattaaaatcagccgggccttcaatcaacacgtatcgtggccgctggctttcgattaacgatttcaccagccgggcgcaggccggactatgatgccggatgccgacaattaacggctcgctcatgcatctttcctcacggcaggcggtggcgggcttgataataagcctgccagtgagcttctttatgtgtggcgactcgttgttcgaagtaacggcgcagacgagcgcgatcttcttcgttatctttgacgatggttccggcaatgcagtccaccaggtcggctggctcacctgcgcgattcgctaaaaaccaggcgcggacgcctacggcgtgggccacgttcacggcttcagcggtggacataatcgctgttagtgtatccattgacgttttcttttcgccgttggcacgcagatcgcggaaggtgcgtaccagtaactccagtactgcgtcaggcactttatgcggaataccgctatgggccagcaaacgcgccgaagcactggcgaccagttccagctcctgggcgaaatccataatcggaaagacggtttcaaaatcgaagcgacgctttagcgcggcactcatctcattgacgccgcgatcgcgggtattggcagtggcaataatattaaagccttcccgcgcatagagctgactggcttcaccggtgagttccggcaccgtcatcaccctgtcagaaagcatacctaacagacagtcttgtacttccagcggtgtacgcgttatctcttcaaaacggacgattttgccgttgcgcattccctggtaaagcggggcagggaccagtgcttccgttgacggaccatggttgataagcagggcgtagttccagccgtacttgatttgatcttcggtagtagatgcgccgccctggatggttaacccggcatcgccgctaatagcggttgccagtaattcagacaggagagattttgcggtgccaggttcccccaccaacatcaaaccgcgcccggtggcaagagtgactaacatgcgttcgacagcggagggactaatcaccactttacggctaatattttgcgcgctatcgccaaggataaaagcacgggccgcaggcaaacttaactgccaaccgggcgg

SEQ ID NO: 167 - DNA, 73411 bp, Escherichia coli
  source 1..73411: mol_type = genomic DNA
ggcgcgagtattgtggtcggtccgttgctgaaaaataacgttgaagagttgctgaagagcaacaccccgctgaacgtgctggcactgaaccagccggagaatatcgaaaaccgcgtcaatatttgttacttcgcgctttcacctgaagacgaagcgcgcgatgcagcgcgtcatattcgtgaccagggtaaacaagcgccgctggtgctgatcccacgcagttcattgggcgatcgcgtagccaatgcgtttgcgcaagagtggcagaaactgggcggcggcaccgttctgcaacaaaaatttggttccaccagcgaattacgcgcgggtgttaacggcggttctggtattgctttaacgggtagcccgattactcccagagcgacaaccgactccggcatgacgaccaacaatccaacgctgcaaaccacgccaaccgatgaccagttcaccaataatggcggtcgtgtcgatgcggtgtacattgtggcaacgccgggtgaaatcgcttttatcaaaccgatgatcgccatgcgtaacggtagccagagcggtgcaacgctgtacgccagctcccgcagtgcgcaagggaccgctggcccggatttccgactggagatggaaggcttgcagtacagcgaaatcccgatgctggcaggcggtaatctgccgttaatgcagcaggcgctcagcgcggtgaacaacgattattcgctggctcgcatgtatgcgatgggcgttgatgcctggtcgttggcaaatcatttctctcaaatgcgccaggttcagggttttgaaatcaacggtaataccggaagcctgacggcaaacccggattgcgtgattaacaggaagttatcatggctacagtaccaacaaggtcaggtagtccccgccagttaaccaccaaacagaccggcgatgcgtgggaagcacaagcgcgtcgctggctggaaggcaaaggactgcggtttatcgccgctaacgtgaacgagcgtggcggcgagatcgatctgataatgcgtgaaggccggaccaccgtttttgtcgaggtacgctatcgccgctctgcgctttatggcggcgcggcagccagtgtgacccgcagcaaacaacacaaattattacagactgcccgcttgtggctcgcgcgtcataatgggagttttgatactgtggattgccggttcgatgtggtagccttcaccgggaatgaggttgagtggattaaggatgcctttaatgaccactcataattaaggtttaaggattagcgtgcaagaaagaattaaagcttgcttcactgaaagcattcaaactcaaattgcggcggcagaggcgcttccggatgccatctcccgtgcagccatgacgctggttcagtctctgctcaatggcaacaaaatcctctgttgtggtaatggaacttccgctgccaatgcacagcattttgctgccagcatgatcaaccgtttcgaaacggagcggcccagcttacctgccattgcactaaatactgataatgttgtcttaacggcgattgccaacgatcgcttacatgatgaagtgtatgcaaaacaggtgcgggcgctgggtcatgcgggagatgtattgttagccatttccacgcgtggcaacagccgcgatattgtaaaagcggtagaagctgccgttacgcgtgatatgaccattgtggcattaaccggctatgacggcggtgaacttgcaggtttgttagggccacaggatgtggaaatccgcattccttcgcatcgtagtgctcgcattcaggaaatgcatatgctgacggtaaattgcctgtgcgatctgatcgataacacgcttttccctcaccaggatgattaaggagaatacatgaaggcattatcgccaatcgcagtccttatttccgcgctgctgttgcaaggttgtgttgccgctgccgtagtgggtaccgctgctgtgggtaccaaagccgcaactgacccacgcagtgtcggcacccaggtggacgatggtaccctggaagtgcgcgtgaacagcgcattgtcgaaagacgaacagattaagaaagaagcgcgcattaatgtaacggcctatcagggcaaagtgctgctggttgggcagtcaccaaacgctgaactttcggctcgcgccaaacagattgctatgggcgtagacggtgccaacgaagtgtataacgagattcgtcagggccaaccgattggtctgggcgaagcgtctaacgatacgtggatcaccaccaaagtgcgttcgcagctcttaaccagcgacctggtgaaatcgtccaacgtgaaagtgaccaccgaaaacggtgaagtgttcctgatggggctggtgactgaacgtgaagcgaaagcggcggcagatattgccagccgggtaagcggcgtgaaacgggtaactacggcgtttacgtttattaaatagcagccccttgtaatgcctgatgcgacgcttgccgcgtcttatcaggcctacaacgacacaaaacgtaggtcagataaggtgtttacgccgcatccgactgctgttgcctgatgcgacgcttgccgcgtcttatcaggcctacaacgatacaaaccgtaggtcagataaggcgtttacgccgcatccgacatgttttccctcaaatcagaacaacagcgccagcccgccgacaatcacaccagacactgccaccatcgcccccgtcagccataaggctttcgccgggaacgctttgcgcagcataatcagtgacggcaaactcaccgccgggagcgtcatcaacaatgccagcgccggagcagttcccatacctgccagcatcatcgtttgtacaatcggaatttctgctgccgtgggaatgacaaacaagcatcctgccaccgccatcgccaccacccacatcaggctgttatcgacagtaccatcggcatgggggaataaccagacgcgagcggcacccaacaccagtactgcaaggatgtaaaccgggatcgtactccagaaaagcgtccatagcgccctgccccagcggctaaaaaaaccgccctgtgcttccggtatgtcaatttcgaccggtgcctgcgtttgcggtgtttcacgcacccatttttgcaccagcgtcgcaatcagcaacaccatcaccagcccggccaccagacgaatcgccgcaaaaccccagccgaggacaaagcccataaacaccagcgtcgccgggtttaacaccggattgcccatccagaatgccagcgcaccgcccatcgacacctgttggcgacgcattcccgccgcgaccggagccgcacagcaggtacacatcatgcccggcaacgaaaacagcgttcccagcagcgtgccgcgaaagcgcgattgcccaagcgtacgcaacaaccagtcacgcgggatcagcacctgaatcaacgaaccgaggatcacccccagcaccgccgctttccataccgcgaggaaatagatcatcgcgtaatccaacgccgcctgccatgggttagcatccgcctgcgcaaggatagatttaccgatactgtgggtttcggcagcagtaaacgctttgccgtagtaaggttcccatttcacataccagagaccggcaatgacaacgagaaagaaaagcgcgggtttccaccactgaatgggcgttgccgcctgagatgaagactgaccagtcatagcattccccaggaataagttatgataattgagcgcgtgaatattacgctcactatcaattcttgggaataattattcagctcttttgcgtaattctgaagagcttaaaatcgtcacgccttcatgctcaggccgcatcgactctgccagcatgacccgcgccacgtctctcgcatcaatggatttccagttacctggtaacaaacggaacagcggcgcaaaaagcgtttcgttcatccgctgtttgctacgatcgcccagtaacatcgacgggcgagcaatggtcaatttcggccagttctgggcaattaatgcttcttccatctcccctttgacgcggttatagaaaaacggcgagtgggcattggcacccatagcactgaccaccagcatatgctgcgcgcccagccgccgcccggttaatgcggtatccactaccagcgtgtaatcggcatgaataaacgcctctttgctccccgcttctcgccgcgtggtgccgagacaacaaaacacaatgtcgatgggatcggtgacctgcgccagcgcgtcagtcagttgcggatcatggggattgaacactcctggcatatctcccaacggacgtcgcgtcggtgcagcaatagcgttaactttcggttcgttaatcaacatccgcagcaggtgaccgcccaccagccccgttgcgcctgtaatcagtacctgactcatcttcgctcctttacagaattgtctgccttgcgctccccggctcatgcaccaggcttaatagaccatgaggtaattatccccgattgtgagaaattcgcctcatccaatgcaacaacgcggaggaagcatgagtaagaaaattgccgttttaatcactgatgaatttgaggattcagaatttacttcacccgcagacgaattccgtaaagccggacacgaagtgattaccattgaaaaacaagcgggtaaaacggtgaaaggcaaaaaaggagaagccagcgtgaccatcgataaatccatcgatgaagtgacgccagcggagtttgatgccctgttgctaccgggcggtcattcaccggattatctgcgtggcgacaaccgttttgtcacctttacccgtgattttgtgaatagcggcaaacctgttttcgccatctgtcacggtccgcagttgctgatcagcgccgatgtgattcgggggcgcaaactgaccgcagttaaaccgatcattattgatgttaaaaatgcgggcgcggaattttacgatcaggaagtcgtggttgataaagatcagctggttaccagccggacaccggacgatctgccagcgtttaaccgcgaggcgttacgcctgctcggtgcctgagtcgcgtagccaaatcatttttttaccaaagcccagcgtgttgtcggtgaatttgatttcatcgagccggatttcccacaccggggccgacagcattctggcaaccggaaagcgacgattgtacgccttgcgcgcgaggtcgctttcctcaccttccagcctgcggatctcacctttaaactgcacaccgcgaattaacgctaccgttttcggctgaccgtttaccgttccggcaactgccgcctgcggcccgctcatctgcgcgtggcgcgttttttcttccgtcaaaatgtagaaggcgactttctgcgcatcaaaaagataaaaggcattagcgcaccagagttccccttcctgctgcacacaccaggtgacaacatgttgttttgccagccaacggctgatggcgatgagtgtttccattgctgttctcttttatactgtgggcctgaccttaacatgcgatgcagacgatgacaccctggtttctttacttgatccgtaccgccgacaataagctttataccgggatcaccacggatgtcgaacgccgctatcagcagcaccaaagcggcaaaggggcgaaagcactgcgcgggaaaggagaactgacgctggcgttttctgctccagtgggcgatcgttcgctggcgttacgggcggaatatcgcgttaagcaactgaccaaacggcaaaaagagcgtctggtagcggaaggcgcagggtttgcagagctgttaagcagtctgcaaaccccggagattaaaagcgattgaaatgctcgtgatactcaaccaggccggtaacgccattcagcgcgtcatccgctaaacgatgtacctggaaggcgctttcagtgcccggccagcggcaacgcagatcgtgatgcgccgccagttcaaagccgaaacgactgtacagcgccggatcgcccagcgtcaccactgcggcatagccgaactcattaagcgaatcgagtccttcatagaccagttggcgtgccagcccctgtccacggtatttttcatcaaccgccaacggtgccatgccgacccattgcaggtcttcgccctgcacatcaaccggactaaatgccacatagccaatgacctgaccttcgtcatctgtcgccaccagccccagcgtcagaaagccatcttcacgcagatcgtgaaccagcttcgcttccgcatcactttcgaatgagcgacgcagcagggcatcaatacccggcgcatcaatgggaatttctactcgaattagcatggttcacctaccgatgtctgtttggtttcaggcgcggttttcattcccgcctcaacaaaatccgccagttgcagcagcatcatgcgtaaggctttcggcatttgctccagttcaatggcgtccatcaggtttttcacatacagccccagctccgtatcgccttcaatcaccagccgacgctggaagaagagcgtatccggatcttgtttacgcgccgcaatcatcagcagatcgctggcgtcggcactaaaactcacatcagcttgcgcgttctggctgaccaccagtttgccattcaccaccgaggtaaaccattgcaggtcaatatcacgcacatgaatacttaaccagcggccttcaagaaactccagctcgccatcatccagcgcctgacggaattgccagcttaagacctgctcaagaacctggcgttttagcgcaaatggcgtcagttttaccggtacactcaacagagatggccccaaatgcacaatacgggaacgcagtttatccaacacgagttttactccctgtttcaacaatcatcctattttgccatatcagaaaaataacatagcggtataaatcaacaattccatatgaaattgctgctaccaccaatacaactttaactgccttaaatcaaaaattgtcgcagcaaggttaactaaaatcccagttcgttaacatttttgcgttttgatagcgcaaccttcaggaaaaattatggagctgctctgccctgccggaaatctcccggcgcttaaggcggccatcgaaaacggcgcagatgctgtttatatcgggctaaaagatgatactaatgcccgtcacttcgccggccttaactttaccgagaaaaaattgcaggaagcggtgagttttgtccatcaacatcgccgcaaacttcacatcgcgattaacacttttgcgcatccggacggttacgcccgttggcagcgcgccgtggatatggcggcgcagctgggtgccgacgcgctgatcctcgccgacctcgccatgctggagtacgccgccgagcgttacccgcatattgagcgtcatgtgtcagtgcaggcttcggcgaccaatgaagaggcgattaacttttatcatcgccattttgacgttgctcgcgtggtgctgccgcgcgtgttgtcgattcatcaggtgaaacagctggcacgggttactcctgtcccgctggaagtgtttgctttcggcagcctgtgcattatgtcggaaggtcgttgctatctgtcgtcgtatctgacgggtgagtcgcccaacaccgtgggagcgtgttctccggcccgtttcgtgcgctggcaacaaacgccgcaggggctggaatcccgcctgaacgaagtgctgatcgaccgttatcaggacggcgaaaacgcaggttatccgacgctgtgtaaagggcgttatctggtggacggcgagcgctatcacgcgctggaagaaccaaccagtctcaataccctggaactgctgccggagttaatggctgcgaatattgcttcggtgaaaattgaaggccgccagcgtagcccggcgtatgtcagccaggtggcgaaagtctggcgtcaggctatcgaccgttgtaaggccgatccgcaaaactttgtaccgcaaagcgcgtggatggagacgctcgggtcgatgtccgaaggcacgcaaaccactcttggcgcatatcaccgtaaatggcagtgagaaaagcaatgaaatattccttagggccagtgctgtggtactggccaaaagagacgctggaagaattttatcagcaggccgccaccagcagcgccgacgtgatttatcttggtgaagcggtatgcagcaagcgtcgggcaaccaaagttggcgactggctggagatggcaaaatcgctcgccgggagtggtaagcagattgtgctctccacgctggcgctggtgcaggcatcatctgaactgggcgaactgaaacgctatgttgagaacggtgagtttctgattgaagccagcgatctcggcgtggtgaatatgtgcgctgaacgcaaactgccgttcgtcgccgggcacgcgctgaactgctacaacgcggtgacactgaaaatattgctcaaacagggcatgatgcgctggtgtatgccagtggagctttcccgcgactggctggtgaatctgcttaatcagtgcgatgagctgggcattcgtaaccagtttgaagtggaagtcctgagctacggtcatctgccgctggcctactccgcccgctgctttaccgcgcgttcggaagaccgcccgaaagatgagtgtgaaacctgctgcattaagtatccgaacgggcgcaacgtgctgtcgcaggaaaaccaacaagtgtttgtactcaatggcattcagaccatgagcggctacgtttacaacctcggtaacgagctggcatccatgcagggcctggttgatgtggtccgcctgtcaccgcagggtactgacactttcgcgatgctcgacgccttccgcgctaatgaaaatggcgctgcaccactgccgttgacggcgaacagcgactgtaacggctactggcggcggctggccgggctggagctgcaagcctaagtaaatatgctcgtcatacttcaagttgcatgtgctgcatctgcattcgttcaccccagtcacttacttatgtaagctcctggggattcactctcttgtcgccttcctgcaactcgaattatttagagcacagctcactttgttaacaactttaactactctttaatgcagtattaaagattaatcggtaacaaagtgagctgttatgactgataaaaccattgcgttttcgctactcgatctggcccccattcccgaaggttcttcagcgcgagaagcattctcccactctctcgatctcgcccgtctggctgaaaagcgcggctatcatcgctactggctggcggaacaccacaatatgaccggcattgccagtgctgcaacatcggtattgattggctatctggcggcgaataccaccacgctgcatctggggtctggcggcgtgatgttgcctaaccactcaccgttggtcattgccgaacagttcggcacgctcaatacgctctatccggggcgaatcgatttggggctgggtcgtgctccgggtagcgatcagcgaaccatgatggcgctacgtcgtcatatgagcggcgatattgataatttcccccgcgatgtcgcggagctggtggactggtttgacgcccgcgatcccaatccgaatgtgcgcccggtaccaggctatggcgaaaaaatccccgtgtggttgttaggctccagcctttacagcgcgcaactggcggcgcagcttggtctgccgtttgcgtttgcctcacacttcgcgccggatatgttgttccaggcgctgcatctttatcgcagcaacttcaaaccgtcggctcgactggaaaaaccatacgcgatggtgtgcatcaatattatcgccgccgatagcaaccgcgacgctgagtttctgtttacctcaatgcagcaagcctttgtgaagttgcgccgtggcgaaaccgggcaactgccgccaccgattcaaaatatggatcagttctggtcgccgtccgaacagtatggtgtgcagcaggcgctgagtatgtcgttggtaggtgataaagcgaaagtgcgtcatggcttgcagtcgatcctgcgcgaaaccgacgccgatgagattatggtcaacgggcagattttcgaccaccaggcgcggctgcattcgtttgagctggcgatggatgttaaggaagagttgttgggatagtgtgtcttaacgcgggaagccttatccgagctggcaacgctgtcctacgtagacctgataagcgaagcgcatcaggcattgtgtaggcagcagaaatgtcggataaggcaccgctgattactgatacaccggcagtaaattaaagctcgataaaatatggaccagtgcgttgccaacgccaaacaccagaatcagcgtaatcatcggcttgccgccccagacgcggaatttcgggctgccaaagcgtttacgcgatgcgcgggctaacagcgccggaacaattgccgcccagatggtagctgctaaaccagcataaccaatggcgtacaggaatccgttcgggaacagtagaccacccacaacaggcggggcaaaggtcagcaatgccgttttcaagcgccccagggctgagtcatcgaaaccaaacagatctgccagatagtcaaacaaacccagcgttacgccaaggaacgaactcgctaccgcaaagtttgagaacacgaccagcagaaggtccaggctacggctgttcagcacgccgcttaatgcctgtaccagcacatcaatattaccgcccttctctgcaataccgataaactccggacgcgggatgttacccatcgtcgccagcaaccagatggtatacagcgccagtgccatcagcgtaccgtacaccaggcatttcacgatggttttcggatctttgccgtaatacttcatcaggcttggcacgttaccgtgataaccaaacgacgccaggcagaacggcaatgtcatcagcagatacggcgcataagatgcattgctttctgcaacgttgaacaatgtcgcaggctgcacatgccccaacaggctgccaaaggtgaggaagaaggtaatgactttcgcccccagcacaatcgccgtcatgcggctgacggccttagtactcaaccacaccacaaacgctaccagcagtgcaaaaccaaaacccgccgcccgtgccgggacgtttagcgacatctctgcgaaggtgtgatgcagaatcgaaccactggcagaaatataggcataggtcaggatatagagcacaaaggcaatggaaataccgttgaccacgttccagcctttgcccagcaaatctttggtgatggtgtcaaaactcgaaccgattcggtaattcaggttagcttccagaatcatcaagccggaatgcagcatacagaaccaggtaaagatcagcgccgccattgaccagaaaaaccacgccccggacatgaccactggcagagaaaacatccctgcgccaataatggtgccgccgataatcaccacgccgccaagcagcgacggtgacgtttgggtggtggttagtgttgccatgagggcttctctccagtgaaaaatagtgcgactgcgttgttatgcattgcactgtaccagtacacgagtacaaaagacagaaaaaaagccccgatggtaaaaatcggggctgtatatattattttacagattgtgttcgctgttcagcgatgattacgcatcaccaccgaaacgacgacgaccggtagagtcatcacgacgcggagcgcggccttcacgacgttcgccgctaaaacgacgaccatcaccacggccaccttcacggcgttcaccgctgaagttacgaccgccttcacgacgttcgccaccgaaaccacgaccaccgccacgacgctcaccgccagtatgcggctgtgcatcgcccagtaactgcatgttcatcggcttgttgagaatgcgagtgcgcgtaaagtgttgcagcacttcacccggcatacctttcggcagttcgatggtggagtgagaagcaaacagcttgatgttaccaatgtaacggctgctgatgtcgccttcgttagcaatcgcaccaacgatatgacgaacttcaacaccatcatcgcggcccacttcaatgcggtacagctgcatatcgccaacatcacgacgttcacgacgcggacgatcttcacggtcaccacgcgggccacggtcgttacgatcgcgcggaccacggtcatcacggtcacggaattcacgtttcggacgcatcggcgcatctggcggtacgatcagagtacgttcaccctgtgccattttcagcagtgccgcagccagagtttcgagatccagctcttcaccttctgcagtcggctgaattttgctcagcagtgcgcggtattgatccagatcgctgctttccagctgctgctgtactttagcggcgaatttttccagacggcgtttgcccagcagttctgcgttcggcagttctacttccggaatagtcagcttcatagtacgttcaatgttgcgcagcagacgacgctcgcggttctcaacgaacagcagcgcgcggccagcacgacccgcacgaccggtacgaccgatacggtgaacgtaagactcagaatccatcgggatatcgtagttaactaccaggctgatacgctcaacgtccaggccacgggctgcaacgtcggtcgcaatcaggatgtccagacgaccatctttcaggcgttccagtgtctgttcacgaagcgcctggttcatgtcaccgttcagcgcggcgctgttgtagccgttacgctcaagagcttcagccacttccagagtcgcgtttttggtacgaacgaagataatcgccgcatcaaaatcttccgcttccaggaaacgtaccagtgcttcgtttttgcgcataccccagacagtccagtagctctggctgatgtcaggacgggtagtcacgctggactgaatgcgcacttcctgcggctctttcataaagcggcgggtaatgcgacgaatcgcttccggcatggttgcagagaacagagcggtctgatgaccttccgggatctgcgccataatggtttcaacgtcttcgatgaagcccatgcgcagcatttcgtcagcttcatccagaaccnnnnnnnnnngtttagagaggtccagagtgccacgtttcaggtggtccagcagacggcccggagtaccgacaacgatctgcggcccctgacgcagggcgcgtaattgcacgtcataacgctggccgccgtacagagcaaccacatttacgccgcgcatgtgtttagagaaatccgtcattgcttcagcaacctgtaccgccagttcgcgggtcggtgccagcaccagaatctgtggtgctttcagctcaggatcaagattctgcaacagaggtaaagagaatgctgcagtttttccgctccccgtctgggccatacccagaacgtcgcggccattcagcagatgtggaatacactctgcctgaattggagatggtttttcgtaacccagatcgttaagggcttcaaggataggagccttcaggcccagatctgcaaaagtggtttcgaattcagccatgtagtacgtgtgcctcaaaattaatggcggccagtctacataactcatcatgaaattgatcagcaattttcattgaaaagtgtgaaccggctcaaagtaggtgtattaacgaacaacaacgccctcacccgttaaggtgatggcaatcaaaaaagattacgggctgatgtgtacgtcagctattgctggtccgattctgccaggtcatcttggtcctggcccaggagcgataattccaacaatgcgtatcggtgctcaacaaagttatgaacgttgttggcaaccgccagtttgaacagtgccgtggcgctgtccaaatcccccagacttaggtagtacttacctaaatagaagttggtttcactgagatgctcagcgagcgaggtgttatccgttgcgtccgccttgagcctttccattaacgtttgttcgctaatgttgcccaggtagaactcgacaatgttccatccccactgttccttatccgatttttcgaagtgctgtttcaacacttctttagcctgcttctcatcgagcttctgctcggcgagataaagccacagactacggaaaggatcattgggatcgtcttgataaaacgccagcagatcatcttgcgctaacttgtcacgaccgccgtaatataatgcgatcccgcgattcaagtgcgcgtagttgtaagttggatcaagctcaagtacagaatcaaacgcttcataggcagcatcaaaattgcctgcctgcgttaaatatatgcctaagtaattgaatacttcaggcatatccggtcggattgccagcgcttgcgaaaaatcgttacgcgctaatgccctcagaccgagactatcatacaacactccgcgctcatataaaagctgtgcgcgttcgtcatcggttaaagcccgactggcaaggatttgttccatacgtgccagaatcacttcctgctgtaaagtcggttgcaatggtaccgcgaggacttcacttttacgccaggaagtattactgcatcctgcaagcgtaagtgctgtcgcaacgaaacaccagcgcaaaaaaggcttcatttcccactcccgaagaccacggttgaatgaacgtcctgttcccggttgctaacaaggcgtcctgcccggttaaaagccccccgccgcagcggagggcaaatggcaaccttactcgccctgttcagcagccggagcttccggtgctgcagcaggttgagactgctcagtcgcttctttaatgctcagacggatacggccctggcgatcaacttccagaactttcaccggtacttcctgacccatctgcaggtaatcggtcactttctcaacgcgtttgtcagcgatttgagagatgtggaccagaccttctttaccgccgccgatggcaacaaatgcgccaaagtcaacgatacgggtcactttaccagtgtagacgcggcccacttcgatttctgcagtgatctcttcgatacgacgaatagcatgtttcgctttctcgccgtcggtcgctgcgatcttcacagtaccgtcatcttcgatttcgatggtagtgccagtttcttcggtcagggcacggataacagagccgcctttaccgataacgtctttgatcttatccgggttgatcttgatggtatggatacgcggtgcgaactcagagatatcgccacgcggcgcgttgatcgcctgttccattacgcccaggatatgcagacgcgcacctttagcctggttcagcgcaacctgcatgatctctttggtgataccttcaattttgatatccatctgcagtgcagagataccgtcgcgggaacctgcaactttgaagtccatatcgcccaggtgatcttcgtcgcccaaaatgtcagacagtacaacgtagttgtcgccttctttcaccagacccattgcgatacccgcaacggcagctttgattggcacacctgcgtccatcagcgccagagacgcgccgcacacggaagccatagaagaagaaccgttggattcggtgatttcagacactacacgtacggtgtacgggaatttgtccatatccggcatgactgccagcacgccgcgcttcgccagacgaccgtgaccaatttcacgacgcttcggagaaccgaccatgccggtttcgcctacggagtacggagggaagttgtagtggaacaggaaggtatcggtacgttcgcccatcagttcatcaagaacctgcgcgtcacgagcggtacccagcgttgcagtaaccagtgcctgcgtttcaccgcgggtgaacagcgcagaaccgtgagtacgcggcagcacgccagtacgcacatccagaccacggatcatatctttttcacgaccgtcgatacgcggttcgcctgccagtacgcggctacgaacaacgtttttctcgatagcgtgcagaatttcacccagttcgttttcgtccagggtttcgtcttcagcaagcagcgtcgcgatggtttcagatttgatgacatcaacctgcgcataacgctcttgtttgtcggtgatgcggtaagcatcgctcaggcgagcttcagccagtgcagcaacgcgcgcgttcagcgcttcgtttaccggctccggctgccagtcccaacgtggtttaccggcttctttcaccagttcattgatgttctgaataacaacctgctgttgttcatgaccgaacactactgcgcccagcatctggtcttcgctcagcagttcagcttcagattcaaccatcagaacagcggcttcagtaccggcaacaaccagatccagtttgctctctttcagctcgtcctgagtcgggttcagtacgtactggtcattgatgtaacctacgcgagcagcaccaatcggaccattgaacggaataccagacagagacagtgctgcggaagcaccaatcatcgcgacgatatccgggttaacttgcgggttaacagaaaccacggtggcgataacctgaacttcgttgacgaagccttccgggaacagcgggcgaatcgggcggtcaatcagacgcgcgatcagggtttcgccttcgcttgggcggccttcacgacggaagaagctacccgggatacgaccagcagcgtaggtacgctcctgatagttaacggtcagtgggaagaagtcctgacctggtttggcttttttctggccaacaacggtaacaaataccgcggtgtcatccatgctaaccataacagcggcagtagcctgacgagccatcatgccggtttccagagtcacggtgtgttggccgtactggaatttacgaacgatcggattaagcaatgtaatatcctttctctttcttagacagtaccttacggcactggtgttaatacccgatcttctgcgcatcctcgcgactaatgacaaccctaacccagctctatgtgggtaaagcctctcattagccgcgcgaacctctgcaacggaagatcattcatagcaacaatacattagtttccagtgaattgctgccgtcagcttgaannnnnnnnnnggggccactcaggcccccttttctgaaactcgcaagaattagcgacgcagacccaggcgctcgatgagctgggtgtaacgtgctacgtctttacgtttcaggtagtcgagcagtttacgacgctgagaaaccatgcgcagcagaccacgacggctgtggtgatcttttttgtgctctgcaaagtggccctgcaggtggttgatctgtgcagtcagcagtgctacctgaacttcggtagaaccggtgtcgtttgcgtcacgaccaaactcagaaacgattttagctgttgcttcagtacttagagacattttaaaactccaaagtatatagaatgaaaggacgccgatctctaattcagcgatcccagtgtacgttacgcaaagtgttaaacaatttacgcgacgttaagcggcagtattctactcgtagcgacctgttatcgcaagacggttaacattacgccgggtattcaaccaccaggcgacgaggcgcaacgcggccttcatcgtcaatttcgcccataccgataaatttgccgttctcaccttctgtaacgcgaaccagtccttccagcggcgcaccggatgtacgaactgggttaccatttttgaagtaaacagaagacgttaacggaagattcaccaccgggtagtccgaagctggactgtccattggcatcagtaatggatcaagtaactccgcagccggaatatcctgctgttcggcttgttcgaccagttcacgcagatgttccagggtcaccatccgttcaaccggatatttacttaccgccagacgacgcaggtaaataacatgcgcgccacaaccgagtttttcacccaggtcatcaatgatggtgcggatataagtgccttttgagcagtgaatttccagctccagctcattgccttcgtggcgaataaacagcaattcataaacggtaatcgggcgcgcttcacgcggtacttcaatgccctgacgcgcatattcgtacagttttttaccctgatatttcagtgctgaatacatcgaagggatctgttcgatatcgccacggaaagtatccagcgccgccgccagttgctctgcgctaaaggttaccggacgttcttcaacgatttgtccgtcggcatcagaagtatcggtacgctgtccaagacgcgcaatgacccgatagcgtttgtcggagtccagcagatactgggaaaacttcgtcgcttccccgaggcaaattggcaacatgccagttgccagcgggtccagcgcaccggtatgcccggcacggttggcgttataaatccgtttcactttttgcagcgcatcattgctggacataccctgcggtttatccagcaacaaaacgccgttaatgtcgcgaccgcgacgacgaggacgactcattagtcctccttgctgtcgtccgggttaacnnnnnnnnnntcttcgtcatgtttgaccacgctggtcaccaggtttgacatgcgcatcccttcaaccagagagttgtcgtagaagaaggtcagttccggcacgatacgcaggcgcatcgctttccccagcaggctgcggatgaaaccagaagcttcttgcaacgctttgatgcccgctttaaccgcgtcttcatctttgtcgttgaggaacgtcacatatactttggcatacgccaggtcgcgagacatttcgacaccggaaacggtggtcatcatgcccaggcgaggatctttaatttcacgctgcaggatgagagcgatctctttttgcatttcctgcgctacgcgctgcgggcgaccaaattctttcgccataataaattctcctgacaaaaaaggggctgttagcccctttttaaaattaatttcaggtggaagggctgttcacgttggcctgataagacgcgccagcgtcgcatcaggcaatccatgcaggatgtggcgtaaacgccttatcccgcatggaaccctaaaaaccttaagcgatggtacgttggatttcgatgatttcgaatacttcgatcacatcgccagtgcggacgtcgttgtagttcttaacgccgataccacattccataccgttacggacttcgttaacgtcatctttgaagcggcgcagggactccagctcgccttcgtagataaccacgttgtcacgcagaacgcggatcgggttgtgacgtttaaccacaccttcggtaaccatacagcctgcgatggcaccaaatttcggtgatttgaacacgtcacgaacttccgccagaccgataatctgctgtttcagttccggagacagcataccgctcatcgccgctttcacttcgtcaatcaggttatagatgacggagtagtaacgcagatccaggctttccgcttcaatcactttacgtgcagaggcatcagcacgtacgttgaagccaaccaggatggcgttggacgccgcagccagggtggcgtcggtttcggtgataccacctacgccagaaccgatgatcttcactttaacttcgtcagtagacagtttcagcaaggagtcggagatcgcttccacagaaccctgtacgtctgccttcaggacgatgttcacttcgtgaacttcgccttcggtcatgttggcgaacatgttctcgagtttagatttctgctgacgcgccagtttaacttcgcggaatttaccctgacgatacagtgcaacttcacgcgctttcttctcgtcacgtacaacggtaacttcatcacccgcagccggtacgccggacaggccgaggatttccaccggaatggacggacccgcttccagcacttcctgacccagttcgttacgcatcgcacgaacacgaccgtattcgaagccacacagaacgatatcgcccttgtgcagagtaccttcacgtaccagaacggtagcaaccggaccacgacctttatcgaggaaggattcgataaccgcaccgctcgccatacctttacgtaccgctttcagctccagaacttccgcctgcagcaggatagcgtccagcagttcatcgataccagtacccgctttcgcagacacatgtacgaactggctttcaccgccccactcttccggcaggatgccgtactgggagagttcgttcttaacgcgatccggatcggcttctggtttatcgatcttgttcactgcaacgaccaccggaacctgcgccgctttcgcgtgctggattgcttcgatcgtctgcggcattacgccgtcgtcggcagcaacaaccaggactacgatgtccgttgcctgcgcaccacgagcacgcattgaagtaaacgcggcgtgccctggggtgtccaggaaggtgatcatgccgttttcagtttcaacgtggtatgcaccaatgtgctgggtaatgccgcccgcttcgccagaggccactttcgttgaacgaatgtagtccagcagagaggtcttaccgtggtcaacgtgacccatgatggtcacaaccggcgcgcgcggttcagccgcagcacccgtgtcacggtcgctcattaccgcctcttccagctcgttttcacgacgcaggataactttatggcccatctcttcagcaaccagctgtgcggtttcctgatcgataacctggttgatggttgccattgcgcccagtttcatcatcgctttgatgacctgagagcctttaaccgccatcttgttcgccagttcgccaacggtgatagtttcgccgatcacaacgtcacggttaacggcctgagcaggcttctggaagccttgctgcagggaagaacctttacgttttccgcctttaccgccacgtactgctgcgcgtgcttcttcacgatcagcttttgattcagcgtgtttgttacctttcttcggacgcgctgctttcgcgttacgaccacggccacggccgccttcgacttcacgatcgctttcgtcttcggcctggcgagcatgttgagaagtagtgacgtgataatcgctggaatcttcagtcggttccgcgttatcagtccatttgttttcttccgccatacgacgtgcttcttcagcaacgcgacgtgcttcttcttcgagtttacgacgcgcttcttcttcagctttacgcttgagctctgcagcttcctgctcacggcgggctttttcagcctgggcgtttttagtcatatcgtcttgttgattgctcactttgtctttttccgcagcttcacgtttcgcttgttcagcagcttcacgcttagcttgttctgcggcctcacgttcagctttttgttgcgcctcgcgtttagccgattcttctgcctcacgacgggcttgctcttccgcttcacgctgcgcttgctcttccgctgcaaggcgttcagcctcttgcggatcgcgtttcacaaaggtgcgtttcttgcggacttcgatttgtaccgatttgctttttccaccggtaccaggaatgttaagggtgctgcgtgttttacgctgcagcgtcaatttgtccgggcctgaatttttctgattcaggtggtcaatcaaagtctgtttctcttgtgcagacacagagtcgtcagcagacttccggatacctgcatcagcaaattgctgtaccaggcgttccacggaggtctgtcgctctgcggccagcgttttaatcgttacatctgtcatgctgttccttcctgctacagtttattacgcttcgtcaccgaaccagcaaatattacgggcagccataatcagtgctccggctttttcgtcggtcaacccttcgatatcagccagatcatcaatgccctgttcggcgagatcttccagcgtacaaacgccacgggcggccagtttgaatgccaaatcacgatctaccccttcaaggttcagcagatcgtcagccggtttgttatcaccgaggctttcttcctgggcctgtgcaatggtggccagtgcatttttagcacgctcgcgcagtgcttcaacggtcggctcatcaaggccttcgatttccaacagctctttcatcggcacataggccagttcttccagcgtcgagaagccttcttctaccagaacagtcgcgaagtcttcgtcgatgtcgagatatttggtgaaggtgtcgatcgctgcgtgcgcttccgcctgatgcttagcctgcaggtcgtcaacggtcatcacgttgagttcccaaccgctcagctgcgaagccagacgcacgttctgaccgttacggccaatcgcctgcgccaggttaccggcttcaacggcgatatccatggtgtgtttatcttcatccaccacgatagaagcaacgtctgccggtgccattgcgttaatcacaaactgcgccgggttatcatcccacaggacgatatcgatacgctcgccgcccagttcagtagaaaccgcctgaacacgcgcgccacgcatacctacacaggcacctaccggatcgatacgtttatcgttggttttcaccgcgattttcgcacgagaacccggatcgcgagccgctgctttaatttcaatcacttcttcgccgatttctggcacttcaatacggaacagttcgatcagcatttccggcttggaacgagtgacgaacagttgcgcgccacgcgcttccgggcgaacggaatagagcacgccacgaacgcggtcgccagggcggaagttttcacgcggcagcatatcttcgcgcaggatcacggcttcagcattgttgcccagatccagagagatgttgtcgcggtttacttttttcaccacgccggtgatgatttcaccttcgtgttcacggaactgatcaaccaccatcgcacgttcggcttcacgcactttctgcacgataacctgttttgccgtctgggtagtgatacggtcaaaggtaacagactcaatctgatcttcaacgtaatcgcccaggttcaggctttcatcttcataacgtgcggcttcaagggtgatttccttggtcggctgggtgacttcatcaacaactaaccagcgacggaaggtgtcaaaatcaccgcttttgcgatcgatctgtacgcggacgtcgatctcttgttcatattttttctttgttgctgtcgccagcgcgctttccaatgcttcgaaaatcttctcgcgaggtagcgccttttcattggatacggcttcaactacagccaaaatttctttgttcatcgcgggcttttcacctcatccagactattaaaagtggggaaccaggttcgccttctggatattactcagcgcgaacacttcatctttaccttcgacggtaactgtgatcatttcaccgtctaccgctttgataacgccctgccatttacgacggttttgtaccgccatacggagaaccagagtcacctcttctccgacaaaacgggcgtagtgttcagccgtgaacagtgggcgatcgagacccggtgaggagacttccaggttataagcaacggtgatgggatcttcaacatccagcacagcacttacctggtggctcacatcagcacaatcatcaacattgatgccatcttcactatcaatatagatgcgcagtgtggatgtgcgaccgcgaataaattcgatgccaaccagttcaaaacccagggcctcaactggcgcagtaatcatctctgttaatttttgctctaatgtggacaagcccacccccaagacataaaaaaagggcctaaagcccagttattctgtagtcagataacaaaaaaccccgataaatcggggctttatataactgaaccctataaccgcaactgcggtctggagcactttccagaaggattttttcaaatcccactacgaaggccgaagtcttcacagtatatttgaaaaaggactctaagggaaagtggttgcgggggccggatttgaaccgacgaccttcgggttatgagcccgacgagctaccaggctgctccaccccgcgcctgaaacgtggcaaattctactcgttttgggtaaaaaatgcaaatactgctgggatttggtgtaccgagacgggacgtaaaatctgcaggcattatagtgatccatgccacattttgtcaacgtttattgctaatcacgtgaatgaatatccagttcactttcatttgttgaatacttttgccttcccctgctctcccttaagcgcattattttacaaaaaacacactaaactcttcctgtctccgataaaagatgattaaatgaaaactcatttattttgcataaaaattcagtgagagcggaaatccaggctcatcatcagttaattaagcagggtgttattttatgacgacgattctcaagcatctcccggtaggtcaacgtattggtatcgctttttccggcggtctggacaccagtgccgcactgctgtggatgcgacaaaagggagcggttccttatgcatatactgcaaacctgggccagccagacgaagaggattatgatgcgatccctcgtcgtgccatggaatacggcgcggagaacgcacgtctgatcgactgccgcaaacaactggtggccgaaggtattgccgctattcagtgtggcgcatttcataacaccaccggcggcctgacctatttcaacacgacgccgctgggccgcgccgtgactggtaccatgctggttgctgcgatgaaagaagatggcgtgaatatctggggtgacggtagcacctataaaggaaacgatatcgaacgtttctatcgttatggtctgctgaccaatgctgaactgcagatttacaaaccgtggcttgatactgactttattgatgaactgggcggccgtcatgagatgtctgaatttatgattgcctgcggtttcgactacaaaatgtctgtcgaaaaagcctactccacagactccaacatgcttggtgcaacgcatgaagcgaaggatctggaatacctcaactccagcgtcaaaatcgtcaacccaattatgggcgtgaaattctgggatgagagcgtgaagatcccggcagaagaagtcacagtacgctttgagcaaggtcatccggtagcgctgaacggtaaaacctttagcgatgacgtagaaatgatgctggaagctaaccgcatcggcggtcgtcacggcctgggcatgagcgaccagattgaaaaccgtatcatcgaagcgaaaagccgtggtatttacgaagctccggggatggcgctgctgcacattgcgtatgaacgtctgttgaccggtattcacaatgaagacaccattgagcagtatcacgcacatggtcgtcagttgggccgtctgctgtaccaggggcgttggtttgactcccaggcgctgatgctgcgtgactctctgcaacgctgggttgccagccagatcactggtgaagttaccctggagctgcgccgcgggaacgattattcaatcctgaataccgtctcagagaacctgacctacaagccagaacgtctgacgatggaaaaaggcgactcggtgttctcgccagatgatcgtattggtcaattgaccatgcgcaacctggatatcaccgatacccgcgagaaacttttcggttatgccaaaactggcctgctctcctcctctgccacttcaggcgtgccgcaggtggagaatctggaaaacaaaggccagtaattcgacatcaaccctgcccttcaggggtggggttaccttgcttatcctctgtaaactcctttctgagcatcacataatcgaaaacatcatggtttgcatccacaacccgtgagtctcctttatagtgtgcaatcacttcctcaagcgtttgcggctgttccggctttgttacccccatccacgcattaataaggtaattattgtaagctgtcgaaaagatgttgttttccgttgtgcgatccacgccatccccaagaacggggctataccagataaacatcgggacatgatatgcctgctggctagcctccctgcctccatgaaaatagacgttcttcttcgtagggtcacgttccaggccgtggtcggcaaaatacatgaccgaggcgcggcgatcttttaataattcaaaaacctgacctagcaaactatctgtgtaatgaatggagttgtcatagcaggcatcctgatcgtcctgcggttgaaacacggcgctggattgcggataggcgctacaagccggttcatggcttccatttaaatgaagaacaatcagtttcttttgctgcgtattttgctgtaatgcttgcgataaatgcggcaacaacaattcatcaaatcctctgacataaactgtttccatggcgcgcatggcgatactggtaactgctgtaccattctgccgaaaagcggattgcgagcttagccagaaagtctgaaatcctgcttgattagccatattaataatgttgtcggggtaattatgaatgtcatgactcaaaacagaatcagcagttaaagaaaggggaaccgacagcgcagtgtaaggtgcgccgcttattgcttgattaaacagtttgatctgttttctttgtgcttcaacttgcggtgtcgtagagcgtgtatatccatacaaagacatattgtcgacacgtacagactcccccacaatcaacacgtaggtatcaatacctgtatccctgactgataattgaaaatacggcaccgtgtttgcaattgagagtaatctttgatgctctttcgctgctaaagcaaaatagttgagattgaaaaatggcgtataggtagcaaatcgcgacgctagtatatatggactgaacgcttttttattttttgcatctttataagcaaattgacaagcggaaaataaactgcccgaaatgacaatcagcaataatattcctgtcactttttttgtcggcaaggaaacatcatattttattattactgccaaaaaaagaagggataaaaaagcaaaggcacatagataagggatatacatccccagcattttgacaacttcatccggatcactctggagcacactaatcgcaaatccatcattgaaagttgtaccaaaggtacaccatgaatagaggctaatactcatgtctgccgcagtcagtaacacaaatggtgcggcaacaagcaggcgaagcggaagggatgatatacgttttacaaccaggatggtcaggacgaagaacagcaatcgctgaaccatatgcgcgccggaagaggcgactaagttcgtaataccaaaaagaataacacaaagatacaacaaccaatgagatttaaaacttctagcaaatttgttgaatactgtcatccagaaatccaagttcacaaccaatataaacaattatcaacaatgttcaattttatatcagacatgtttttcaactctgatccatatcagaccgaaacactgttagttttttctttttaaatgatgcggccattgcgttctcagtaattaaataacattatcaatgcgtctctaaacattacgcagaacgtagccatcagtagttatactgacaggagcaggatggtttatcgagaagtaaacatatccgtattcgtaccggaactggagttgacacaataaagtgccaattatgtcagcagaagggaaaagtttataactaaggcgtaccggcaccatcgtttcaaggtaccagctacgagtaaagcaactggacgagatacagatacctgacaaccattcctcagaccaggaccaaaacgaaaaaagacgcttttcagcgtctcttttctggaatttggtaccgaggacgggacttgaacccgtaagccctattgggcactaccacctcaaggtagcgtgtctaccaattccaccacctcggcacggatactactttttagttcgggatatcgctggtcggcttagccggagcagctggttgagtttgttcggttttcaccggtgcactcagattttcccattcgctacctttattggttttgttgctattgatgttacccagcaccagactgatgatgaagaataacgttgccagcagcgccgtcatgcgggtcatgaagttaccagaaccacttgaaccaaacagcgtagcggaagcgcctgctccgaaggaggctcccatatcagcgcctttaccttgctgcagcatgatcagaccaacaaggccaattgccacaataaggaaaactactaaaagagcttcgtacataatcaacctgttccttgcggagttgccgcgtaccaatgcttcaaccaataaagcgggagtttttaatctttcccactgaagcgggtgtgaatactaaccaaagcgaatgaccttcgcaagggcaattttatcgcattgtatcaactgcggaaaaaaacagcaaaaccgatgtgttcgctgagaaaaaaggcgacaatcgccgcctttttagccagttatctaacgctttaaacggcttttactgcatcggcgatgcggtgtgcaaattcagtcacctgcgcttcgtcttcgccttccaccatcacgcgaattaacggttcggtgccggatttacgcagcaacacgcgtccacggttgcccagcgcagcttcaacctctgcggtcacggctttaactgactcatgctcaagtggatcgccgctacctgcggtgtaacgtacgttaaccagaatctgcgggaacattttcatgccgctgcaaaggtcgtgcaggctcatatggttacgtgccatcgccgccagcacctgcaagccagcaacgatgccgtcaccggtagtagttttatccagcaggatcacatgaccggaattctctgcaccgatacgccagcctttctcctgcattttttccagtacgtagcggtcacccactttcgcgcgcgcaaatggaattcctaactgtttcagcgccagttcaagccccatgttgctcatcaatgtacccacagcgccaccacgcagctggccctgacgaagaccttcacgcgcgatgatatacatgatctgatcgccatcgactttattgccttcatggtcaaccataatcacgcgatcgccatcgccgtcgaaggcaataccgagatccgctttttcagccagcacacgagcctggagcgcgcgaacgtcggtagcccccacttcggcattgatgtttacaccgtttggctcacaaccgatagcgataacgttcgcccccagttcgcgcagcacgttcggcgcgatgtgataagtcgcaccgtttgcacaatccaccacaatcttcagttcactgaggctaagttcgttcgggaacgtggctttgcaaaactcgatatagcgacccgcggcatcaacgatacggctggctttacccagttctgccgaatcaacgcagctgatctccttttccatttccgcttcgatggcctcttctaccgcatccggcagtttggtgccgtcgatagagaagaatttaatgccattatcgtagaacgggttatgcgatgcagatatcacaattccggcctctgcgcggaaggtacgcgtcagataagccacggccggtgttggcatcgggccagtgaagagtgcggaaaggcccgctgccgccagacccgcttccagtgctgactccagcatatagccagaaatacgcgtgtctttaccaataataatcttacgggagccgtggcgcgccagcactttacccgcggcccaacccagcttaagcacaaaatcaggtgtgatcgccccatcccctccacgacaacgaatcccatcggtaccgaaatatttacgattactcatagcgtttgttttcctttgcagacagagtggcttccaccacccgcatcgcttctacggtttctttgacgtcatgaacacgaatgatgtgcgcgccttgcattgcggcaatgaccgcacaggccagactaccgctcaggcgctcggacggccccacgttcagcagctgcccaatcatcgattttcgtgacatacccaccaacagcggcaggttgaaatggtgaaattcagccaggcgcgccagtaatgaatagttatgggagagatttttaccgaaaccgaatccggggtcgagcaacaatttctcttttgcgatacccgcctgctcgcaacgtgctatttgctcaataaagtagcgattcacttctgcaaagacatcgtcatacttcggagcttcctgcatggtttttggatttccctgcatatgcatcagacaaaccggtaaaccggtttctgcagccgcctccagagcgccaggttcggaaagggagcggatatcattaataatgtgagcgccaactttcgctgactcacggatgacttctggtttggatgtatcgaccgagatccagacttcgaagcgttgagcaattgcctcaaccacaggaataacacgttgcaactcttcttcaacgctaacttccgccgcccctgggcgcgtggactcgccaccaacgtcaatgatcgtcgcgccagcattgatcatcagattcgcatgtttcaccgcatctatcagcgagttatgcgtgccaccatccgaaaaggaatcaggcgtgacgttgaggatccccattacgtgaggatggctaaggtccagtgaagtaccctgggcaaagagtttcatgatgttatccctggtatgaattgataagaaaaaaccccggagcacgccccggggttttcggtacaaatacagtcatctgatgcgggaacttacttgtcgcctaactgctctgacatggtgttacccgggttcggcgtacgcggttcatcaaccggacgaggagcctttggactaccattgtcgccagaattgttagaagcgcctggttcttcccagctcgcttccggacgtacatcgcgacgtgccatcaggtcatcaatctgcggtgcgtcgatagtctcatatttcatgagagcatctttcatcgcatgcagaatatccatattgtcggtcagaagctgacgcgcacgattatagttacgctcaatcagtgctttcacttcctggtcgatgatacgtgcagtttcatcggacatatgtttcgctttcgctacgctacggccgaggaatacttcaccttcttcttccgcgtacagcagtggacccaatttctcagagaagccccactgggtcaccatgttacgtgccaggttggtcgcaactttaatatcgttggacgcaccggtagaaacatgttccggcccgtagatgatctcttctgccagacgaccaccgtacagcgtagaaatctggctttccagtttctgacggctggcgctgattgcgtcgccctcaggcaagaagaaagtcacacccagcgcacgaccgcgtgggataatcgtcactttgtgcaccggatcgtgttccggcaccaggcgaccgataatcgcatgacccgcttcgtggtaagccgttgattctttctgcgcttccgtcatcaccatggagcgacgttccgcacccatcatgattttgtctttcgctttctcgaactcaaccatcgacacaacgcgtttgttgccacgagcagcgaacagtgccgcttcgttcaccaggttcgccaggtcagcaccggagaaaccaggagtaccacgggcaatgattgccgcgtcgatatcgggggccaatggtacgcgacgcatgtgaactttcaggatctgctcacgaccgcgaacatctggcaagccgaccacaacctgacggtcgaaacggccaggacgcagcagggccgggtcgagaacgtccggacggttagtcgcggcgataacgatgataccttcgttaccttcgaagccatccatctcaaccagcatctggttcagagtctgttcacgttcatcgtgaccaccgcccagaccagcgccacgctggcggcctacggcgtcgatttcatcgataaagatgatgcacggtgccgctttcttcgcctgttcgaacatgtcacgaacacgggatgcacccacaccgacgaacatttctacgaagtcagaaccggagatagtaaagaacggaactttcgcttcgcctgcaatcgctttcgccagcaacgttttaccggtacccggaggaccgaccatcaggacgcctttcgggatcttaccgccgagtttctggaagcggctcggctcgcgcagatactctaccagttcagcaacttcttcttttgcttcgtcgcagcccgcaacgtcagcaaaggtcgttttgatctgatcttccgtcagcatgcgcgctttgctcttaccaaacgacatggcacctttgccaccgccgccctgcatttgacgcatgaagaagatccagacaccaatcagcaacagcatcgggaaccaggagatgaagatagaagccagcaggcttggttcttcaggcggttcaccgacaaccttgacgttcttggtcaacaggttatccagtaatttcggatcctgaaccggaatgtaagtggtataacggttactatctttcttggtaacgttgatttcacgtccgttgatacgcgcttcacgaacctggtcgttattgacctcttgtaggaaggtagagtaatccaccttacggccattagactcgctgggcccaaagctctggaatactgacatcagcacaacggcaatgaccagccagagtattaggtttttcgccatgtcactcaagggattaacctcttattacaactgtgttaaaaacagcgtcaggatactctatatccagcatctttcaaactttcgtctgaaatctcccggttagggtttacgcccggtcgctacaatatacacttcccgcgaacgtgcacgagaagagtccggcttacgaactttgaccttcgtaaacagggagcgaatttcccttagatactcatcgaaaccttcgccctggaacaccttcactacaaaactgccacctggcgctaatacatcacgacacatttctagcgccagttccaccagatacatggcacgggggatatccaccgccggtgttccgctcatgtttggtgccatatcggacatgacaacctggactttgctgtcgccaacgcgctccagcagtgctttcatcaccagttcatcacgaaaatcgccctgaagaaagtccacaccaacgataggatccataggtaaaagatcgcaagcgatgatgcggcctttgccgccaatttgggtgaccacatattgtgaccaaccacccggagcagcaccaaggtcgacaaccgtcattcccggtttaaagagtttgtcactttgctgtatttcatcaagtttaaaccaggcacgggaacgtaacccctttttctgtgcctgttgaacatatttatcgctaaagtgttcctgaagccagcggctggagctggcagaacgcttcttacctgtcatttaactttcccatggggataactcatcgtaaccaattgcgtaaatttttacgcgcctatttggtgatatatgggagatggcggtagaatgacccgttttcaatcccaacgtaagcaaaaaatacgatgaatctgagtactaaacaaaaacagcacctgaaaggtctggcacatccgctcaagccagttgttctgcttggcagtaatggtttgaccgaaggggtgctggccgagattgaacaagcgttagagcaccatgaactcatcaaggtgaaaatcgccaccgaagatcgcgaaactaaaaccttgatcgtggaagctatcgtgcgcgaaaccggcgcctgtaatgtacaggtcatcggtaaaacgctggtgctttatcgcccaactaaagaacgtaaaatctcgctgccacgctaagattatcctaaagttacacacatttgctgtgtaaaacgaggggttttccgcaggcaggagagcaaaatgccacgctctgttcgttgataaaaggccgcatagcggcctttttcctttctttacaatacatcaacatcttgagtattgggtaattcttacaggtattccaccttaattacttcaaattctacttcgccgcccggcgttttgatgaccacaacatcatcttcttctttgccgatcaggccacgagcaataggtgagtttacagaaatcaggttttgtttaaagtcagcttcgtcatcgccaacgatgcgataagtctgttcttcgtcagaatccagattcagcaccgttacggtagcaccaaaaataacgcgcccattgttgggcattttggtgacatcaatcacctgcgcgttcgacagcttggcttcgatgtctttgatacggccttcgcagaagccctgctgttcacgagctgcgtggtattcggcgttttctttcaggtcgccatgctcacgcgcttccgcgatagcagcaatgatttcaggacggcgcacagatttcagaaaatccagctcttcgcgtaatttttcagcgccgcgtaaggtcatcggaatagcttgcatttgttatacctcttgaatattcctgatggggcaagtcttcacccaccccggctgttcggcctgcccggcataactcctcaccgggaccagaagcaaaaaaataccgacccgggtacaagtcccaggtcagctacaattcacattttgatagtcattttaccctgaagttcccgaagggtcatcgtttactttatagggcgttgcgccgtagtatgacggctcgattccaggttgttagcgcgagattatgcgattttccagatttatcatcggattgaccagctgtatagcgttcagtgttcaggccgcgaatgttgatgagtacgttactcaactccccgctggtgccaaccttgccctgatggtgcaaaaagtcggcgcgtcggcccccgctattgattaccacagtcagcagatggcgctgcccgccagtacgcagaaagtgattactgcgctggcggcgttgattcaactcggccccgattttcgttttaccacgacgcttgaaaccaaaggcaatgtggaaaacggcgtacttaagggtgacttagtggcgcgatttggtgccgatccgacgttaaaacgtcaggatattcgcaatatggtcgcgactttgaaaaaatctggcgtcaaccaaatcgatggcaatgtgttgatagatacctccattttcgccagccacgataaagcccccggctggccatggaatgacatgacacaatgctttagcgctccgcctgccgccgccatagttgaccgcaactgtttctccgtctcgctctacagtgcccaaaaacccggtgatatggcctttatacgcgtggcatcttattaccccgttacgatgttcagccaggtacgcaccctcccccgtggttctgccgaagcgcaatactgcgaactggatgtggtgccaggcgacctgaaccgctttacgctgacgggatgcctgccacaacgttctgagccgctcccgttggcttttgccgtacaggatggagccagctatgccggggcaattctgaaagatgagttaaaacaggcgggtatcacctggagtggaacactgctgcgccagactcaggttaacgaacctggaacggtagttgccagtaaacagtcggccccgctgcacgatctgcttaagattatgctgaaaaagtcagacaacatgatcgccgatacggttttccgcatgataggccatgcgcgcttcaatgtgcctggaacatggcgggccgggtcggacgccgtgcgtcagatcctgcgccagcaagccggtgtcgatattggaaacaccattattgccgatggttcagggctttcgcggcataacctgattgcccccgccaccatgatgcaggtgctgcaatacattgcccaacacgacaatgaacttaactttatctccatgctgccgctggcgggctatgacggctctttgcagtaccgtgcaggtctgcatcaggcgggcgtggatggcaaagtctcagcgaaaaccggttcgttgcagggggtatataacctggcgggattcattaccacagcgagcgggcaacgaatggcgtttgtgcaatatctttctggctatgcagtagaaccggcggatcagcgtaatcgccgtattccgttagtgcgtttcgaaagccgtttgtataaagatatttaccagaacaattagtcaaaaagaaaccccggcatatggccggggtttcagattattgacaaagtgcgctttgtttatgccggatgcggcgtgaacgccttatccggcctacaaaatcgtgcaaattcaatatattgcaatcatcttgtaggcctgataagtgtagcgcatcaggcttatttggcattggtcattagtgattaacgcttgtaaatgaactcaacgccttcttcgtcgtcttcgtcccagtcgtcatcccagtcctcatcatcctcttcagcaatctcttcaagctgctggcgatgataatcatcccacatgaattcgactttctctggctgtttcgcttcttcagcctgcacgaccgggttttcaatgataaaggtcatcacatcccagcagagatctttcacgcccagtccgctcgccgcagagatcagataatatttatcttcccagcccagcgcctcagcgatcgctttcgctttctcttcggcttctgccttatccagcagatcgatcttgttgaacactaaccaacgcggtttcgccgccagatcctggctgtatttttccagctcgctgataataatacgcgcgttttcaaccggatcggtgccgtcaatcggatcgatatcgatgaggtgcaacaggacgcggcaacgttccaggtgcttcaggaagcggatacccagacctgcgccttccgcagcgccttcaatcagtcctggaatatcggcaacaacgaagctcttttcgttgtccattcgtaccacacccagacttggcaccagagtggtaaacggataatccgccactttcggtttagccgccgataccgcgcgaataaaggtcgatttccccgcgtttggcatccccaacataccgacgtcagccagcagcatcagctccagcagcagctcacgcttatcacccggcgtaccgttggttttctgccgtggtgtacggttaacggacgatttgaaacgggtattgcccagaccgtgccagccgcccttagcaaccagcagacgctgaccgtgtttagtcatatcgcccatggtttcaccagtaccctggtcgattacacgcgtacctaccggcactttaatcgtgacgtctttaccgcgcttaccggtacagtcgcggcttgcgccgttttgaccgcgctctgcacggaaagatttttcaaaacgataatcgataagcgtgttcaggttctcgtcggcttccatccatacgtcaccaccatcaccgccgtcgccgccatccgggccgcctttcggaatatacttttcgcggcggaagctcacgcaaccattaccgccatcacctgcaacgaccagaatcgatgcttcatcaacaaacttcattttattctccgtaaatcattcgcctgcgcggggttgcgataccaccgttgtatgcttacgtaatccgccccaaatacgatgaccaatggcggaatacatcgcgcccgcaaccacgacaaacgcaccgagataacctaaaaggtttaacatcggtctggcgaagaaatcgggccaggccagtgataaaagatctgaaaaaaacagcgtaaacagtggggtgagcgtgatgatcgcgctcacctgcgctgcctgccagcgagccatcgcttccgccagggcgccatatcctaccaatgtattcagtccgcaaaaaattaaacatgcgagctgccagtggctaagctgcgctatcactccaggctttgccagagggaagagcgcgattgtacataaagtgtacagtaaaaacagaatctgcggtgaggccagccgacgcaataaaaccttttgcgccacgccataactcacccaaaccgtcgccgcaccgaccccaaagataactccccaggtgtaatcagtgagctttgtaaatatctcgaccagactggtgttaaaaaacatcaccaggcagctcaggagcatcaatgcccctacaacctgagtgctgcgcattttctctttcaggataaatacgctggcaaccatcatgccaactggcgagagttgcccaatcacctgcgaagcggtcggactcaggtattgcaaggatgagctgaacaggatgaagttcccaaacagcccggcggtcgccactgccaacaaaatcaaccagcgtggcttacgaaacacgcgtaatggcggcaacctcttcttcaccgcaagaatggcaccaaggccaatactcgccatcaagaaacggtaaaacacgattgtcggaggttccatcacctccagcacctgcttcattgcgattggcaacgccccccagcaaattgctgtggtgagcgccaaaagaatgccaatgcctgcctgctgcttcataccgtattccctgcaaagcgcatttgcggattaacgtcgcaccatgctcatttttaccggttatcgaatgtaaaaagccccgcaacgtgttgcggggctttcatccgttaccgggacgcgaaaaacttattcagcttcgatgctgataaatttacggtttttcgggcctttaacttcgaatttcactttaccgtctgctttagcaaacagagtgtggtcacgaccgcaacctacgttagcgccagcgtggaatttggtaccacgttgacgaacgatgatgctacccgccagaacggattcgccaccgaaacgcttaacgcccaggcgtttagcttctgaatcgcgaccgttacgtgtggagccgccagcctttttatgtgccatttgaaatctctcctcaggtcttaggcgctgatgccagtaattttcacatcagtgaaccactgacgatggccctgctgcttacgatagtgtttacgacgacgaaacttaacgattttaactttctcgccacgaccgtgagcaacaacttcagctttgattacgccgccatcaacgaaaggaacgccgattttgacttcttcaccgtttgcgatcatcagcacttcagcgaactcaacagtttcgccagttgcgatgtccagcttttccaggcgaacggtctgaccttcgcttactcggtgttgtttaccaccactttggaaaaccgcgtacatataaaactccgcttccgcgcacaccttttcaatgattcagagtgcgctataaatattcacaatagggcgcgaatattacgcaaaacgcacgcctttgacaagtgctacagtcaatacacgaagaaaaaaaacacaacttgtacggtaacgtttatctgtgccattttttcagtacaatcaccctatattcctaaccataaaccctaagttgcctttgttcacagtaaggtaatcggggcgaaaagcccggcttttgcgatgaatttagaaaaaatcaatgagttaaccgcgcaagatatggcgggtgttaatgcggcaatccttgagcagcttaattccgacgtccaactgatcaatcagttaggctattacatcgtcagcggcggcggtaaacgtattcgtccgatgattgctgtactggctgcacgagctgttggctatgagggaaatgcgcatgtcaccattgctgccttgatcgagtttatccacacggcgactctgctacacgacgacgttgtggatgaatcagatatgcgcaggggtaaagctaccgccaacgctgcatttggcaatgccgccagcgtgctggtaggcgattttatttatacccgcgcgttccagatgatgaccagcctcggttcgctcaaagtgctggaagtcatgtcagaagccgtaaacgtcatcgcagaaggtgaagttctgcaactgatgaacgttaacgatccggacatcactgaagaaaactacatgcgcgttatctatagcaaaaccgcgcgtctgtttgaggctgccgcgcagtgttccgggattctggctggctgtacgccggaggaggagaaaggcctgcaggattatgggcgctatctcggcactgctttccagttgatcgacgatttactcgattacaatgccgatggcgaacagttaggtaaaaacgtcggcgacgatctgaacgaaggtaaaccgacgctgccgctgctgcatgcgatgcatcatggcacaccagaacaggcacagatgatccgtaccgccatcgaacagggtaacggtcgccatcttctggaaccggttctggaagcaatgaacgcttgtggatctcttgaatggacgcgtcagcgcgccgaggaagaagcagacaaagccatcgcagcgttacaggtgctcccggacaccccttggcgagaagcactcatcggcctcgcgcacatcgctgttcaacgcgatcgttaatcccctcccctcatcccgcgcagcgcgcggggtggttccagtaaattccataaaaacacttactcagctctataacacctgaaaaacaggctgtgcatctttatatattctgaatattcacactccttacatgaactttttagagcaatcggccatcaggagtatagtgatgctcgacagaagaagtgttctgaatgaaagcgactaacttaaggagtgaggaaagatggaaagtaatttcattgactggcatcccgctgacatcattgcgggtttgcgcaagaagggaacgtcaatggcggcggagtctcgcagaaatggtttgagttcctcaacgctggcgaatgcattatcgcgcccatggccgaaaggagagatgattattgcgaaagccctgggaactgacccctgggttatctggccatcacgctaccatgatccgcagacccatgagtttatcgacagaacgcagttgatgcgtagctacactaaaccgaaaaaatgagtggtctggcggtagccccgcgaacggggctgccagctctcagacgattattcgcctttcacacgctcaatatttgcacctaaagcgcgcagtttgtcttcaatgcgttcgtagccacgatcgatgtgataaatacgatcaaccaccgtcgtcccttccgcaatacagccagccagcaccaggcttgctgatgcacgcagatcggttgccataacctgtgcgccagaaagtttttcaacaccgtgacaaataacggtattgctttcgatttcggcatgcgcgcccatacggctaagctccggcacatgcataaagcggttttcaaagaccgtttcggtgatgaatccggtcccttctgccaccaggttcaacagcgtgaactgggcctgcatatcggtcgggaatgccggatgcggcgcggtacgtacgttaacagccttcggacgtttgccatgcatatccaggctaatccagtcttcgccgacttcgatgtccgctccagcatcacgcagtttcgccagcacggcgtccagagtatctggctgcgcgttacggcagataattttgccgcgagaaatcgccgccgccaccaggaaagtaccggtttcgatacgatccggtagcacgcgatagacaccgccgcctaaacgttccacaccttcgatgacgatacgatcggtgccctgaccgctaattttcgcacccagcgtaatcaggaagttcgcggtatcgacgatttccggttcacgcgctgcgttttcaataatcgtggtaccttccgccagggttgcagcacacatgatggtcaccgttgcgccaacgctgactttatccatcacgatatgtgcgcctttcagacgaccatcgacggaagctttaacgtaaccttcttccagtttgatggtcgcgcctaattgttcgaggccagaaatgtgtagatcaaccggacgcgcaccgatcgtacaaccgccaggcagtgaaacttgcccctgaccaaagcgcgctaccagcggccccagtgcccagatagaagcacgcatggttttaaccagatcgtaaggtgcgcagaatacattaacgtcgcgggcatcaatatgcacagaaccattacgttctactttcgcacccagctggcttagcagcttcattgatgtatcgacgtctttcagtttcgggacgttctggatctctaccggttcttccgccagtagagcggcaaaaaggataggcagagcagcatttttagcgccggaaattgtgacttcgccctggagcttcgttggcccctgaacacgaaatttatccatttagtttgttctcagttaacaattcatatccgctaccggcgaatcgcccatagctcaaaagccgttcagtttgcgatcgcgcgcccactccgcaggggtatacgctttgatcgacacagcatgaatgcggttatccgcaatatattccatcagcgggccatagaccgtctgctgttttttaacccgactcatgccgtcaaacaactcacccacggcaataacctgaaagtggctgccatcgccggaaacgtggacttcctggagggagagagcgttcatcaacacgctctgaatttcattattttccatgggatcttcaatcatcagttaataaaccagcgaaacatcttagagcaaagttgcgctggcataaataagcaaaaagcctcgctgataaatcagacaaggctcgacttgcaggcaggtttgccggacaggcggttaacgccatatccggcctgaaaaaatttaacgaggcagaacatcagcaggcaaattatacaatttcgccagggtatacactttgtcgtttaccccctgaagcgtcacattgttgccctgctttttcgccagatcgataagatggagcagcagtgccagtccccccgtatccacgcgggagacacggctaagatcgatgcaggtaatccccttcaccgcttcctcacgcatttcccaaagcggtagcaaaacgtcctgatccagctctccggataacgccagcgtgtcacccgtctgcatccagctcagtgactcgctcattattttttctcttccagagtgattttctgttgagaaatcgatttcagttgcgctgtcaggccgtcgatacctttggtacgcagcagcgttccccactcgttttgtttggtggtgatcatactgacgccttcagcaatcatgtcgtaagcctgccagttgcccgtctgggagtttttacgccactggaagtccagacgcaccggcggacggccattcgggtcaataatggtaacgcgaataggcacaatggttttatcgcccagcggctgttctggcgcaatctgataggtttgaccgtgatacatcgccagcgcctgaccgtaagcctgcttcaggtactcacggaaagcggcaaagtaggcttcacgttgagcaggggtcgcactcttgtaatactggcccagcaccagcgcaccggcgtatttcacctgtacgtatggcagcagttcctgatcaacaatggtacgcagataatccgggttggcccgaatttgcggttgctcattcttcaggcgatcgaacgttttctgcgccgcctcgtccatcagcttatacggattggtctggtctgccgcggttgccgcactcagaggtgcaatcaccagcaaagcgaccatcattaaacgtttaaacatgcgtcggttctcctgaaattatttcgttgtacccacaggttcagtggtttcattattacctggcgcagcagctggcgcatcgccactattcttattgtcatcgcctttactaccgtaaaggaactgaccaatgagatcttccagcaccatcgcagacttagtgtcctgaattgtatcgccatccttcaggatagcagtccccagttccgggtcttcaaaaccgacgtttaatgccagatattgttcccccagcaggccggaagtacgaatgctcagcgaactggtatctggaatgtggttataacgttgttcaatttccagcgttacgcgcggcagataggttttcgggtccagcgtaatatccgccacccgacccacaacaacgccaccaatactgaccggagagcgcgctttcaggccgccaatgttatcgaacgtcgcataaagcgtgtaggtcggttcagtacgtatggacgtcacgttcgccgccttcaggcaaacaaacagcgccgccagcagtgctgctaataaaaagatacccacccaaatttcattttttttcgtttgcatgaactcaattcccaaacatcaatgcggtcagcacaaaatccagccccagaacagccagagacgagtggacaacggtgcgagtggttgcccggctaatcccggcagacgtcgggatggcgtcgtagccgttaaacaacgaaatccacgtcaccgtgatggcgaacaccannnnnnnnnnaatcagacagttgaccagatccatacgccagtcgacggcattttgcattgccgaccagaagaacccgctatcaatgcctttccaactgacgccgaccagagatccgccccagatccccacggcgacgaaaataaccgtcaacagtggtaatgaaataaccccagcccagaaacggggagaaataacccgacgcagcggatccaccgccatcatctccatactggagagttgctctgtagcgcgcatcaggccgatttctgcggttagcgccgaaccagcacgcccggcaaacaacaacgcggcaaccaccggccccagttcacgcagtagcgataacgccaccagcatacccagactggtttccgcactataagtggtcagaaccagataaccttgcagccccaacaccattccgatgaacacgccagaaaccacaataatcagcatcgacaggacgccgacattatagagctggcgcaccagcagcggcgcatgtttgcgaaattccggtttgccgaccagcgcattgaataacattaacccggcccgcccgaacgttctcagggttttaatccctttatgtccgagcgacgccagcgcatttaacagcatgagtggcttaactccctggtaaaagatcagcgtgataatcgccggcaggatagcggaacggaacaggcccgtcagctatcccgtccagaaactgacgtacgcgcggatcaggattcgcctgcaacgcctgggcactgccatgagcgacaatttttttgtccgccaggatccaggcgtgatccgcaatacttaacacttccggcacatcgtgagaaaccaccacacaagtcacgcccagcgcgctgttcagctcagaaatcagcttcaccagtacgcccatggtgatgggatcttgcccaacaaaaggttcatcaaacatgatgagatccggctccagcgcaatcgcacgcgccagcgctgcacgccgcgccatcccaccggaaagttcagaaggcattagtttagccgctccacgcagccccacggcctccagcttcatcatcaccgtactatgcaacaatggcgcgggaagttgggtatgttcgcgcagtggataggcgacgttgtcaaatacgttcatatcagtgaacaacgccccggactgaaataacatgctcatccgtttgcgcactgtatacaggcgcgaacgagacatcgccggaatattctcaccatcgaaaaggatctcaccatgatctggtgcgatttgcccgccaatcagacggagtagcgtcgttttaccgatgcccgatggccccatgatcgccgtgatcttccctcgcggcacggtcagggaaatattatcgaagatgcagcgattgccacgcgtaaaactgacatcgcgcatatcgactaaattcgccacagactgctccataattcacccttcgtcttgcgttgattttctaagcatggcgctcaatttaaccttgaacccaacatatttacagaatattacccgccgtggttagcgaaagctggcatttgttttactttttagccgcataaagtcaaaattaagaatccgttacggctttctgaaaatcttcagcggaccggcgagtatacctgaagaaaggacgttagatgcttttagctacggcactgttaattgttggtttacttttggtcgtttacagtgccgaccgcctggtttttgccgcgtctattctttgccgaacctttggcatcccgccgctgatcatcggcatgacggtggtcagtattggtacatcgttaccagaaatcatcgtctcgcttgccgcgtctctgcacgaacaacgcgatttagccgttggtacagccctcggctcaaacattatcaatatattgctgatcctcggtctggctgcgctggttcgtccttttaccgtccattctgatgttctacgccgtgaattacccttaatgttgttggtcagcgtggtggccggttccgtactctatgacggacaacttagtcgaagcgatggtatctttctcctctttctggctgtgctatggctgctgttcattgttaaacttgcacgtcaggctgaacgtcaggggactgacagcctgaccagagagcagcttgcagagctgccgcgtgacggcggattgcccgtcgcgtttttatggctcggcattgcgcttatcatcatgccagtggccacgcggatggtggttgataacgccacggtgctggcgaattactttgccatcagcgagttgacgatgggtctgacggcaattgctatcggaaccagcctgccggaactggcaaccgcaatagcgggggttcgcaaaggtgaaaacgacattgctgtcggaaatatcattggcgcaaacatttttaatattgtcatcgtgttgggtttacccgcgctgataacgccaggagagattgatccactggcgtacagtcgtgactacagcgtgatgttgctggtgagcattatttttgcgttgctgtgctggcggcgctccccgcaaccgggccgtggtgtaggggtattattaactggcggatttatcgtatggctggcgatgttgtactggttatcgccaatactcgttgaataactggaaacgcattatgtcgcacgtagagttacaaccgggttttgactttcagcaagcaggtaaagaagtcctggcgattgaacgtgaatgcctggcggagcttgatcaatacatcaatcagaatttcacgcttgcttgtgaaaagatgttctggtgtaaagggaaagttgtcgtcatggggatggggaaatcggggcacatcgggcgcaaaatggcggcaacgtttgccagcaccggtacaccttcatttttcgtccatcctggtgaagccgcgcatggtgatttaggcatggttaccccacaggatgtggtgattgctatctctaactcaggtgaatccagcgaaatcacggccttaattccagtgcttaagcgtcttcacgtaccgttaatctgcatcaccggtcgcccggagagcagcatggcgcgcgccgcagatgtgcatctgtgtgttaaagtagcgaaagaagcctgtccgttagggctggcaccgaccagcagcaccaccgccacgctggttatgggcgatgccctcgctgtcgcgctgttaaaagcacgcggctttactgctgaagattttgcgctctcacacccaggcggcgcactgggtcgtaaacttctgctgcgcgtaaacgatattatgcatacgggcgatgagatcccgcatgttaagaaaacggccagtctgcgtgacgcattgctggaagttacccgcaaaaatcttggtatgactgtcatttgcgatgacaatatgatgattgaaggcatctttaccgacggtgatttacgccgtgtcttcgatatgggcgtggatgttcgtcagttaagtattgccgatgtgatgacgccggggggaatacgtgtgcgccctggcattctggccgttgaggcactgaacttaatgcagtcccgccatatcacctccgtgatggttgccgatggcgaccatttactcggtgtgttacatatgcatgatttactgcgtgcaggcgtagtgtaaagattcaaggataaacaacaatgagcaaagcaggtgcgtcgcttgcgacctgttacggccctgtcagcgccgacgttatggcaaaagcagagaacattcgtctgctgatcctcgacgttgatggcgtactgtcagatggcctgatttatatgggcaataacggcgaagagctgaaagcgttcaatgttcgtgacggttatggcattcgttgtgcgctcacctctgatattgaagtcgctatcattaccgggcgaaaggctaaactggtagaagatcgttgtgccacattggggatcactcacttgtatcaggggcagtcaaacaaactgatcgcctttagcgatttgctggaaaaactggcgattgccccggaaaatgtggcttatgtcggcgatgatctcatcgactggccggtaatggaaaaagtgggtttaagcgtcgccgtggccgatgcgcatccactgttgatcccgcgcgccgattacgtgacgcgcattgctggcggtcgtggcgcagtgcgcgaagtttgcgacttattactcctggcgcagggcaaactggatgaagccaaagggcaatcgatatgagtaaagccagacgttgggttatcattgtgctatcactggcggttctggtgatgatcggcattaatatggccgaaaaagacgataccgcccaggtggtcgtcaacaacaatgatcccacctataaaagcgagcatacggacacgctcgtctataacccagaaggggcactaagctatcgattgattgctcaacacgttgaatattattccgatcaggccgtttcgtggtttacgcagccggtacttaccacgtttgataaggataaaatcccgacatggtccgtaaaagcagataaagccaagctgaccaatgaccggatgctctatttatatggacacgttgaagtcaacgcacttgtgccagactctcaacttcgcagaatcacgacggataacgcgcagatcaatctggtgactcaggatgttacctctgaagacctcgtcacgttatacggaacaacatttaactccagcggtctgaaaatgcgcggcaacttacgcagcaagaacgccgagctgattgaaaaggttagaacatcctatgaaattcaaaacaaacaaactcagccttaatcttgtgcttgccagctcacttctggccgccagcattccggcatttgccgtaaccggagacactgatcagccgatccacattgaatcggaccagcaatctcttgatatgcaaggcaacgtggttacctttaccggtaatgtcatcgtcacccagggcaccatcaaaattaatgccgacaaagtggtcgttacccgtccgggcggcgaacaaggtaaagaagtgattgacggctacggtaaaccggcaacgttctaccagatgcaggacaacggtaaacccgttgaaggtcacgcttcccagatgcactacgaactggcaaaagattttgtcgttctgacgggtaatgcttatctgcagcaggtcgatagcaacattaagggcgataagatcacttacctggtaaaagagcagaaaatgcaggctttcagcgacaaaggcaagcgcgtaaccaccgttctggtgccgtcgcagctgcaggataaaaacaacaaaggccagaccccggcacagaagaagggtaattaattcgttatggcaacattaactgcaaagaaccttgcaaaagcctataaaggccgtcgcgtggtagaagacgtcagcctgaccgtcaactccggggaaattgtcggtctgctggggccaaacggtgccggtaagaccaccactttctatatggttgtaggcattgtgccgcgcgatgcgggcaacatcattattgatgatgacgatatcagtctgctgcctctgcatgcacgcgcgcgccgcggtatcggctatctgccacaggaagcctccattttccgtcgcctcagcgtttacgataacctgatggcggtactgcaaattcgtgacgacttgtctgctgaacaacgtgaagaccgcgcgaacgagctgatggaagagtttcacattgagcacctgcgtgacagcatggggcagtcactctccgggggtgaacgtcgccgtgtagaaattgcccgcgcactggctgcgaatccgaaatttattctgctcgacgaaccgtttgccggtgttgacccgatctcggttatcgacattaaacgcatcattgagcacctgcgcgacagcggcctgggcgtgctgatcactgaccacaacgtgcgtgaaacactggcggtttgtgaacgcgcttatatcgtcagtcaggggcatttgatcgcccacggcacgcctacagaaatcttacaagacgaacacgttaagcgtgtataccttggggaagacttcagactctgatagggtagaagtttgcgacgttttagcaggagagtacgattctgaacatgaagcaaggtttgcaactcaggcttagccaacaactggcgatgacgccacagctccaacaggcaattcgtctgttgcagttgtcgacgctggaacttcagcaggagctacagcaggcgctggagagtaatccgctgcttgagcaaatcgacactcatgaagaaatcgacacccgcgaaacgcaagacagtgaaacgctggacaccgccgacgcgctcgaacaaaaagagatgccggaagagctgccgctcgatgccagttgggacaccatttacaccgctggtacaccatccggcaccagcggtgactacattgacgatgagctgccggtctatcagggcgaaacgacgcagaccttgcaggattacctgatgtggcaggtcgagctgacaccgttttccgacactgaccgcgctattgctacctctatcgtcgatgccgttgatgacaccggttatctgactgtcccgctggaagatattctcgaaagtatgggcgatgaagagatcgacatcgacgaggttgaagccgtccttaagcggatccaacggtttgatccggtcggtgtagcggcaaaagatctgcgtgactgcctgctaatccaactctcccaattcgataaaaccacgccgtggctggaagaggccagattgatcattagcgatcatctcgatctgttagccaatcacgacttccgcactttaatgcgcgtcacgcgtctgaaagaagatgtgctgaaagaagccgtcaatctgatccagtcgctcgatccgcgccccgggcagtcgatccagactggcgaacctgagtatgtcattccagatgtgctggtgcgtaagcataacggtcactggacagtagaactcaacagtgacagcattccgcgtctgcaaatcaaccagcactacgcctcgatgtgcaataacgctcgcaatgatggtgacagccagtttatccgcagcaatctgcaggatgccaaatggttgatcaagagtctggaaagccgtaacgatacgctactgcgcgtgagtcgctgtatcgttgaacagcagcaagccttctttgagcaaggcgaagaatatatgaaaccgatggtactggccgatatcgcccaggctgtcgaaatgcatgaatcgacgatatctcgcgtgaccacgcaaaaatacctgcatagtccacgaggcatttttgaactgaagtatttcttttccagtcacgtcaataccgagggcggcggcgaagcttcctccacggcgattcgtgcgctggtgaagaaattaatcgcggcggaaaacccagcgaaaccgttgagcgacagcaagttaacctctttgctgtcggaacaaggtatcatggtggcacgccgcactgttgcgaagtaccgagagtctttatccattccgccgtcaaaccagcgtaaacagctcgtttgacccaaccgataaggaagacactatgcagctcaacattaccggaaataacgtcgagatcaccgaggcactgcgcgaatttgttacagccaaatttgccaaacttgagcaatattttgaccgaatcaaccaggtctatgttgttctgaaagtggagaaagtcacccacacctcagatgcaacactgcatgtaaacggtggtgaaattcatgccagcgcggaaggtcaggacatgtacgctgccattgatggcttaattgataagctggcacgccagttgaccaaacataaagataaactgaaacaacactaattgtccgggcaattagcatgtgcatggcggcctgttgtgcggcacaacgggccatttgtacggttaatgctccgagcctgttccactgtttgagtgggcaggttcttaggtgaaattatgacaaataatgatacaactctacagcttagcagtgttcttaacagggaatgtacgcgaagccgcgtccactgtcagagcaaaaaacgcgccctggaaatcatcagcgagctggcggcgaaacaacttagcctgccgcctcaggtggtttttgaagctatcctgacgcgggaaaaaatgggcagtaccggtatcggcaatggtattgccattccgcatggcaaactggaagaagatactctgcgcgccgttggcgttttcgttcagctcgaaacgcctatagctttcgatgccatcgacaaccaaccggtggacttactttttgccctgctggtgccggcagaccaaactaaaacgcacctgcatactctgtcgctggtggcgaaacgtctggcggacaaaaccatctgccgccgtttacgcgcagcccagagcgatgaagagctgtatcaaatcattacggataccgaaggtactccggatgaagcgtagttattcggtaatgtctcttttagacgttgtgaggagaaacagtacatggtactgatgatcgtcagcggacgttcaggttcaggtaaatctgtcgccctgcgtgcgctggaagatatgggtttttactgcgtggataaccttcccgtagtgttgttacccgatctggctcgaactctggccgatcgcgagatttctgccgccgtcagcattgatgttcgtaatatgccggagtcaccagaaatattcgaacaggcgatgagtaacctgcctgacgctttctcaccgcaactactgttcctggatgccgaccgtaataccttaattcgtcgttacagtgacacgcgccgactgcatccgctttccagcaaaaacctgtcgctggaaagtgctatcgacaaagaaagcgatttgctggagcctctgcgttcgcgagcggatctgattgtcgatacctcagaaatgtccgttcacgagctggctgaaatgctgcgtacccgtctgctgggtaaacgtgaacgcgaactgaccatggtctttgagtctttcggcttcaaacacggtatccctatcgatgcagattacgtctttgacgtgcgcttcttgccgaacccgcactgggatccgaaactgcgtccaatgacaggtcttgataaacctgtcgccgcgttcctcgaccgccacacagaagtacacaattttatctaccagacgcgaagctatcttgaactatggttacctatgctggaaaccaacaaccgtagctacttgacggtcgccattggttgtaccggcggaaagcaccgttcggtgtatattgcagagcaactggcagactacttccgctcgcgcggtaaaaacgtccagtcacgccatcgtacgctggaaaaacgtaaaccatgaccgtcaagcaaactgttgaaatcacaaacaagctgggcatgcatgcccggcctgcaatgaagctgtttgaattaatgcagggttttgacgctgaagtgctgttacgtaatgacgaaggcaccgaggccgaagccaacagcgttattgcgctgctgatgttggattctgccaaaggacggcagattgaagttgaagcgaccggcccacaggaagaggaagcactggccgccgttatcgccctctttaactctggttttgatgaagattaatcttcatcactttgacatacaactcccttcaaactccccccgacaataagaaaatcacgtactgaaatcgttctcaatcaacgtcatttgtacattttgtgcgcttttcactttcagaagaaccttaagaaaaccttaagaggcattgtttaggttttgtttaagttaatcgaccatactggagatcgtcagaaaatatttccaggagatggcatgattcgcttatctgaacaaagtcccctgggcaccggaagacatcggaaatgttatgcgcatccggaagatgcccaacgctgtatcaagattgtctaccatcgtggcgatggtggcgataaagagatccgccgtgagttaaagtactacgcgcatcttggtcgccggttaaaagactggagtggaataccgcgctatcacggtaccgttgagacggattgcggaaccggttatgtctacgatgtgattgcagattttgacggcaaaccctccattacgctgaccgaatttgctgaacaatgccgttacgaagaagacattgcacaactgcgccagctactgaaacagctgaagcgttatttgcaggataaccgtatcgtgacgatgtcgctgaagccgcagaatatcctctgtcaccgcatcagtgagtcagaggttatcccggtcgtctgtgacaacattggtgaaagcacattgattccactggcgacctggtcgaagtggtgttgtctgcgtaagcaagagcggttatggaaacgatttatcgcccaaccggcgctggctattgccctgcagaaagatctgcaacctcgtgagagcaaaacgctggccctcacttcgcgcgaagcttaatccagctggtgttgttgcataaacggctcaccgcctaactgatacatctgccgtaaaatccacgcctgacggctacgcacgtagcccgatggcgaggagactttgaaacgaagtggattaggtaatacagctgccagtaatgcagcttccgaccgggtaagtttgctcgcgggtttgtggaaataacgttgtgccgcagcttcgacgccaaacacaccgtcgccaaattcggcgatattcaggtaaaccgtcaggatacgctttttgctccagactgtttctatccccagcgttaatccagcttccagcccttttcgtacccagctacgcccatcccataaaaagagatttttggccgtctgctgagaaatcgttgaagcaccgcgaatacggttttcattgcgctcgttgtgcgccagggctttctcaatggaagcgacatcaaagccccagtgctcaggaaatttctgatcttctgcggcaatcaccgccagtcccatccacggcgagatttgatccatactgacccagtcagaatgtgccacgtaacgaaaattgccatgcagccaggcgctgacctgtcgctcgaccattaccgctgagaagggaacaggcgcaacactaaacaacgcgatgcccccgccccagaaaacggcgaggacaaccattaaccgcaaaagaaaacggcgaacgaaactaaacaccgttaagcggcttttactcattcagccagaaccagcacgcgggaaaccagcttatcaatgccgctcgccgcttctgcaatgttctgcgccagcatatatgctggggtggtgacaatcttattgtcttcatcaaccacgatatcatcgacaggacagggcacatgctccgcgcccatctcttccagcacttctgcggtatcgatatcagtaccgatggtcaaacgcagcgggaaatcgaaaattttcggcagcatcgccggggcaatacacataaaaccaagcggttttccggcctgatgcatcgcttgtgccagcgcctttaattcacggtcaacggtgcattcgctaccaagagtggcaaaattgcttaaattcttcgccgcgccaaatccccccggcacaatcaacgcatccagttcagcggcatcggcctgggccagaggacggatttcaccgcgcgttattcgtgccgcttcaatcagcacgttgcgcgtttccgtcatcgcttcgccagttaaatggttgataacatcaacctgctgcttatccggtgcaaagcagaccgcctgcgcaccgctgcgtgaaatagctaacaacgtcaacaccgcttcatgaatttcagaaccgtcatagacgccgcatccgctcagaattacgccaattttcttcattgtgatcatcctttcgcaattgactgaaacacattaatttttttaataaaaatggtacgcatcacacatttaactgattcatgtaacaaatcatttaagttttgctatcttaactgcgtgcggcctgaaaaacagtgctgtgcccttgtaactcatcataataatttacggcgcagccaagatttccctggtgttggcgcagtattcgcgcaccccggtctagccggggtcattttttagtggcttttgccacccacgctttcagcacttctacgtcgtgacgccactcttctttcatctcttcaatccattcaccgacgttatcttcccaggcaggaaggtccggagactgaatttgctgacccagctgttgcagatggcgtaaccccactgaccccgccgcacctttaattttatgtccttcctctacaatgccttttttatcctgcgccgtcagattcgactccagcacgctgacatagcccggcatcatcttctcaaacaccgctaacccgtcggtgatcagcttcggtcctacaagttcgagatactgttccagcatgggaatatcgagcaatgcttctgatttactgttctcttctgtcgtcaccgtactctcctcatcatcctgggtatcccagaatttcttgatcatcgcggttagcgccggaaccgaaagcggcttactcagcacatcatccattccagcattgaggtactcttgtttgtctttcagcacgttagcggttaaggccaccagcggcggtaaatcctcgcgcggataacgcttcgtcagttcacgagagatatccagcccggtcatatctggcaactgaatatccagcaacaccaggtcgtattcgcccggtttaaacatctccagcgccgccttgccggtcatggcgacatcaacgctgttacctaatttttccagcacagaacgcgcaacaatcacgttcagttcaatgtcttccaccagcagcacattcagcgccggtaaaggcatatcgtcttcatcaaacgcatcatcgacctcttctgctaccgacggtgcgtggatcgtcaacgtaaaggttgaacctttgccctgttcgctggtaaccgtaatatcgccgcccatatttttcgccagacgacgagaaacggccagaccaataccggtgccggtggcaggtttaccgccatgactgtctttcacctggtaatacatggcgaaaattttatccagctcatcctgcggaatgccgataccagagtcttccacttcaaaatgcagcatatcgccttcatcgtagcgcacgcgcacggtaacctggccttgctgggtgaatttgacggcgttactgatgaggttccacaggatctgccgtaaacgcgtcccgtcggtaatgacctgatgcggtaatggcagcgtcggctccaggttaaagcgcaatcctttttgttgcgcctgcaatgcggagagattttccagatcggcaaggaagctggtgaaatcaaccggttgattatcaagctggaccttgcgccgttccatcttatccatgtcgataatatcgttaaagatattccccagcgtgacggccgaaacatggatggtcttgagatatttttcctgctcggcggtgagttcggtatccagcagaatannnnnnnnnngcagaatacggctcaggccgacgataccgttcagcggtgtacgcaattcgtgactgatggtggagataaacgtcgttttgtcgcggctggcccgttcaagcgcatcctgataccgcttacgctcggtaatgtcgcgaccaaagcccatcaaaccgtgacgtttacccacgcggtcgtagtacggcactttacggatttcaaagcaggctttgcgcccgtccgggtaatccagccactgttcataggtcagtgacacattatgacggaacactttttcatcggtttcaatgacttttgcggcggcttccggtgagtaaacatcagcaggtttcaggtgaaccagttgtttttcgctttttccggtcagcagctccatcgcgcggttacagccggaaaactctttatcttcgttacgataaaaaaccaggtcgggtgaagcatcaaggaaggaacgtaagaatgaggattgctgctcgagctgaatttgtgtctcttcgcgctctttgatttcaattttcagttggccgaaggtttcctgcagttctgcttccgctttttcacgaacggcgatttcctgatttagctgggcaatattatcttttaactgaacgttgaggctcaaatcgcgctcgcgcatctcctccagtttttgcaccagccgtgacagacgttgtcgcgactcctccagttgcccgtcgaccaccgtaagaaagtagaccgcccacggcgtaatcagcaaaccaaagaagatagaacgaataacatcaatgctttcgacctgaccatgcagcaccatggttaccgccatttgtaccacaatggcaagaacgacgagggccagcgccagcaacattgagaagcgcaccagacctaacttcatcatcaggtcaacataatactgcgccagcagacgaatttgcttcattagggaattccttcacgacaacctgccccaataatacccaattctgacagttacgttataaattgtgtgagaaatgcggaattcccctcaacgacctactccgttggaggtatccacggacgttccagcgccgatccctgtacgccatgttcattcagatagcgatccagctcgaccattcccgtccatcgattttcgcaccacagaggagcaagcagcgtcgggcgacgggcgctggcggaaatgcggtggtagatcacttccggtggcgtatggcgaatcatttctccggcagtgagcgtgtaatcctccagttcaataccgttcaaacgccccgcttcccaggctttcgccataatgctgcctttcacaatatgcagcggatgcagctttatgccgtccacgccggtttcaaccactcgctccagcgtttgcaaacattcagcctgcccttcgccaggcaggccgacaattaagtgggaacacaccttcagcccgcgctgacgtgccagctgggttgtacgctgataacaggcaaaatcatggccgcggttgatgcgatgcagtgttttgtcgtgggcggtttgtagccccagctccagccacacttcgtaaccctggtccttatattcgcaaagcagatccagcaccgcatccggcacgcagtccgggcgggtaccaacacacaaaccgacaatattggcctggctcaccgcctgctgatacatagaacgcagcacctgaacttccgcaaaggtgctggtatacgcctgaaagtaggccagatagcgtttagcgcggttaactaaattcgcctggtgcgccagttgctcggcaatggaacgatgctgctgcgcttcatcggcaaacgaggcaacattacagaatgtgcagccaccacgcccgatggtaccgtcacggttagggcagctaaaaccgccgtgtagcgtcagcttatgcaccttttgcccataacgacgggtgagatcaccaccaaacatattgactaatttctgtaactgcataatctgatagaccgcgccttgaaaagaggccaaagcctgccatttttagctcaattcggcgatgacctggatcaatcgtcccggcccgcttttatcaactgcataatcaatcaaaattaccgaaatttcatgcataatcacataaatcacttttgcttatcttgtgtcagatttttttatctccttatggattttaggcaaaaacagtagcatgaaacgtcattaccaattaaggcagtataaaatgctggttttctcgtcagttcaaggcaggataagggttaacacgcctttatgacagtcaggaattgactgtttctctaacgacttcccttttagccttaaagataaaatccattttaatttcagtaatttaataaagaattttgcgctaaagcacatttctgtaccaataagcttgccatttgacctgtatcagctttcccgataagttggaaatccgctggaagctttctggatgagcagcctgctcatcatatttatgcagtaattgagatcccctcttcaccgtattaaccgatgcgaaaaggacaacaagggggcgaatgcgaggcgcgcgtatgacacgcaaaccccgtcgccacgctctttctgtgcccgtgcgcagcggttcggaagtggggttcccgcagagcctgggggaggttcacgatatgttgtacgataaatcccttgagagggataactgtggtttcggcctgatcgcccacatagaaggcgaacctagccacaaggtagtgcgtactgcaatacacgcactggcccgcatgcagcaccgtggcgcgattctcgccgatggtaaaaccggcgacggttgcggcttgctgttacaaaaaccggatcgcttttttcgcatcgttgcgcaggagcgcggctggcgtttagcaaaaaactacgctgtcgggatgctcttcctgaataaagatcctgaactcgccgctgccgcacgccgcatcgttgaagaagagctgcaacgcgaaaccttgtcgattgtgggctggcgtgatgtccccactaacgaaggcgtgctgggtgaaatcgccctctcctctctgccccacattgagcaaattttcgttaacgctccggcaggctggcgtccgcgcgatatggagcgccgtctgtttatcgcccgccgccgcattgaaaagcgtctcgaagccgacaaagacttctacgtctgtagcctgtcgaatctggtgaacatctataaaggtctgtgtatgccggcggatctgccgcgcttttatctggatcttgcggacctgcgtctggaatcggccatctgcctgttccaccagcgcttctccactaacaccgtaccgcgctggccgctggcgcagccgttccgctacctggcgcataacggtgaaatcaacaccatcaccggtaaccgccaatgggcgcgtgcgcgtacctataaattccagacgccgctgatccctgatctgcacgacgccgcaccgttcgtcaacgaaaccggttctgactccagttcgatggataacatgctggaactgctgctggcaggcgggatggatatcatccgcgccatgcgtctattagtaccacccgcctggcagaacaacccggatatggacccggaactgcgtgccttctttgactttaactccatgcatatggagccgtgggatggcccggcgggcatcgtgatgtccgatggtcgcttcgctgcctgtaacctcgaccgtaacggtctgcgtccggcacgctacgtcattaccaaagacaagctcatcacctgcgcctctgaagtcggtatctgggattatcagcctgacgaagtggtcgaaaaaggccgcgtcgggccaggcgaactgatggtgatcgacacccgcagtgggcgtattctgcactcggcagaaaccgatgacgatctgaaaagccgccatccatataaagagtggatggagaaaaacgtccgccgactggtaccgtttgaagatctgcccgatgaagaagtgggtagccgcgaactggacgacgacacgcttgccagctaccagaaacagtttaactacagcgcggaagagctggactccgtaattcgcgtactgggcgaaaacggtcaggaagcggtcggttcgatgggcgatgataccccattcgccgtgctctccagtcagccgcgcattatttacgactacttccgccagcagtttgcccaggtgactaacccgccaatcgacccgctgcgtgaagcgcatgttatgtcgctcgccaccagtatcggtcgtgaaatgaacgtcttttgcgaagcagagggccaggcgcaccgtttaagctttaaatcgccgattctgctctactccgatttcaaacagctcacgacgatgaaagaggagcactaccgcgcagatacgctggatatcacctttgacgtcactaaaaccacgctcgaagcgacagtcaaagagctgtgcgacaaagccgaaaaaatggtacgtagcggcaccgtgctgctggtgctctccgaccggaatatcgctaaagatcgcctgccggttccagccccgatggcggttggcgcgatccagacccgtctggtcgatcaaagcctgcgttgcgatgccaacatcatcgtcgaaaccgccagcgcccgcgatccgcaccacttcgccgtgttgctgggcttcggcgcgacggctatttatccataccttgcctatgaaacgctgggccgcctggtagacacccatgcgattgccaaagattatcgtaccgtgatgctcaactaccgtaacggcatcaacaaaggcttgtacaaaatcatgtccaaaatgggcatctccaccatcgcctcttaccgctgctcgaaactgtttgaagcggtcggtctgcacgatgatgtagtgggcctgtgcttccagggggcggtcagccgcattggtggggcgagctttgaagacttccagcaggatctgctgaatctgtcgaaacgtgcctggctggcgcgcaagcccatcagccagggcggcctgctgaaatacgtccacggcggcgaataccacgcctacaacccggacgtggtgcgcacgctgcaacaggcggtacagagcggcgagtatagcgactatcaggaatacgcgaagctggttaatgagcgtccggcaaccacgctgcgcgatctgctggcaattacgccgggtgaaaacgcggtcaacattgctgatgttgaaccggcaagcgaactgtttaaacgctttgataccgccgcgatgtctatcggcgcgttaagcccggaagcccacgaggcgctggcggaagcgatgaatagcatcggcggtaactcgaactccggtgaaggcggcgaagacccggcgcgctatggcactaacaaagtgtcgcgcatcaagcaggtggcttctggtcgcttcggcgttactccggcgtatctggtcaatgccgacgtcattcagattaaagtcgcccagggcgcgaagccgggcgaaggcggtcagttgccgggcgacaaagtcactccttacatcgccaaactgcgctattcggtgcccggagtgacgctgatctccccgccgccgcaccacgatatctactctatcgaggacttagcgcagctcattttcgacctcaagcaggttaacccgaaagcgatgatctccgtgaagctggtttccgaaccgggcgtaggcaccatcgcgactggcgtggcaaaagcttatgccgatttaatcaccatcgcaggctatgacggtggcaccggcgcaagcccgctgtcgtcagtgaaatacgcaggttgcccgtgggagctggggcttgttgaaacccagcaggcgctggttgccaatggtctgcgtcataagatccgtttgcaggtcgatggcggcctgaaaaccggtgttgatatcatcaaagcggcgattctcggcgcagaaagcttcggcttcggcactggcccgatggtggcgctcggctgtaaatatctacgtatttgccatctgaacaactgcgcaacgggtgtagcaactcaggatgacaaactgcgtaagaaccactatcacggcctgccgttcaaggttaccaattactttgaatttattgcccgtgaaacccgcgagctgatggcacagctgggcgtaacgcgtctggtggatctgattggtcgcaccgacctgctgaaagaactggacggtttcaccgccaaacagcaaaaactggcgctgtcgaagctgctggagaccgccgaaccgcatccaggtaaggcactctactgcaccgaaaacaacccaccgtttgataacggcctgctgaacgcgcagttgctgcaacaggcgaaaccgtttgtcgatgaacgccagagcaaaaccttctggttcgatattcgcaacaccgaccgttctgtcggcgcgtcgctttcaggctatatcgcccagacgcacggcgatcaggggctggcagccgatcctatcaaagcgtacttcaacggcaccgcaggccagagtttcggtgtgtggaacgcgggcggcgtggaactgtacctgaccggggatgccaacgactatgtcggtaaaggcatggcgggcggcttaatcgccattcgtcctccggttggttccgccttccgcagccatgaagcaagtattatcggcaacacctgcctgtatggcgcgaccggtggtcgtctgtatgccgcaggccgcgcgggtgaacgtttcggcgtgcggaactccggtgctatcaccgtggtagaaggcattggcgacaacggctgtgaatatatgacgggcggtattgtctgtattctgggtaaaaccggcgttaacttcggtgcgggcatgaccggcggcttcgcttacgttctcgatgaaagcggtgatttccgcaaacgcgttaacccggaactggtcgaggtcttaagcgttgacgatctggcgatccatgaagagcatctgcgcggtcttatcaccgagcatgttcagcatactggctctcagcgcggtgaagagattctggcgaactggtcaaccttcgccactaaatttgcgctggttaaaccgaagtccagtgatgtaaaagcactgctgggtcatcgtagtcgtagcgcagcagagttgcgcgtgcaggcgcagtaaggggtagcaacaatgagtcagaatgtttatcaatttatcgacctgcagcgcgttgatccgccaaagaagccgctgaagatccgcaaaattgagtttgttgaaatttacgagccgttttccgaaggccaggccaaagcgcaggctgaccgctgcctgtcgtgcggcaacccatactgcgagtggaaatgtccggtacacaactacatcccgaactggctgaagctcgccaacgaggggcgtatttttgaagcggcggaactgtcgcaccagaccaacaccctgccggaagtttgcggacgagtctgcccgcaagaccgtctgtgcgaaggttcctgcactctgaacgatgagtttggcgcggtgaccatcggcaacattgagcgttatatcaatgataaagcgttcgaaatgggctggcgtccggatatgtccggcgtgaagcaaaccggtaaaaaagtggcgattatcggcgcaggcccggcaggtctggcgtgtgcggatgtcctgacgcgtaacggcgtaaaagccgttgtcttcgaccgtcatccagaaattggcgggctgctgaccttcggtattccggccttcaagctggaaaaagaggtaatgacgcgtcgccgtgaaatcttcaccggcatgggtattgaattcaaactcaataccgaagtgggccgcgacgtgcagctggacgatctgctgagtgattacgatgccgtcttccttggcgtcgggacttatcagtcaatgcgcggcgggctggaaaacgaagacgccgatggcgtgtacgcagcgctgccgttccttatcgccaacaccaaacagttaatgggctttggtgaaacccgcgacgaaccgttcgtcagcatggaaggcaaacgcgtggtggtccttggcggtggcgacactgcgatggactgcgtgcgtacgtccgtgcgccagggagcgaagcacgttacctgtgcctatcgtcgtgatgaagagaacatgccgggttcccgccgcgaagtgaaaaacgcgcgggaagaaggcgtagagttcaaattcaacgtccagccactggggattgaagtgaacggtaacggtaaagtcagcggcgtaaaaatggtacgtaccgaaatgggcgaaccggatgccaaaggccgtcgccgcgcggagatcgttgcaggttccgaacatatcgttccggcagatgcagtgatcatggcgtttggtttccgtccacacaacatggaatggctggcaaaacacagcgtcgagctggattcacaaggccgcatcatcgccccggaaggcagcgacaacgccttccagaccagcaacccgaaaatctttgctggcggcgatatcgtccgtggttccgatctggtggtaaccgctattgccgaaggtcgtaaggcggcagacggtattatgaactggctggaagtttaagctctgtcccagcgccgcctcctcagaaaagagtcggcgctgaaattctcctttctttctggaaagcgcctcgcataatctgaagaaaaccaatgtaatacgctcatctggattgttaccggtagatgcccggcgtatagctgattccattattcaacgcagcgccatataaagggacagataatggaatcgctctcagagagaacctcaacaggctaccagcaaatccacgacggtattattcatctggtcgatagcgcccggacggaaacggtacgtagcgttaacgcgctgatgaccgcgacatactgggaaattggccgacgaattgtcgaatttgaacaaggtggcgaggccagggctgcgtatggtgcgcagctaatcaagcgactatcaaaggatttaagtctaaggtataagcgtgggttctctgcaaaaaacttacgccaaatgaggcttttttacctcttttttcaacatgttgaaattcgccagacagtgtctggcgaattaacaccattgggaattccgcagacaccatctgcagaattcccatcggcaaagatttggcagacgctgtctgccaaatctttccccctgccctggtccacctacgtccgtttactttccgttaaaaacgctgacgcccgcagcttttatgaaaaagagacgctccgctgtggctggtctgttcgccagctagaacggcaaattgcgacccaattttatgagcgaacactactgtcacatgacaaatcagccatgctgcaacaacacactcctaccgagacgcatattcttccgcaacaggcgatacgcgatccctttgtgctcgaatttctggaattgaaagatgaatattcagaatctgatttcgaggaggcgctgatcaaccacctgatggatttcatgctggaacttggggatgattttgcctttgttggtcggcagcgaaggttacgcattgatgacaactggtttcgtgtcgatctgctgtttttccaccgccgtttacgctgcctactaatcgtcgatctaaaagtgggcaaattcagctatagcgatgccggacagatgaatatgtatctcaactacgccaaagagcactggacgctaccggatgaaaatccgcccatcggtctggttctctgtgcagagaaaggagccggagaagcacattatgctctggcaggtttgcctaacaccgttctggcaagcgaatataagatgcaactacctgatgagaaacgactcgcagatgaactcgttcgaacacaggcggtgctagaggaaggctatagacgccgttaatttcagcggtttcgaattctgcagacagtgtctgcagaatctttaaaacgaactaagttttaagccattaaatcagccttaaccttcaccacaacctttttaatctctccaggctcgccgacaacgcatcctggtttatgcggttcacctggcataaacacggcgaacattcccggttttaagatgatggcttgctcgttatcaatggtgctgcaaagctgataatcatcctcatggtggaactcttcacactggcgcgcagtgcctgccatgccaaacagaatccgttcctcaccgtttaataacagttggatatcaatgtattgctcgtgcaattccgcttttttctcgacgggcgattgagtgttaaacgtcatgacattcataaagatattgtcgccctgtaattcgtaacgacccggcgctttttcttgcggtctggcagctaatgccagcgttaacgcgtcctgtaacgcaggatgtaacccagcagacggtaatgactgtacttcacccatcatcataatttttctccctgggccaacagcgcagccccaagtaaacctgcatcgtggcggtagtgcgccgccagtaaatcaacatgaaatgccgctggctcctgcgccagatacgtttccaccagcgccagatacccttctgccagcccaacgctgccaccgaccaccacgcactggcaatcagttgtggctttaatatcagcgatcagccttgcaagcgtacgtgcggagcggtgaatcagctgctgcgcctgctcgtcgccctgcccggcgcgtgtgaaaatagttctcgcatccgcgcccgccagttcaccctgcgctgccgccgcaatgccgcgaccagaagcaatcgcctccacgcaacctgtgcgtccacagccacagaccgggccgtgtggatcggcaagcgtatgcccgatatgccccgccagaccgccagggccggtaagcagtttgccgccgctcactacaccgccgccgacgccagtggaaacggtgataaacaccatctcggttacatcgccttccagcgcctgatactccgcccatgctgcagcctgcgcgtcgttaatggcaatggtcggcaaattggtaagttgttccagcgttttgactaacggaaagtgtagcaatccaccgagattatgcggattcagcgccagcaaactgccgtcgcgaataattccggttgaagcgatggcaacccgctgcgcatgagcttgcaacggagagactaatgcggataaggcatcacgcaaggcttctggtgtctggctggctggcgtaggaagttcacgacgatcgcggatctgcccgtcagcgccaatcagcgcggcggcaagtttagtaccgccgatatcaatcgccagcgtggtcatagcaccgcctttttcatcgctgtgttgtaccactgacaaatgtgttcaagacgcgtaatggcagaaccgaccgtcaccgcccacgcgccgtggcgcatcgcatctgccgcctgagcaggcgtgttgtaacgcccttcggcaatcaccctacatccggcgtcgctcaacgttttcaccagcgccagatccggctcttctggcgtttcaggcgtggtatagccagaaagcgtagtgccaataatttcggctcccagcttttggcatgccaggccgtcttccggcgttgagcagtcggtcatcgccagtaaaccgtgatggtgaatacgtgccagcagcgtttcaacaggcaccggacgcgggcggtcggtgccgtcaatggcgataatgtccgcgcccgcctgcgccagcgcatcaacatcttcaatataggccgtgatgcgtaccggagaatcctccagatcgcgtttcacaattccaataatcggcacgctcaccaccgcacgcgtggcttgcagatttgccacaccttcaatgcgaatggcaaccgcgcccgcctgttctgccgctaatgccatggcggcgacgatttcgggtttatcgagcgggctgtccggaaccggctggcaggagacaatcaggccaccgttagcagcgattttttgatccagttgtgcaagtaacgacatacatcttcccttagcgaaaggcccggtacatagaccgggcaacaggattaacttttggttttgactaaatcgtttttggcgctgccaaatggcacggcaccgctaaatggtttgccgtcgatagcgtcatgagtacgcaatgcttccgggcgcagccaacgctgaacgcgggaaggcatatccagaccaatcagcaggatcaccacaaatgtcagactgaacgatagcgatgccagcgcagtacccagatccagacgttgagcgatcaacgcgccgatgattggggccagtgcgccgcccaatgcgccaacgttgtaggtaaagcccaggcccgctgcacgctggtcggtatcgaaataaccgccaatcagtttcggtaagatcccggcgatcccttgtccaagcatttgctggaagaacagtaacagaccgagcacccagacgtttgcgccgccaatcgcaaataccggaataatcaacagctgcgaggccaacaggctacaaacgtaggctttgcgggttcccagccagtcaccgaggaagccgccgacacagcaccccaccgcagccccaaagccgctaaagaacagcacattggcgacagtatgcgggtcataagccagatcggttttcagatacgttggcagcagcgcctgaatcggccatgagtagaggaaagcaaacaacacgaccaccatcagcattacgcccgttggccagcgtttgcccgtactctgcaccataaagctgataaagattgcggcgcataacagcccaagaacagcgacgatcgcggcattttgcaggttaccggcgaagcagaaccacagcgcagtagccgccgccagtgtcattacgatattggcaatgcgatgttcaccacggtagagaatatccaccattgtgcgtaccggtgctttacccccgtgtttctctttccagtcttccgcttccgggatgtttttacgcagccagagagcaaagatgattggcaaaatgccgataaagaacagcgcacgccagccccagaccggaaccaccaggctatagacctgagcggcaacgacggcccccacagagaagcctgaaatcagaaaaccactggctttgttacgcagatgttttggccagctttcaatgacataggtggcgctggaaccgtattcacccgccatccccatgccgatgaccagacgcgcgataaacatggtgatgtagcctggcgcaaagccgcaggccagcgtcccggccgagaagagaacgatgctggtgaccattgccagacgacgcccgtagcggtcacccatagcgccgagcatcaggccgccgaaccagcgagagataaaggctgcggagatcagacttgccgcctgcaccgtcgtcagcccgaattcaccctgtacttcagtgagtaccagggcgattaaaacgaaatcaaaaccgtcaagcagatatcccaaccaggcagcggaaaatgcgcgccattgtgcacggttgagatggcgataccacgggatattctgggttgtagtactcattgtgagtctcccgcggtgggcgatgcccacacgctttggtataaaaattgtagggtacagatgcgtttatttcccctcacccggtaggggcgagcgaggggaaacaactcacccgcgctcttgcatcaactgctgggccagcgccttcagttctggcagatatttttcatctaccggtccaaacggtttgcggcacagcggcacagaaacgacatccatataatggaggacagttttcaggccgcggaatacgcccgttttgatcagtaaatcaatgactttattgcattcagtttgcagtttctgcgcggtctggatatcgccttctttcagcgccttaacgatcccctgatagcgccagcccatgatgttgtaggtactaccgataccaccatcagcgcccgccagcagaccagaggcgaagatttcgtcgtaaccgttatagagcacaagatcaggatgttcacgacggatctgctccatctgatagagatcgccagaggtctgtttcagcgcacctacgccaggcaatgtaacaagtgtgttgatctgatccagggtcagttttaccccactcagggctggaatgttgtacaccaccatcggcaaaccatccgccgaatcaataattgcccgatagtgatcgcagtgttcttcaaagctgaaaggatagtagaacggcgtgacggcggagacggcatcgaagccataacgtttagccgatgccgcaagttgttggctttcggcggtgctgacgcaaccgacgtgggcgatgagtttaatcttacctttcgcctcttcggcgacgatttccagtacctgttcacgctcggaaaggctttgtacaaaggcctcgccggtcgaaccacccacgtataaaccgtcgatgccctgctgaatattgaactgaaccaggcgacgcagactcgctttatccagtgcttgttgttgatcaaaaggagtcaggagtgcagccattacgccacgtaaattcgttgccataaatacctctgaagtgatgcttgtctgataaacgatatacctttatacctgttataccagatcaattaagcaacaccccatacagaaagcttataatgcgatctgcttcactaaagtggcattatttctttttgttggtggtctgaccgaaagcgtgccaggtagcagagacgctgttgagatgcgattgcaacgcacgatcggcttcgtcaggatcatgacggcggatcgcatcaacgatcgcaatatgctgttgataactaacgttgttatgttcgtgcagtgcctgatcggtaaccgttgggcgtgcggcaataagccagtcgagcagggcaacgtggatcgccatgaagattgggttaccggggatctccgccagcacgcggtggaaatcaacgtctgaacgaatgaatgccgcgttgttatccagcgactgactgttaatttccagtgcttttgccagcaaatcgatttgctcatcggtggcatgttcagccgcatagcgcaccaggctggattcaaagaacagacgtaattgttcgaaatgggcaatcccaccaggatgagaaaggaaatctttcgccatgccggaaagctcgccgatgatggtgtccgcagaaggacgtgagacgcgggcacgttcgccgttgttgatttgcaccagacctttgcgttttaacgctgccagcgcttcgcgcacagaaggacgcccgacgttaaagaacgccatcagttcgcgttcagacggtaattgttcaccttcgccaaattcacgacggcggatcatctgttccagctcttcttccaccatttcggagagttttttacgcgccagcgggcggctacgcaagttgcgaccaattgcaggtgaagaatcttcggtttgcgaatcaaatgcgttcataaggcccattctgtaaggtcagtgtgattaacatcatcagtgacatcctatcacaggattgaaagtaggggaaaatggcaggtttttctctttgtgcctcatcattaccataattaacggaataattaactattgcgaaaaattaatgtaacgcagataaaaacatcccgtttgaattatttataagactattcacgagcattatgaatattatgaatgtgttcttacaaaataatcataagcgca

SEQ ID NO: 168 - DNA, 59944 bp, Escherichia coli
  source 1..59944: mol_type = genomic DNA
tacatattcagtgaaaaaatgcgtaataaaaatatacattgcgcctcctgaaaaaataaattttttatgctattacgtatattcgtatctatttcaatggaatgacaacgtgaatattaattaccctgctgaatatgaaattggagatatcgcctttacatgtataggtgctgccttatttggtcaaatatcagctgcatcaaattgttggagtaatcacgtcgggatcattatcggtcataacggtgaagacttcctggttgcagaaagccgggttcccctctcaaccatcactacgctatcccgttttattaaacgctctgctaatcaacgctatgctataaagcgattagacgctgggctgacagaacaacaaaaacaacgaattgttgaacaggttccctcccggctacgcaaactttaccacaccggttttaaatacgaatcttcgcgccagttctgttcaaaatttgtctttgatatttataaagaggcgctatgtattccggtgggtgaaatagagacgtttggagaattgttaaatagcaatccgaatgcaaaactcactttctggaaattctggttcctgggttctattccgtgggagcgtaaaaccgttacgccagccagtttgtggcatcatccgggtttggtgttgattcatgcggagggagtggaaacgcctcagccggaactgaccgaggcggtataacttaacgcagtcgccctctcgccaggttcagccgcgattcgctcatctgcatcgcattctgactaacgtggcagtgggtgatggcaatcgccaacgcatcagcggcatccgcctgtggattagcgggcagtttcagcaaggtgcggaccatatgctgcacctggcttttttcggcgctaccaatacccaccaccgtttgcttcacctgacgtgcagcatattcaaataccggcaactcctgattcaccgccgccacaatcgccacgccgcgcgcctggcccagtttcagggctgagtcagcgttctttgccataaagacttgttcaatggcgaaataatcaggctggaactgggtgatgatttccgtcacgcccgcatagatgagtttcagacgagacggtaaatcatccactttggtgcgtatgcatccgctacccaggtaggacagttgcctacctacctggcggatgacgccgtagccggtcacgcgcgaacccggatcaatgccgagaataatagccatcacgcgtctccgttttgctgtttagcaggcctcatcagagagtcgctgcgacctcatcagagatttcaccgttatggtaaacttcctgcacgtcgtcgcaatcttccagcatatcgatcagacgcatcagtttcggtgcggtttctgcatccatatcagctttggtagacgggatcatggaaacttccgcgctgtctgctttcagacctgccgcttccagagcgtcgcgcactttacccatttcttcccatgcagtgtagacatcaatcgcgccgtcatcataggtcacaacgtcttcagcacctgcttccagtgctgcttccatgatggtgtcttcatcgcctttctcgaaggagatcacgccttttttgctgaacagataagctacggaaccatcagtaccgaggttaccgccacatttgctgaatgcatgacgcacttcagcaacggtacggttgcggttgtcagacagacattcaatcatgattgccgtgccgccaggaccgtaaccttcgtagatgatggtttccatgtttgcatcatcatcaccgcccacaccacgtgcaattgcgcggttcagtgtgtcgcgggtcatgttgttagacagtgctttatcaattgctgcacgcagacgcgggttagcgtccggatcgccaccgcccagcttagccgcggttaccagctcacgaatgattttagtgaagattttaccgcgcttagcatcctgcgcagctttacgatgtctggtgttggcccatttactatgacctgccataaaaatatctccagatagccctgcctgttcaggcagcgttaattacaaactgttcaatcgcctgccggttgctccaggacttagtgagcgccgccgcagcaggcgcatcaagccacttgtaagccagatgttcagtgaaaacgatctgccgctcgtgcggaagcgcaagacagaaccatgattccgtattacgcgtcacgcccggcgcatagcgatgacgtaaatgtgaaaaaatttcaaactctaccgtgcgctgacagtcaattaaggtcagttgttcagcgacaacatcaatggtgacctcttcctttacttcgcgcatggcagcttgcggcgcggtttcaccctcttccacgctgccggttaccgactgccagaaatcgggatcgtcacgccgctgcaacatcagcacccgtttcgtatcttgtgcgtagatgaccactaagatcgaaacgggacgcttatacactttatccttcacgctgcctcttcgttgactgccttcgctcatcccattcacatagttatctatgctcatgggagttcactcagttgccgcctcgatgcaacgcgaatgatttcgtgtatttgagtcatatcagttattctcagccttcttcacaacctgaatgctcagctcagccagtgcagtcgggttagcaaagctcggtgcttcagtcatcagacacgctgccgccgtggttttcgggaaggcgataacgtcacggatattgtcggtgccggtcagcagcatggtcagacggtcaagaccgaatgccagacctgcgtgcggcggagtaccgtatttcagagcgtcgagcaggaagccgaatttctcgcgctgttcctcttcgttgatacccagaataccaaacaccgtctgctgcatatcaccattatggatacgtactgaaccaccgcccacttcgtaaccattgatgaccatatcgtaagcgttcgccaccgcattttccggtgcagctttcagttctgcagccgtcatatctttcggtgaggtgaacggatggtgcattgccgtcaggccgccttcaccgtcgtcttcaaacatcgggaagtcgataacccacagcggtgcccatttgctttcgtcggtcagaccaaggtctttacccactttcaggcgcagtgcacccatcgcgtcggcaacaattttcttgttgtcggcaccgaagaaaatcatatcgccatcttgcgcggcagtacgatccaggatgtcttcgatgatttctgcattaaggaacttcgctaccgggctgttgataccttccagacctttcgcgcgttcgttaactttgatgtaagccagacctttcgcgccgtagattttaacgaagttaccgtattcgtcgatctgcttacgggtcagcgatgcgccgcccggaacgcgcagagccgctacgcgacctttcggatcgttcgccggacctgcaaatacagcaaactcaacagatttcagcagatcagcaacgtcagtcagttccatcgggttacgcagatccggtttatcagaaccataacggcgttctgcttccgcaaaggtcattaccgggaaatcgcccagatccacacccttcacttccagccacagatgacgcaccagcgcttccatcacttcacgcacttgcggcgcggtcatgaaagaagtttccacatcgatctgagtaaattcaggctgacggtcagcacgcaggtcttcgtcacggaagcatttaacgatctgatagtaacggtcaaaaccggacatcatcagcagctgtttgaacaactgcggggattgcggcagtgcgtagaatttacctttgtgcacacgagaaggcaccaggtagtcacgcgcgccttccggcgtggctttggtcagcatcggagtttcgatgtcgaggaagccgtggtcatccataaaacggcgcaccaggctggtgattttagcgcgggttttcaggcgctgagccatttccggacgacgcaggtcgaggtagcggtatttcagacgcgcttcttcggtgttgacgtggttagagtcaagcggcagaacatctgcgcggttgatgatagtcagcgaggacgccagcacttcgatttcgccggtcgccatatcgcggttaatatttttttcgtcacgcgcacgtacggtgcccgtgacctgaatgcagaactcattacgcagttcagaggccagctttaacgcgtccgcacgatccggatcgaaaaatacctgcacgataccttcgcggtcgcgcatatcgatgaagatcaggctaccaagatcacgacgacggttgacccaaccacacagagtcacctgctgccccacgtgggacaaacggagctgtccacaatattctgtacgcatgagatatcccttaacttagctgccggcggatgccccctgctgcgcaggtgaccaagtcgcagcgttagctgtatgtcacaactgaatgaaaaaaggcggctattatactggaaattctgccgcaccgtaagagcctggcccgcgctggaacgcctcgttaccactttatatcgggcctgaaatcagactctacgccagtttgctataaaggtgttgcccgaactcataaaaattaacaaaatttgtcgttccgccatcggctaatcgcattaaggtgtgaggcacgattttgttttttcaggagtcattatgcttgaacttaatgctaaaaccactgcgctggtggtgatcgatttacaagaaggcatcttaccttttgccggtggtccacatactgccgatgaggtagttaatcgcgccgggaagctggcggcgaaatttcgcgccagcggtcagcccgtgtttctggtgcgcgttggctggtctgccgattacgctgaagcattaaaacagccggtcgatgcgccctcaccggctaaagtgttgcccgaaaattggtggcaacatcctgctgcattaggtgcaaccgacagcgatatcgaaatcatcaaacgtcaatggggtgcgttttacggtacggatctggagttgcaattacgccgccgaggtatcgatacaatagtgttatgtgggatctcgaccaatatcggtgttgaatccaccgcccgcaatgcctgggaacttggctttaatctggtgattgccgaagacgcctgtagtgccgccagcgccgagcagcacaataacagtatcaaccatatctacccgcgcatcgcccgtgtgcgtagcgtggaagagatcctcaacgcgttatgatttacatcggtctaccgcaatggtcgcatcctaaatgggtgcggttggggatcaccagccttgaagagtatgcccgccactttaactgcgtggagggcaacaccacgctttacgccctgccgaaacccgaggttgtcctgcgctggcgtgagcagaccacagatgacttccgcttctgttttaagtttccggcgaccatttcgcatcaggcagcattacggcattgcgatgatttagtgactgaatttttgacccgcatgtcaccgttggctccgcgcattgggcaatactggctgcaactgcctgccacattcggcccacgggagctgcctgcgctttggcattttctcgattctcttcctggcgaatttaattatggcgtggaagtccgccatccacagtttttcgccaaaggagaagaggaacaaacgcttaatcgcggtttacatcagcgcggcgttaatcgggtgattttagacagccgcccggttcatgcagcacgtccacacagtgaagctattcgcgacgctcaacgaaaaaaacctaaagttccggtacatgctgtactgacggcgacaaatccgctgatccgttttatcggtagtgatgatatgacgcaaaaccgggaattatttcaggtctggttacaaaaattagcgcagtggcatcagaccactacgccttatctttttttacatacgccagacattgcccaggcaccggaactggtacataccctgtgggaagacttacgtaaaacgcttccagagatcggagcagttccggctattccacagcaatcttctcttttctgaatttgccacctatcatagacaggtgccatcggccattttaaagggagtttgtatggtaagcgcgctgtatgccgttttaagtgcgttgttattaatgaagttctcttttgatgtcgttcgcctgcgaatgcagtaccgcgttgcctatggcgacggcggttttagcgaactgcaaagcgctattcgcattcatggtaacgcggtggaatatattcccatcgcgattgtgctgatgctgtttatggaaatgaatggcgcagaaacctggatggtgcatatttgcggcatcgttttgcttgctggtcgtctgatgcattattacggttttcatcaccgtctgttccgctggcgacgttccggcatgagcgccacctggtgtgcgctgttgctgatggtgctggcgaatctttggtatatgccctgggagttggttttctccctgcgttagcgcacaatacgccactttctttttcccggatttttacgttatgtctcaccgcgacacgctattttctgcccctatcgccagactgggcgactggacctttgatgaacgggtagctgaagtcttcccggatatgatccagcgttccgtacccggctattccaatattatttccatgattggtatgttagccgagcgcttcgttcaacctggtacgcaggtttacgatctgggttgttctctgggcgcggcgacgctctcggtgcgtcgcaacattcatcatgataattgcaaaattattgccatcgacaactccccggcgatgattgaacgctgccgtcgtcatattgacgcctataaagcccctacgccagtagacgtcattgaaggtgatattcgcgatatcgccattgaaaacgcatcgatggtggtgctgaattttaccctgcaattcctggaaccttccgagcgccaggcattactggataaaatttatcaaggactgaacccgggcggcgcgctggtgctttcggaaaaattcagtttcgaagatgccaaagttggtgaactgttgttcaacatgcaccacgactttaaacgtgccaacggttacagcgaactggagatcagccagaagcgcagcatgctggaaaacgtgatgctgaccgattccgtggaaacccataaagcacgcctgcataaagccggttttgagcatagtgagctgtggttccagtgctttaactttggttcactggtggcattaaaagcagaggacgctgcatgatcgactttggtaacttttattctctgattgccaaaaatcatctttcacactggctcgaaacgctgcccgcgcagattgctaactggcagcgcgagcagcagcacgggttgtttaagcagtggtcaaatgcggtggagtttctacctgaaattaaaccgtatcgtcttgatttattgcatagcgttacggcagaaagcgaagagccactgagcgcagggcaaattaaacgcattgaaacgctgatgcgcaacctgatgccgtggcgcaaagggccgttctcactgtatggcgtcaacatcgataccgaatggcgttccgactggaaatgggatcgtgttctgccccatctttctgatttaaccggacgcaccattctggatgtcggctgcggcagcggttatcacatgtggcgcatgattggcgcaggcgcgcacctcgcggtggggatcgaccctacgcaactttttctgtgccagtttgaagcggtgcgtaaactactgggtaatgatcagcgcgcgcatttgttaccgttaggtattgaacaacttccggcactgaaagcctttgataccgtcttttcgatgggcgtgctttaccatcgccgttcaccgctggagcatctctggcagttgaaagatcaactggtcaatgaaggtgaactggtgctggaaacgctggttattgatggtgatgagaacacggtgctggtaccaggcgatcgttacgcgcaaatgcgtaatgtctatttcatcccttccgcgctggcgctgaaaaactggctgaagaagtgtggttttgtagatatccgcattgcagatgtgagcgttaccactacagaagagcaacgacgcaccgaatggatggttactgaatcgctggccgatttcctcgacccacatgatccgagtaagacagttgaaggttatccggcacctaaacgtgcggtgctgattgcgcgcaagccgtaaaggtctggtattactgccggatgcggcgtgaacgccttatccggcctacaaaaccttgctaattcaatatattgcagggactatgtagacctgataagcatagcgcatcaggcagctttacgtttgcataacctcagcgcccgtttccgggcgctattcacttcttatgcctgaatagctggctgatcaaacgccgttaacttcggcgcattgcccgtatatttttcgatatacaccagcgcagagttaccggcacaggcatttgccagctgcgagctggggatatccgccgttaacacgttcgcactgccgtttttacacaagccattttccagatctggccatgcaccttcatgcacgcataccacgccttttttgatcccgtcagtcaccaccgcgcctgtcagaatctgaccacgtttgttccacacacgcaccagatcaccattcgcaataccaaagcgagcagcatcttcggtgtgaatagtgattggttcacgatctgcaaccgcatattttttacgcagttccgcatagttaagctgactatgtaaacggtgtgccggatgtgcggtcagaagctgcaactgcttctcgtcggcggtacccttccactcatcaggcgcaagccaggttgggtgtgccgggcaatccttatagccaaatttttccagcgttttggagtaaatctcaattttgccgcttggcgtacccagcgcatttttcaccggatcggcgcggaaatcaccataacgaacgtactgttcgttcttctcgctgcggcgcatttcgatcagtttattttgctgccagaaggcattaaacatcggcatagtcacgcgttgcgcacgggcacctttctgagcggcatcatagaaaaatttcagccacgccatttcatctttaccttcggtatagatctcttttccgccaggtttcagtaattccgcaagatcggcaaacacatcaaaatcgtttcgcgcttcaaattgcggagcgacagcctgcttcatcggcacaatatgctggttactgtaatcaccggtcatcgtcaagtcattgcgctcaaacgatgtggtgatcggtaatacgatatctgcatgtttagcagctgcggtccagtagcattcagaaacgacgatcatctccggtttctgccatgctttaatcagacgattagtatcctggtgatgggtaaagttaccgccacccgcccaccagatcattttgatattcggatacgtttgctctttaccgttatgctgatatttgccgccaggattttccagcgcatcgacgatacgggcaacaggaatcgccgtcattccgccatcatcagcggcctcgctggcctgtccggcaatcgccgcagacatttccggcagcacgccgccaacacgtgtcgggttgccaccattggagtaatgataagagaaaccaaaaccgccgcccggtgtaccaatctgccctaacatcgccgccagcgtcaccagcatccagtgtttctgttcaccatattgctggcgctgaattccccagcctgccatcagcattgtgcgattcgccgccatcagttcagcgagtttgactatctgcgcttccggtacgccagtaatttccgccgcccaggccgcgctcttcggagtattatcgctcttacctgtcagatattcttcaaactgcggatacccggtggtgtatttttcaaggaacactttatcgtgtttgccttgtgtcatcagggtatgcgcaatccctaacatcagtgccacgtcggtgcccatattcggcgcgatccaggtggcattatcgccaaagaactcaatggtttcggagcggataggatcaatggcaatcactggtttgccagattttttcagctgatggaagtattccagcccttgctcatcggtactgctccaggcaatttttaaggtattcagcgggttcatcccccacagcaccacaacctggctgttttccagaatcagcggccaggaggtctgctgttcatacacctctacagaaccgaccacatgcggcatgatcacctgtgctgccccggttgaataatcgccgctatgcccggaataaccgcccgcgaggttcatataacgttgcagtaaggtttgcgctttatgcaacacgccagaagagcgccagccgtaagatccggcaaaaatggccgatggtccgttagctttacgaatacgatcgtgttgctcatgaatcagttttaatgcttgttcccagctcacctgtacataggtatcttcgcctcgacctttcgccggttgcagtggattatcgagatagctttttctcaccatcggatgctgaatacgcgccgtggtgtgtacctgatccgccgccgtagactgtaaggagttcggtatggttttcgccagcgcgcctgtcgaagaaacaatcttgccgtccttcacttctacgttcatcgctccccagcgtcccgcggtgaggattttaccgcccttctcttctgcccatgcgggtagcggtgctgccgatgtcaccaccagcgctccagcggcaataccgctgtgtttaataaattcacgtcttgttaatgtcataacttcctccctgatcaacgaggatcactgtttctcggtaatatctttggcgttgtactggaaataccgcgttaaaatgtccagttcgttttcgctcatgctggttcgtgcccccattcctttggcaatggacggccacgcattgacggtgtaatggtcggcggcaataggggcatgacaaccagcgcaataggtatcgtcaagtttttcagcgtattgccatagcggtttacggtccgctaatgcgggatcggtaagcgcaccctgtaaagacgcctgacgccattgattgccgtattcgtcagcctgccattccccgtttaccgtgagcgccttgataccttcttcacttaatgtggctagcgccagccgttgacctgccgccaggtagagcgtgttttcactgccctgcatttgataaccctgcaacagaacgatcggctgtttgccactggcatcaacgacggtgagatcggtaccaggattcacggtagccagctcgcctatgcgagaagttttgaaaggataaatatgtgcgccattagtcactgaagtagcggtctgactttccagctcatgcgccgcgttgtcatccatttttatttctggcggaaaatgggcaatgcctttatgacaatcgatacaggtttcgccgcccttttgtgctttgttatgcattttctgcgcagattcactttgcgaggcaatatccatggcatcaaaagaatggcaactacggcacgttgcagagtcagttgcttttaattctttccatactgtttcggccatttcctggcgatgagtttcgaacatatcgtcactgtctattttgccgctaacaaattcatgataaatatctttagatgcttttaatttagcaaataaataatccatccctgactttggaatatggcaatcggcacattccgcacgtatccctttctggttcgaaaagtggacagttccctgatattcctcaaaaggtttactcatcgagtggcaggaaaggcaaaatgctgtatccgacgttttatgtaaggctttttgcgccagcaataacccgccgccaccaaccacaaccgctatcagcaaaaacaataacccaatgcgttttttccctcgcatagattcctctaaataaattccagaacaccgaaatcattgtataattaaatacacaacgaattaaccgcttgcataactcggcacaacactgcctgaaataatcgataaagaatatgatttattacaatgtaatcattaattgctaaggaataacccagttgctatttagaatatatatttatcagttttagcaatttaaatcccataatcaatgtgaatataaaaaatatttttagcacaacgctatgcgcactgtcacccgctcaacagatcacggttatcgttcgttttttatactgctcagggataaaaaaaggcccctgttgaaattgcaggggcctggtacgagcaagcatcatattgggcgacatgatgcaacggtaaaaatcatttggcctgatggcgttcaatgattcctttcatttcagcaaccgccgccccgtctacgacataacgcgaatactcgtccgcgtgtgcatctgatgacatagacaatccttgattacgataacgcatcggtgaggcttgccacgctcccgcggagctatggacttccagcactccggcatcgaggaagtggtgcaggttttctgcacggactcctgctccggccataatgattggagcatcacgatgggcaataagttccataatttttgataaaccttgcagtgcgtctgatttttgccctgatgtcagcacccgggcaatgcccaattccgcaagattattgagtgtatttagagggttagcgcacatatcaaaggcgcgatgaaaagtcactgccagcggaccggcagcagccattattttttccattcgtggcatatcgacattcccgtcaacatcgagaacgcccgtcaccagtccaggaaaacctaattcgcggaccgtgcgcacatcctcaagaatggcggcaaactcaccgtcgctgtagcaaaaatcaccaccgcgtgggcgaattatcggatgcacagggatcgtcacccgctggcgcacggatttcagtacacccaacgacggcgttaagcccccctcttttggggctgcgcataattcaactctgtctgcgccgttttgctgcgccgttagtgcacattccatgctgtaacagcaaatttccagtaatgccatttttactccttaattacgccgactgctcgctggcaacgatctcttcaatggaccacggatgaaacttaatagttgttttgccatcggtgaccgccagcgtcggattcggtaatcgctcatgctcaccttttggcgaactggttttcactgagatccccggtaggctgagtccttcatcagaaagcaatgccagcgcacgggcattcagcgtttctggatcacccggcagaacgatttcaatatgttcccaaccttcgtgtgggtaacgtttttccccgggccacggtagctccacaatagaaaactgccagtgcgcaacctgtaccggttcatgcaatttaaacagacaaatcggtctgccattgatcatattttctgacaaaagctcgccacactgttcaaacccgcgacgccagcgttcagcagtggcgttttgatggcaacgcaaagaaatgtgatcggcagtcagcggagtgatattcaaccccagacggcgggaaagttcatctaatgcgtgggtaaatcgcggtaaatccgatgcaatatcctgcagctcgtcgatagattgccagttcgccataatcactcttcgtctttcagtaaaagcgttaatttaccctgttgccctgtgccaaccaaccgctgatttcacgccgcttctgatgcaatagtgaaaacggcaatacgccacgcgcacgttgctgacgaaaacagccatttgcagtatactcccgccctaatttctttaactggtgcgggcaatttttgctcgcttcatcaatgtaaggtattccggtgaatattcaggctcttctctcagaaaaagtccgtcaggccatgattgcggcaggcgcgcctgcggattgcgaaccgcaggttcgtcagtcagcaaaagttcagttcggcgactatcaggctaacggcatgatggcagttgctaaaaaactgggtatggcaccgcgacaattagcagagcaggtgctgactcatctggatcttaacggtatcgccagcaaagttgagatcgccggtccaggctttatcaacattttccttgatccggcattcctggctgaacatgttcagcaggcgctggcgtccgatcgtctcggtgttgctacgccagaaaaacagaccattgtggttgactactctgcgccaaacgtggcgaaagagatgcacgtcggtcacctgcgctctaccattattggtgacgcagcagtgcgtactctggagttcctcggtcacaaagtgattcgcgcaaaccacgtcggcgactggggcactcagttcggtatgctgattgcatggctggaaaagcagcagcaggaaaacgccggtgaaatggagctggctgaccttgaaggtttctaccgcgatgcgaaaaagcattacgacgaagatgaagagtttgccgagcgtgcacgtaactacgtggtaaaactgcaaagcggtgacgaatatttccgcgagatgtggcgcaaactggtcgacatcaccatgacgcagaaccagatcacttacgatcgtctcaacgtgacgctgacccgtgatgacgtgatgggcgaaagcctctacaacccaatgctgccaggaattgtggcggatctcaaagccaaaggtctggcagtagaaagcgaaggggcgaccgttgtattccttgatgagtttaaaaacaaggaaggcgaaccgatgggcgtgatcattcagaagaaagatggcggctatctctacaccaccactgatatcgcctgtgcgaaatatcgttatgaaacactgcatgccgatcgcgtgctgtattacatcgactcccgtcagcatcaacacctgatgcaggcatgggcgatcgtccgtaaagcaggctatgtaccggaatccgtaccgctggaacaccacatgttcggcatgatgctgggtaaagacggcaaaccgttcaaaacccgcgcgggtggtacagtgaaactggccgatctgctggatgaagccctggaacgtgcacgccgtctggtggcagaaaagaacccggatatgccagccgacgagctggaaaaactggctaacgcggttggtattggtgcggtgaaatatgcggatctctccaaaaaccgcaccacggactacatcttcgactgggacaacatgctggcgtttgagggtaataccgcgccatacatgcagtatgcatacacgcgtgtattgtccgtgttccgtaaagcagaaattgacgaagagcaactggctgcagctccggtaatcatccgtgaagatcgtgaagcgcaactggcagctcgcctgctgcagtttgaagaaaccctcaccgtggttgcccgtgaaggtacgccgcatgtgatgtgtgcttacctgtacgatctggccggtctgttctctggcttctacgagcactgcccgatcctcagcgcagaaaacgaagaagtgcgtaacagccgtctgaaactggcacaactgacggcgaagacgctgaagctgggtctggatacgctgggtattgagactgtagagcgtatgtaatcgatttttcgtgagagtgaagcctgatcagggttacctgatcaggcttttttattgccatctaaatgtattctgaaaatggacatgccatcgttttctcactgttgggtaagaagtcagaagcgtaatattcggccccagggaaacgataacggttgaatttaaggaataccgcagtgtttaaatttcttgtattaacattaggcattatctcttgccaggtttacgcagaagatacgcttatagtaaacgaccatgacatttcagccatcaaagattgttggcaaaaaaattcagatgatgatactgacgttaacgtgatcaaatcatgcctgcgacaagaatacaatctcgtcgatgcgcaattaaataaagcctatggtgaagcttatcgttatatagaacaagtgccacgcacaggtgtaaaaaaacctgataccgaacaacttaacttgcttaaaaaatcacagcgagcctggctggattttagggacaaagaatgtgaattaatcctttcaaatgaggacgttcaggatttaagtgacccttattctgaatcagaatggctctcatgtatgatcatacagaccaatacgcgaactcgccagttgcagctataccgtaactctgaagatttttatccaagccctttgacaagaggataattcacatatttttggcatgttttgttgcaagctattcctgataaataattgcaacaaaacatcgagcctttttcactgagttattaaacatactcgcgagcgcgtaatttttttgtccttcagcgataattcacaatcacttcattacgttgtactttcagcggcggaattaaccgcccaccgccaggcacttcccagataaagcgcaacggttctgctgccgctataccggaaaaggccacggtggttccgctctgcccctctaattcgacacaacgagattgcgaacacaagcgaacccgcagtcctgaaggtgtcgggccgataagctgataacgccacgctaccagcgtcatcaatcctgaagcaggttgtcgcgtagaaagaggcgcagacgacatcgactcaccgcgatgatttagcgtaattcctacactacttgcctgccacatcccctccccggcggcttgcaccagcagcggaaacaataatattgctaataaggttctcattatttgccgccaattgtcgccgtcatgcggatatgtcggttatcagacagttccagattcgacaggaccactaactgcggcaagctgcggcgcaggaagcgagacaataatggtcgcagcgcgtggttcaccaacaatactggcggcgcacccagcatctcctgacgggatagcgcttcctgagtttgcgccagtaaacgatccgccagccctggctccagtcctcccccgccctgcagcgcctgtagtaacaaacgttccagcggtgtatcgaggccaataacatggacttcatctttgccaggaaaccactgctgggtaatcgcccgtcccaacgccacgcgcacgacggcggttaattcatgtggatcgctttggatgggcgcatgttccgccagcgtttcgagaatggtgcgcatatcgcgaatcggtactttttcatcgaggagattttgcagcactttatgcagtgtggtgagcgtgacgacgccaggaacgagatcttccgtcagctttggcatctcctgggcgacgcgatccaacagctgttgcgcctcctgacgaccaaacagctctgcggcatgctggctaatgaggtggttaagatgcgttgctaccaccgtgctggcctcaaccactgtgtacccctgaatctgcgcctgttcttttagcgcactttcaatccagatagcattcaggccaaatgccggatcgacggtcgcctcaccaggtaacgtcccggcagcgattccagggttaatcgccagccagcgccccggataagcatcaccactgccaatctccacgcctttcatcaaaatgcgatagcgggcaggttgcagatccatattgtcgcgaatgtgcaccactggcggcagaaatcccatctcctgggcaaatttcttgcggatactgcgtatacggcccaacaactcaccatcctgctggaaatcgaccatcgggatcagtcgataacccacttccattcccagagaatcttccagttgtacatcgttccacgtcgcttcgacaacggtattattctctgccatttttaccggtttgggttcggcaggcgctttttgttcgcgtccgcgtatccaccaggccagcccgagcaatccggcagtgaacagcaaaaataccaggttcggcattccaggcaccaggccgagtaaaccgagcacggcggcgcttaacaacataacgcttgggttactgaaaagctgattcaccatctgctcgccaacatcctgatcggtgctgacacgcgtaacgatgacccccgcggcggtagaaatcaccagcgccggaatttgtgccaccagaccgtcgccaatggtcaatagcgtataactttccgccgcgtgtcccatgctcatgccatgttgcagcacgccgaccagcaacccgccgacaacgttaatgaccatgatgaggatcccggcgatggcatcgccgcgaacaaacttacttgccccgtccattgagccgtaaaaatcggcttcctgagtcacttcggagcggcgttttttcgcctcatcttcaccaatcaatccggcgttaaggtcggcgtcaatcgccatctgcttacccggcataccatcgagaacaaagcgcgcacccacttctgcgatacgcccggcacctttggtaatgaccataaagttgatgatcacgagaatgacaaacaccacgataccgatagcgaaattgccaccaacgaggaagtgaccgaacgcttcgaccaccttccctgccgccgccgcgccggtatgcccttccattaaaatgatacgggttgaagccacgttaagtgccagacgcaacagcgtggtaaacaacagaatggtcggaaacgcagcaaactcaagcgtgcgctgggtaaacatcgccaccagcaacaccatgatcgacaaggcaatattgaaggtaaacaacaggtcgagtatgaatgcgggcagtggcagcaccatcatcgacaagatcaacaggatcaaaatcggtccggcaaggatctgccattgtgtcgatttcaggtttgcgggcaggcgcagcatcgcggccagattactcatgggtcggtttctcgttaataaaatccagggcttccggcaccggaagatgagtaggttgtacagggcgctgtccaccagccagacgccagcgtttcagttgccagacccaggccagcacttccgccaccgcggcgtacagttgacccgggatttgttgaccaatctccgcatgtcgatacagcgctcgcgccagcggcggcgcttcaagcgtcgggacgttattttcagcgccaatttcacgaatgcgcagcgcgaccagccctgcacctttagcgaccactttcggtgcgctcattttgttttcgtcatactgcaacgctaccgaatagtgggtcgggttattgacaatgacatccgctttcggcacatcggccatcatccgacgccgtgcggcagctcgctgcatctgacggatccgtcctttaacatgggggtcgccttcgctttgtttgaactcatcacgaatatcctgccgcgacattcgcagctttttcaggtggctgaagatttggaaaaagacgtcaaatcccaccattggaatgacaccaagcaccaccagcagtgcgcatagccctaccaaatccatcgcattacccatggcggtaatcggagactcggccattatgcgcatcatctgcggccagtgatgccagagaaaaaaccccgtcacgctgccaaccaggatggttttcaaaattgctttaagcaactccgcgccagtctgagccgagaacatccgtttaatgcccggtagcgggttgagtttggaaaacttcggctgcaaggatttgccgctaaataccagccctcccagcatgaccggagaaatgagcgccaccagtaccacgccgctaatcagtggcagcagcgccagcatggcttctctgatcagcagaataatctgcccgaggatcagattcgggtctttgataatactgtgatcaaaatgcagcccagcggagagcatgcccgacaatcgacgggccagcgacacaccgccaaaccagataacactaacgcccaccagcaaaatcagcagtgaggtcagttcacgggaacgcgggatttgcccctcttcccgcgctttttctagtcggtgaggtgtgggggcttctgttttgtcgtcgctctcgtcagacacgtcgccaatcctggaaagagtattaagcgtgaatgatgccagagcgcaaagcgttcaatggtttgagtaaggggcaaaacaggcgggatttagggcttttgctgccacacatcaagcatagtgtgcgtttgtcggatgcggcgtcatcgccttatcagaccgcctgatatgacgtggtcacgccacatcaggcaatacaaatcaaaatccaagactatccaacaaatcgtccacctgatcctgactggctaccacaccggctttgctggtatcgacctgaggtccattaagcaaactctggttttcacgttttggacgcgactcctgttccgggatgttttccaacagcaccatcagcaactggcgttcgatctcctgaatgacatccatcatccgcttaatgacctgcccggtgagatcctgaaaatcctgcgccatcatgatttccagcagttgcgcgttagtaaagctggtatgcgcgggtacatctgccagaaattgtcgtgtatctgttaccagttcacgggcgtcggcaaggtcaatcggatcggcaaaccagtcatcccaacgttgggttaacgcttttgctgatttctccatttgatcctgatgcggttgtgacgcctcaacactgttcagcgcccgctccgcagcctgggcggtcatctgcacaacatagtacaaacgatcgcgcgcatcggggatggcttccgccgcttcggcaatggcctgatccagccccagttcccgcaaactgtcgcgcagcatacgcgtcaggctgccgatgcgcgcaatgatatcgccagctgaatgctcgtcagcaggtttgattgatggttgcatcatagtcgcatcctcacatgcccagtttctcaaagattttgttgagtttttcctccagcgtcgcggcggtaaatggcttcaccacatagccactggcccccgcttgcgccgcagcaatgatgttctctttcttcgcttctgcagtcaccattaacactggcaatgccgacatcgcgccatccgcacgaattgttttcagcaattccaggccatccatattgggcatgttccagtcggagataacaaatccataaccgcctgcctgcaacttattgagagcgtcgacgccatcttccgcttcctcaacattattgaatcccagctctttcagcaggttacgcactatgcgtcgcatggtggaaaagtcatccacaaccaaaaatttaagttctttatccgccatttcacactcctgatttaaatacgtatcgcctgtccggcactaatttttgccaacatttgctggcttacctggctaagatcgaccacttcgcagacaccacccatattgatggcctcgcgcggcatgccgaacaccacgcaacttgcttcgttttgcgcaagggtccatgcccccgcctgacgcatcgccaacattcctgccgcgccgtcgttgcccataccggtcaggatcaccccaaccgcattacgccccgcctgtttggcgacagaatggaacaacacatctaccgaaggccgatgacggttaaccgccgggccatcatgaattttgatttggtaatttgcgccactacgcgccagctccatatgccgatcgcccggcgcgatataggcatgccccggcaaaacacgttctnnnnnnnnnnttcggcttctttaaccccgatctgacaaagcttattaagtctgtcggcaaaagagcgggtgaaaccaggcggcatatgctgggtaattaacagtgccgggctggaaagcggcaacggttgcagtacgtgacgaattgcctcagttccacccgttgaagcaccaatcgcaatcagtttttcagaactcaacaacggccctgccttcagcgttgtcggtgccgacaatggcttatgtgctgcaaggctcgcctttgctgctgtacgcaccttttcagcaatcatttcgctatacgccagcattccttcgcgaatacccagttgcggtttggtgacaaaatctatcgcccccagctccagcgcgcgcagcgtgacttctgaccctttgccggtcagggaagaaaccatcactacgggcattggacgcaaacgcattaatttttcgaggaaatccagtccgtccatccgcggcatttcaacatccagcgtcagcacatcgggattgaatttcttaatcaagtcacgcgcgaccagcggatcaggcgcggtcgccaccatttccatgtcgctatggctgttgatgatttctgtcatgatctggcgcatcagtgccgaatcatcgacagataacaccctgattttgctcatcgttaatccttacttagcgcatacaccgtctgaccacgcagcgtgaagcggcgctcaaggtggctaaagttttcagagtgacccgcaaacagcaatccgtcgggtttaaggagcggaacaaagcggcgcaaaatctcctgctgggtattttgatcgaagtagatcatgacgttacgacagaagatcgcatcaaacggccccggcacggtgtactgtttcgccagtagattcagcggggcaaaatcaacatagttcgccagctcctgacgcacgcgtaccagcccttcatgcggtcccgtccctcgcatgaaataccgttgcagttgctgcggcgtcaggtttttcaactcttcatggcgataaataccgcttctggctttttccagcacttcggtgtcgatatcactggcaaacactttccagcgtccgggcgcggtgcccaatgtgtcagccagcgtcatcgcaatgctgtacggctcttcgccggtcgaagccgccgcgctccatacgcgatactcgccagaacggcgacgtgcgtgatccgcgagcagagagaaatggtgtgcctcacggaaaaatgccgtcagattcgtggtcagcgaattgataaacgcctgccactcaccgctgtgctgattagattccagcaagttcagataatgaccgaaatccgtcagtcccagcgaacgcaaacgacgaaccagtcggttgtaaaccatgtcgcgtttatggtcagccagaacgatcccggctcgttgatagatcaattgacttatccgccgaaaatgcgcgtcggaaagcgccaggcgctcggtcatctgtaacaataaagacgtttgcccacagggcagagatgaagtcatagcgccttctcaatcacttcaggataccactggcgcaatttgtaactgcaccgactcatgtcgtgctacttcatgttcttcaagggtaaataccgccacacgcgacgaaagatggtcggcctgattcgccagttgttccgttgccaccgccgcttcttctaccagcgaggcgttctgctgagtcacctgatccatctggctgacagcctgtgcaacctgctcaatcccccgctgttgttcttccgacgcagaggcaatttctcccataatgtcgttcacgcgggtcaccgaactgacaatatcgatcatggtcgcggcggcgttattcaccagtttcgaaccctgctggacacgattgactgactcttcgatcagccctttgatctcttttgctgcctgcgcgctacggctggcaagattgcgcacttcacctgccactaccgcaaaaccacgcccctgctctccggcgcgagccgcttccactgccgcattcagggccagaatattggtctggaaagcaattccgtcgataacgctgataatgtcgccaattttttgcgagctggtggcgatctcctgcatggtgtgagtcatggtactgacctgaacaccgcccgcctgcgccgttgtcgcggcattttttgccagttccgacgcctgtcgtgcgttatcggcgttttgccctaccgtggcggttaattgctccatactggcggccgtttgtgccagcgatgccgcctgctgttcggtacgacttgagagatcgttattgcctgcgacaatctccgcgataccaatgtgcatctcctggcttcccttacgcacatcacttaccgtcccacgcaaagcctgctgcatggtcttcagactggcaaaaatggcggtgatctcattacgaccatataccgcaatcggacgcgccagattacccgcagcaatgctgtcaaaatggctaccgataatggccagtggttgaacaatcatcttgcgcgtccaccacagcgcactgctgatgtagatcgccgcaacaataatcatgctgataaacaccagtgccgaaatctgatagttacgctggctttgcgcactggcggcttccagcacatggttgatctccagctgccaggcctcaaagttaacgtcaaacgcattctgtgatccctgcaccggcgcagtgaggaaatccgaaagttgattactttcaagccaggtcgcctgatgttcgagatcgttgtgccagcgggcaaaacttttctccgtctctttttgcaatgccctgacgtgctcgttgcccgcagtcatcgccataaaacttttaaacagcgtggtggattgcgtcagactggcgcgcgccgtcgtcatcaacgttttaatgtcatccgccggatagctaagtgccgtcagagtgcccgctttgttcagcgcggtactggcctgtaacattaccgcccgagtttgcgctaatgccgcacgttgctgattgctctgctcgacctgattcagtcgttgcaaatcgtcgcgaaatgcccaaaaagacatgccgttactgccaatctgcaagatcccgcagagaatcaaaattaaaaacagcgtggtcgaaattcgaatacgattaaacatcaacgctccccatcaggcggcaatgaccgcgttagtaaatactcgtcaaaatgtttcccagtttggatcttgttcagcaattcgcagtcgtggctgagccggtggttgctcactggcaggacgggatggtgtttgcggtttattggtgagtgggctggctgccnnnnnnnnnntggctgccagacggaacgcggaaaccgcttgcgttaaacgactcgcctgttcttccagcgcagcggcggcggcagctgattcctgcaccagcgatgcgttctgttgcgtgacgcgatccatttccgaaaccgccaatgcgacttgatcgatgccacggctctgttcatccgatgccgatgcaatctcgcccataatgtcagtcacgcgagtgacagcattgacgatattgttcattgtttccccggcgctttcgaccagcaccgaaccggtatcaacgcgtgcgacggagtcttcaatgagggctttgatctcttttgccgcctgggcgctgcgactggcaagattacgcacttcacccgccaccacggcaaaaccacggccctgttcacccgcacgcgcggcttcaaccgcggcattcagcgcgaggatattagtctggaaggcaataccgtcgataacgctgataatgtcggcaattttcttcgaactatcggcgatctcatgcatcgttttcactacgccatccaccactttgccgccgtgctgggcggtgtcggaggcacttcgcgccagttgcgaggcctggcgggcgttatcggcgttttgcttcactgtcgcggtgagctgctccatgctggcggcagtttcttccagcgcggatgcctgctgttcagtacgggaggaaagatcggtgttgcccgccgcaatttcacgggtaccggcatagatggcatctgaaccttcgcggacatgagtgacggtgtcagtcaaagagcgttgcatatgtgaaacgctctgcgccaggtcgcccatttcactgcgcccgtcaatggtcagggtattcgccaggttaccaccggcgatttcgcgaatgtgagcaataatttttgccagcggagtaagcaacatacggcgaatgccgtaccacgccaccagcagaatcaataccaccaccagcgcgataaccgccagttgccactgggcaaatcggtaatcatctgcgttgtcagtgacgatatcgcgatacagtttttcactgctgagggcgtactgagcaaacgcttcgcccattgcattttgcattccctgggttggctgagcgaaataagctccagtattgccataatctagataatcaatcagttcagttaacgctgtgtaatagtttttatatttttcatcaatattacgactggtagcgaccatttcaggtaacggtgccatgcttttgaattttttataatgcgtcgctgcctgcgccaatgttttcctggcgctatcgagcaattcaactttggcgttactttgttgattggaggaatccatcatcatccgtaccgctgaacgactcaggttaatgcgcgtttgcagcattaaatcccaggttgacgtcagctcgccctgctgttcccgtaattgattggaaaccacaaagctcttctggctatggtgaagggaagaaaaaaacagactgccggaaataagctgtaacagtgcgaatacccccagcaccattaccaacagcgtgactacgcggatacggttaatcataaggcaccttcctgaaaacaagttgatctcgttatcggcaaggaggggggaaactttattgctgatgccacccgccgcgaaattgaaataaaaaccccgatgcgcagatcatcgggttcatttcaattgaggaaatcgggagaattacgccacttctgacgccgcgctatctaacagcgccatctcttcgctgttcagcagtttttcgatgttcaccagaatcaacatccggtcgcccagtgcgcccagtccagtgagatattctgttgaaagcgtcacggcaaattccggtgccggacgaatttgctccgccgtcaatgaaagcacgtctgagacgccgtcaaccacgatgccgaccacccgctgtccgagattcaggacgataactaccgtgttgtcgttatagtccacatccacctggctgaacttaattcgtaagtcaacaatcggcacaataacgccgcgcagattcgtgacgcctttgataaacgctggcgtgttcgcaatccgtgttacctgatcgtagccacggatctcctgcactttcaggatatcaataccgtactcttcatcaccaagggtaaataccagaaattcctggcctgacggctcgctggccagctttgttacattcgtcataccggtcatattgttacctttttactcattcaggcggcggtgttcgccatacgttgttcgcggtttatcgcctgcaaggcggagacatcaacaatcagtgccacgctgccgtcgccaagcatggtcgcagcagaaatgacggggactttgcgatagttactttcaaggtttttaaccacaacctggtgttgaccaattaattgatccaccagcaaggcgtagcggcgaccgccactttgtaagatcaccacaattccctgggtggcttcggttttcgcgcccgcgacgttgaacactttccacagttcgacgatgggcagatattcaccccgcacttccagcacccgctcgccgccggccagtggatggagatcggcttcacggggttgcagtgattccataacagcattcagcggcagaatgaaaacttcatccgcaacgcgtacggacatgccgtcgaggatggccagcgtcagcggcagtaaaatgcggatcgtagtgccagtaccctgcttcgactggatttcgacatgaccgcccatctcctggatattacgtttaacgacgtccatgccgacgccgcgcccggagacgtcggtgacctgctctgccgtggagaagccaggtgcaaatatcagcatcgcgacttcgtcgtcgctcatgttttcgctgacagtcaaaccttgcgaggccgcttttgccagaattcgctcacggtttagccccgccccatcgtcggtcacttcaatgcaaatgttaccgccctgatgttcggcagacagaattaaatttccgacgctgtttttacctgcggcgagccgtttttctggcagttcaataccgtgatcgaggctattgcgtaccaggtgggtcagcgggtcgataatgcgttctatcaggcttttgtcgagttcagtagaactgcccaccagcgtcagttctacctgcttgccgagttttcccgccagatcacgcaccagccggggatagcgactaaaaacatattccatcggcatcatgcgaatcgacatcactgattcctgcaaatcacgggcgttacgttgtaactgccccatgctggttatcaaatcaccatgattaaccgggtccagttcgctggaacgctgggcaagcatggactgggtgataaccagctcgccgacgaggttaattaattgatcaaccttttctaccgctacacggatgctggtggattcattgctgcgcgtcgttttttcccgctccacgcggccggttggcgcttgttcggctgccagtttaagcactggtggggtggatatttttggcgagacttctactgtttcaaaggtaatctgatcggcttcaatcacaaaacagagtaccgctgtgatgtcatcttcggcgatgtcgcccggtaatattgccgagagcgaatccgcccctttcaccacgtcagttaacgttgtcagatgtcccagttcttcttccagcaggtcgacttccccggccttcaggcgcgaaaggataattcgtcgcggcgactgactgcgactctgctcatcttgcggttcacttttggcaaccacacttaatcgggtcactgcggatggcgtttcgcctttcgcttctaatgccagttgacgcaaggcctggcagatataatcgaagctggcggcatccggctcttgcgactgtttataagcgtcgagctgttcttgcatgatgtccttcgtttccaaaaacagattgataatgtcggtgttgagttgcatctcacctcgtctggcttcatcgagcaggttttccatcagatgcgtggtttcctgcaaaacgctgaagccaaaagttcctgcccctcctttgatcgagtgggcagtccgaaagatggcattcaattgttcggcatctggcgcttccggctgcaaaaccagcaaatgctgctccatgtcagccaacagttcgtccgcttcatcaaaaaatgtctgataaaaatcgcttatatccatgctcacgctgtcacctcggttcggctgatggcattgtgggaacactgacctgtggtgcaacctcaggtttttccagggcgcttactggctcattctggctttcggcgttttcatgcaaaatggcctgttcggcttgtttgttcagtaccagcaggctgatgcgacggttgacggcatcatcaggtccgcgatcgcttaagcgcatcgttgccgccatgccgacgacacgtaacactttgccgctatccaaccctccgaccatcagttcgcggcgggatgcattggcccgatcggcagaaagctcccagttgctatatcctttctcaccgctggcgtaggggaaatcatcggtatgacctgaaaggctaatacggttgggaataccgttcagtacaggcgcaatggcgcgcagaatgtcgcgcatatagggttcgacatcggcactgccggttctaaacatcgggcgattctggctatcgatgatctgaatacgtagaccttcctggaccagatcgattttgagatggggacgtaacgcccgcagtttcggatcggactctatcaactggtcgagatcaccccgcaatttccgcaatcgactttgctccatacgttttttcagctcttcgatgttcggctgcttattcacttccccctggctttgggtgtaatcatcaccaccgccgggaattgggctttcactattagaaatgcgatcgccgcccgtaaccgcagtcgccagtggagtccggaagtactccgcaatctgaatcagctcttttgggctggagatggagatcagccacatcaccagaaaaaaggccatcatcgcagtcataaagtcggcataagcaatcttccacgatccatgtgctgccccgtggcttttggctttgcgtcgtttgacgacaataatcggatgcgcttgattcttcatgcttcctcggttgtcgtctgttgttgcggatttttcaccgcacgcacatgctcttccagttcaataaacgacggacgttcgctggaatagagcgttttgcgaccaaactcaacggcgataggcggtgcgtaaccgttcagattagaaagcagagtgactttgacgcactgcatcattttgctggtttcggcgcttttctgacgtaaaacagtcgctaatggggaaataaatccgtaagccaataaaatgccgaggaaagtccccaccatcgcatgtgcgataagcgcacccagctcggcggcaggacgatcggctgaacctaacgcgtgaacgacccccattacagccgcgacaataccaaacgccggaagtgagtccccgaccagcgccagactgttcgccgggacttctgcctcgctttcgtgcgtctcaatctcttcatccatcagggcttcgatttcgaaggtgttcatgtgaccgctgataatcaggcgcagataatcgacgataaaatcaagcatgacgctatccgcgaggatgcgtgggtagctggcgaagatctcgctctcacggggattttcaatatcacgttccagcgaaaacatccccatctgccgcgattttgccatcaaccgataaagcagagccagcagatccatatacattgctttggtgtatttggagcgacgaaacagcaacggcagcgccttcagcgtgcctttaatcgctttgccattattgccgacgataaacgacccaatccctgcaccggcaataatcaccagttcagcgggttgatagagtgctccaaggcttccaccggtcatcaaataaccgccgaaaactgtaccgagaacaaccaggtaacctaataagataagcacgacatcatccttccactgttgaccatgacaggatgttcagtcgtcaggcgttaacgcgcgattggggcaaaaaaaagcagcggtacgtcgttaccgctgctggaatgttgcgcctcaccgtatcagttaaacagcctgtactctctgttcatccagcagttgtgggataatatcggcaggattctgggaaagtttacgtctttttactgcccgggatggcggttgacataagctgcaggcaaagctgccaacaggctggtgagcgtgggtaataaaattgccgccgcagcagttgcagctggaaagttgcagtaatccactttcaacaaaccgcaccaatgtccaggcacgagttaatgccagcagtggtnnnnnnnnnntgggcactgttcaaggtataaacggtaggctttgatcaccgcatcgacgccattacacaaaccggttttcagtaaaaactgccatgcattacagaacatcgaagcatgaacgttttgttcccaggtcataaaccagtcggttgagaatggcagcatgcctttcggcggtgggcttccgcgcagttctttataaagttttatcaggcgtccgcgacttaactgtgtttcgctttccagcatctgcaaacgagcgcccagggtgatcaattccattgccagctgaatatcccgcgcttcctgaacaatgcttttttcactcatgatcaggcccttttcttgcgcagcgcttcttcaggctgattaacatcattcagcaagcgtgttgagagcatgatgccggtatgaatttgctggagatcgtcaacgcgggaatcttgcgtcaactgagtaatcgtctggtggctgtcaaaacggaagtgacaaaccagctgattggtttctgccagcttaaccatttgcggaagagtcagtgccgctaatgttgtcgccatttcttcatttatgccgagacgaaacatagcggacgctttgtcctgaacaatcagacgctgtgcaagtagtaaatatgacaagttgatgtcataaatgtgtttcagcaactcggaggtatgcattattcccacccagaataaccaactttatttttatgcggtttcaccgcaccctgtgatgtcgccgggaagccccggtaaaaataattagcattagaatagttgcgataagctgcaataagcagagccacctttttggtttaataagtccttacaaatagaagggggtctttacacttatctaagatttttcctaaatcgacgcaactgtactcgtcactacacgcacatacaacggaggggggctgcgattttcaataatgtgtgatgcagatcacacaaaacactcaattacttaacataaatgtataagttatacttttgttttgggtgtatttcaatctgttaaaaagtttttcgctacgctagcaagcaaaaatgaaacaggaataatcgaaatgggatgttgcgcacagtcaaaataactcaccgtaaataatcatctgctataaataatcactttcatgcaataccagataagctatttttaaacagacacttaccgcacaacaaactaattaaatacaaagaaaggcaacaatcaacttaatgttaatgaaatgttttacatatattaaccacttgtttaatgcggagaatcagtacactattttcttataattacatttgaaattatatgatcaccgggagtgattgattaattgtctttactaataatcagactaatatttacctgtttgaccgagttgggattgcgtcgtttctccattaggagtaaagctttaatgtcacctgaagttcacagaataaggaacaggttatgagctatagcaatattcttgtcgctgttgcagttacaccggaaagtcagcaactgctggcaaaagcggtatctatcgccaggccagtaaagggacacatcagtttaattactctcgcttccgacccggaaatgtacaatcaattagctgcgccgatgcttgaagatttacgcagcgtgatgcaggaagaaacgcaaagctttcttgataagttaattcaggatgcggggtatcccgttgacaagacgtttattgcctacggtgagttaagcgaacatattctggaagtatgtcacaagcatcatttcgatttggtgatttgcggtaatcacaatcacagtttcttttcgcgagcatcctgctcggcgaaaagagttattgcctcaagtgaggtcgatgtgctgttagttccacttacgggagattaaccgctcctacgcaagctttggaaaggtagcaactttatcgcgctgctggctttccgcgcttcgcggaactatctgctttaggtcgctaatgaagcactcctgccagtggttaatatcgtttttcacgataacgtccagcatttctgcatgacgggaaatacgttccgccagcgacatagtcaatgcacgatccagcgcagctgcaacttcgtcacgatcgtaggggttaacaattaacgccgacgttaactcgtttgccgctcccgcaaattgcgaaagaacaagaacgcccggattggctgggtcctgagcagcaacatactcttttgctaccaggttcatcccgtcacgcagtggcgtcactaagcccacgtcagagtagcggaatattttcatcagtaatttacggtcaaaatgctgattcaaataataaagcggcgtccagcctaattgcccgtatttaccattaattcgtccagcttcattttcgagctgatgacgaatatcctgataggcttgcacatcaccacgcgacgttggtgcaatctgggtataacgaattttaccatgatgctgcggatatttttccagcaacgcttcataggcgagaaaacgctctggcaaacctttggaataatccagccgttcgacagaaaagatattttgtacgtttttcagttccgctttaagttgcgccagttttggcggcagtggcccggcagcctgtttggctatttctttcggttcaatgccgatcgggtagacttctgttcgaaatgctttgccccaggctgtatggctttttgcgctacgtgtcgtgacgcgggtcaggttagaaagacaatccaggaacgccagacgatcgttttctgtctggaaacccagcaaatcataatcacaaagctgttcaagcaaggtgtcatatgtcggcagcgcgttgaagatttccggtgtcgggaaaggaatatgcagaaagaaaccaatgcgattattcactccccgtttgcgtaattcatgcgcaaatggcaacaggtgataatcgtggatccagataatgtcatcgtcttgcaacagcggcagtaatttatctgccagcaacgcatttacgcgtagatagccgtcccaggcaggacgctgaaattgcaccagatcgagccgataatgaaaagcgggccagagaacggcattggagaattggttgtagtattcgtcaaggtcctgttcgctgaggttaaaagaggcccacgtaatgttaccttttttcaccttttttagcggctgatcctcattccctgtttcaccactccagccaaaccacagtccgcctgcggctttcagtgcccccagtatgccaacggcaaggccaccggcactggcggcgtgctcgtctggtggtgcaatccggttagatactacgactaaacgactcatagtcatcactcctgttattttctcttttttgttgtaatgcggtggttatcatttcaagccagctccagacatccggcacacccgccagtcgccatgatgcctgagttgcacctgtgccaatttttactgacattccgcccagtcggttaacgactgcgaagccagattcatcggttaaatcatcgcccagaaatacgggcgttcgcccgataaagggagcttcctgcataaaagctgcaattgcctcacctttactggtacctctcggtttgatctcgacannnnnnnnnnttccctgctgtaacgccatttgtggccagatctgagtaatacgttgcgctaatgtcattaatgcgtcttcatgctgcggagcctgacgataatgcagcgcaaaagccatccctttcgcctccagctccgcgccgggatactgagcgatgactgtatgcagttgcacgctaatatcacgcgcaatcgcatccggcagatgaacgatatgtgttttaccattgatgtcacggcgctccgccccatgcacgcccgctaacgggaagcgataaggttttgccagtgcgtcaagctccaccattgagcgccctgatatcaatgccaatgcaccatcacttgcggttgccagtagctgtagtccttgcagaatattgtcaggcacgacgacctgatcgggacgcggttttatttccgccagcgttccatcaagatcaaaaaaccaggcatatttcgcggatagttcaggggtttcggttaacggttctgtcacccggctctcctccttctcttttcttattgttttgcgcagaacgcgctttacagacatgtaagtatagacagtgtgacgggggtcgccatttgcaatgaagaacagccaaccgttgtggcggctggctgtggtgggaaaaaacgttaaattgttgtggaaaaaagcatcagacagtgcgtttcgctttttgcttgtaacggtcgaagatcaccgctgccagcaggattaagccgcgaaccacgtactgcgcgaaaggagaaatattaagcaggttcatggcgttttccacggtgcctaaaattaagatacccgccaccacatatgagatttttccgatgccacctttcagagaaacgccacctaaaacgcaggcggagataacaataagctcataaccaattgacatcattggctgcccactagtcatacgtgaagccagaataattccggctatcgcagataccaggccagagagaacaaagataataattttggtgcgaacaaccggtacacccgccagacgcgcagcctcttcgttcccgccaatcgccagggtgttacgaccaaaggtggttttattcagcagcaaaccaaagataatcagacacgcgacggtgagccagattggcgcaggcagaccgaaccagttggcgtaaccaagggcaaagaagctttcatcttcgataccgaccgctttaccgtctgaaatgatgtacgccagacctcgaacaatctgcatcgttgccaatgtcgtgatcagagcatttattttcagtttggcgataacaaagccattgaccaggccacagagaacgcccagcaacaaccccgctgccacgccaatccacaggctttcagtcaggttaataaccaccgccgtggtgacacccgcacaggcaattacggaggcgacagaaaggtcaaagtcaccggaagcgaggcagaacaacatgccacaagccaccatccccgacatggaaattgccaggcccaaccctttcatattaatgaaggtggcaaaatttgggacaaaaatggcacaggcgataaagagcaccgcaaacaccaccagcatgccgtactgatcccagatacgcccgaagctgaatgacgacttaggtgcgccagaccccgatgtagaaacagaagacatcatactctccttactcaggcaacagcctggctgactttaggcatcgcaaggctcagtgcctgacgctcatctgcctgctcgtgtaacaattcaccggcgatttcaccttcccgcatcaccacaatccggtcggcaacgccgaggacttcaggtaagtcgctggaggcaaacagcaccgccacgccctgcgccgccagcgcataaattacgttatatatttcgtgcttagcgccaacatcaatgccgcgcgtaggttcatccagcaaaatgaccttcatctcttccgataaccagcggcccagaatggctttttgctgatttccgcctgagagattcatgatcagttgctccgcgcccggcgttttgatgttgagcgaacgaatgtggtgatcggcattgttttcttcccaaccgttgttgattacacaaccgccgagcacatgtttacgtctggcactgatgttgatattgtcgcgaacggagtgcacgggaataatgccttccgctttgcgatcttccgggcagagcatcatgcctgcggcaatggcgtggctcggtttacgaatatcgatcggctgttggtcgatataaacctgaccggcggtgatttgcgtcccgccaaacatgcctttcattaattcgctacgccccgcccctaccagaccaaacagcccaacaatttcaccactgcgaaccgccagacttattggcgtacgcacgcctggtgctttcacagcatcaagacgcaggcgctcctcgccataactacgcggttgccagccgtagatatcgccaatgtcgcgcccgaccatcgcctgcaccagcgcgtcgtggtcaacctgctgcatatcggtaaaggttttgacataacgtccatctttaaagacagtgatggcatcgctgagggcaaatatttcttccatacggtgagaaacgtataagatcacccgcccctcttttcgcagttcacgaataacgcggaaaagattgtcgatttcgcgggcagaaagggagctggttggctcatcaaaggcgataattttagcgttacgcgccagcgccttggcgatttcaaccatctgccactgaccaatggagagatatttcagcggcgtgtccgggtcaatatccataccaagatgtttaagttgtaaacccgcctcataattcagcaatgagcgattcacaatgccgcctttatgcggcagctggccgagatagatgttttccgcgacggtcatttccggcacgagatgtagttcctggtaaataatcgccacacccgcgttaagtgctgcggtcgtgtcggaaaaggacatttcctgcccattaatcactacagaacccgtggttggcgcatagttgccgctgaggatttttaagagagttgattttcctgcgccattttcacccatcaacgcatgaacctgaccggcatagcagtcaaaactaatatccgtcagcgccttaacgccgggaaacgttttaccgatgccgcgaaatgagagatacggggtagactgttgcataacgtctccgtgaatcactggtcgttcacaccccctctgcatcatgcagaggggaatttttccggcaaattacttaccgcctaaaccttttttctccagttcttctttaaagttgtcacgcgtgatcagtaccacgtcggtaacttcggtaaattttggcggttcaacgtcttttgctacccagttgtaaagcatttcgctggatttatagccatgtacgtccgggcttggcagcagggaaccgtagaagccggttgcctgtgctttagacagttcgctcaccgcatccacaccgttaatgccaatgccgatgatatcggccgctttaaagccctgaccttccgtcgcgcgtacgccgcccagcacggtgctgtcgttcataccgacgatcagccaatgtttaacttccggatgttgaaccagcattgagttagcagcgtaaaatgcccccgggatgtcgttagatttggtaggtacctgataaatttgtttttccgggaatccggccgctttcagcgcatccatagatcccgtagtacggcggcgggcggtatccagttcgttggcggtaatcgccatcaccgcgctttctttgacatcccagccacgtttctgcatctctttatacagttcctggccctgacgttcgccaattttagtcgccgccatcatcaccagcggaacggtatccattggcttacctttggcgttaacaaactggtcatccacggcaatgactttcatatcgtagccacgcgctttcgcgacgatggcagagccgagtttggggtccggagtacaaataacgaaaccttttgcgccactggcagccaggctgtcgatcgcgttcaatgttttttcgccatccggcacggcaatcttaataacctcaaaccctaaatccttcccggctttatcggcaaacttccattcggtctggaaccacggctcttccggttgcttcaccagaaaaccgagcttcaggttctccgccatagcggattgtgacataacggctgccagaccaatggctgccagggctttagtaaatttgtgcatggttctctccagctttagtgtcgttttgtgtagggcaaaaacgaatgacattcgttaaattaatcggaaaacaaagcattaccttttaactaaaagataagtgaccgtgttgacatagttttagcgagaaattaattctccataggagagcaatatcacatcgcagaattacagtgagaacgtgcataaatttagcgggaaaagacataagggaaagccaatttgtcagacaaattgtcgaatgcacagcagattaatccataagattagcctggaaatccttgttgtctttggtacccatgcgggatgtcttctttttaaccagtcaataggccgcattacctggcgttgagtttttgaaatggtgtaataaccgcaactcaaagatgtggaaaatgcacgtcattcatttcgccattaattatcactgtgctcattaattaacagaacacgtataatgagagccatctcgcaaaaatgaaaaaacgttttataaaatcatcacttcatcatgaattcaaattcattgattaatatcaacaagatacaaaaagcgctatcattaaaattcattgcagttacattgatttcatcaatgaaatgtaaaaatatataaacttgatgatttaagcattttcttatacccgttcagacgttattcttatttcagatcatcgtcagaattgactccacgatcacatttcggaccggcagaaaggaattattctgcaaacagtaattatggtgttttgatttatcttgcacctctccacttctggatataaggatattaggtatggcaaccgctggaatgcttctcaaactcaactctcaaatgaaccgcgagttttacgcatccaatctctaccttcacctgagtaactggtgttctgaacagagtctgaacggcaccgccactttccttcgcgcccaggcacagagtaatgtgacccaaatgatgcgcatgtttaactttatgaagagtgtcggcgctacccccatcgttaaagccattgatgttcccggtgaaaaactgaactctctggaagaactgttccaaaaaacgatggaagaatacgagcaacgttctagtacgttggcacagttagccgatgaagcgaaagaactgaatgatgattcaaccgtcaatttcctgcgcgatctggaaaaagaacagcagcatgatggtctgttgctgcaaaccattcttgatgaagtgcgcagtgcgaaacttgcgggtatgtgccctgtgcagaccgaccaacatgttctgaatgtcgtgtcacaccagctgcattgatcatcatcggcgctaatgcattgcgccgatgaaggttttgagaaaccgctgcctcatctgtttgaagcagcggtttttttaatgggattcaccctgtggggtaaacttgagttcaataagcgcgatggctttttggattgcccgcatggtgaccgggtctgcggcggcgggatggttagtaaagtcgatattcttcagctgactggacattttttcacgaacttcaacgggcgcgattacatcgagaacatccagaatttgtttgataaccaactggcaagcaaccacatcagaaaccagttcctgatcggcattcagcggctgggacatcgtaaactcctgatagcattttgaaagccgttatagtagcggcttcacatcttcagcgatagtcacatccaccgtcatcaggacacaaaaaaacctgccggagcaggttttttattatcggaacatattgcctggcggtacgtctttgaacgtcttgcaatagttattgaacatacttttcaggattttgcgcagtttcatcgcggcactccgaccatttgttatacaggtgttattgtctttgcgcttataatatgacaaccatcacaaaaatcaatctttatgtgatacaaatcacataaatacccctttaatgttataaaaatgataatcaaaaaacagcccccctatttctgacacctacagatggcaagaaatagcgcctgccaggcgtcttttccggccattgtcgcagcgctgtaacgcgtaaaatagtgctttctcttactcttctggctggaccatgagacttctgattctgactctttcattaataacgctggcggggtgtacggttactcgccaggcccatgtgagcgaagttgacgcggcaacaggtattgtacggttggtttatgaccaggcttttttgcagcatgcccataccgatcgttatgtcagtcgcgggatcgccgatcgcgcatgccagcaggaaggctatacccacgcggtcccctttggtcagccagtaggcaactgtagcctttttgcgggttccttatgtttgaatacggaattcactttgtcatatcagtgccatcattccgccttccctgtctttctctaaatattttaatcagcgaggggatcttcgctgattaaagaaatagcggtaatgcgttttattcccattcgtatttttaataattgaagtttatattttaccttttgcaaataataaaataacaaattatagtgacgccacagcaacaaatataacctttgtggagcactatcatgctgaaaccagaaatgattgaaaaacttaatgagcagatgaacctggaactgtactcttcactgctttatcagcaaatgagcgcctggtgcagctatcataccttcgaaggtgctgccgcgttcctgcgccgtcacgcccaggaagagatgacgcatatgcagcgtctgtttgattacctgactgataccggcaatttaccgcgtattaataccgttgaatctccgtttgctgaatattcctcacttgatgaattattccaggaaacctataaacacgaacaattaatcacccagaaaattaacgaactggctcatgctgcaatgaccaatcaggactacccaacatttaatttcctgcaatggtatgtttctgagcagcatgaagaagagaaactgttcaaatcgattattgataaattaagcctggcaggcaaaagcggcgaaggtctgtattttatcgacaaagaactctctaccctcgacacacaaaactaatgctctccggcggcaggtttactgccgccgtttcaaatcagtgacggcaaatcttactctgatcggtcgaaaaaccgtctttcgaaggtataaatttgccttttgctgccagaaacgctaccagctctcccgctgtcatcccttctgccgagcaggtgtgaaaacgtgcctgttcaccaaaacgcgctttaatcgcagcttccagactggcatgcgtatattgctcgcctgattcaatcatcatatttaacacttcatgaccgtgaatagagtccatcgtccctcctcaaaaaaagcctagcgtagcgattgccgcttatgaagactttgcgccagcgcaggactgaatgctttttattgtacatttatatttacaccatatgtaacgtcggtttgacgaagcagccgttatgccttaacctgcgccgcagatatcactcataaagatcgtcaggacagaagaaagcgtgaaaaacagaaccctgggaagtgtttttatcgtggcgggaaccacaattggcgcaggcatgctggcaatgccgctggctgcggccggtgttggttttagcgttacgttaatcttgttgattgggctttgggcgttgatgtgctacacggcgctattactgctggaggtgtaccagcatgttccggcagataccggtctgggcacgctggcaaaacgctatctgggacgctacggtcaatggctgacgggcttcagtatgatgttcttaatgtatgctctgactgcggcatacatcagcggtgccggtgaattgttggcctccagcatcagcgactggacaggtatttcaatgtcggcaaccgctggcgtgctgttgttcacttttgttgccggtggcgtggtttgtgttggaacatcgctggtcgatttatttaaccgttttctgttcagcgccaaaattatttttctggtggtgatgctggtattgctactaccgcatattcacaaagtgaatcttttaaccctgccgttgcaacaggggctggctctgtcagcaatcccggtgatttttacctcatttggttttcacggtagcgtgccgagtattgtcagctatatggatggcaacgttcgtaagctacgctgggtgtttataaccggtagtgcgatccccctggtggcatatattttctggcaggtggcaacgcttggcagcattgattcaacaacctttatgggattgctggctaatcatgctggattaaacgggctgttacaggcgttacgcgaaatggtggcctctccgcatgttgagctggcagtgcatttatttgctgatttagccctcgccacgtcatttctcggcgttgcgttaggcttatttgattatctggctgatttatttcagcgttcaaataccgttggtggacggttgcaaactggtgcaattacctttctgccgccgttggcgtttgcactgttttatccacgaggatttgtgatggcgctgggttacgccggtgtggcgctggcggtactggcattgattatcccttcgctgttgacctggcaaagcagaaagcacaatcctcaggcgggttaccgggtgaaaggtggtcgtccggcgctggtggtggtgtttctctgtggtattgctgtgattggcgtgcaatttttgattgcggcagggttgttaccagaagtggggtgatcagatagcctcaaattccttattgggtgccagaattaacgctgacacccaatttgacctcttaatgcaggcagcactgcttaaatttcttaccactaccgcacgggcaaggatcgttacgccccggtttctcttctgctttgatcggttgctgaacagctttttcctgcggatgcgccatccagtacgcatgtagatcaagcgccgccagtcgaatggcatctacgctctcttcaaacgcttctggcgacattttctctacccgctcgaagttttcctcagtaccgtgcagcgcaatcgcctccagcgctggttttaacgaatcgggcaacgttgaccagtcagaaagtgccacgccccgcatatagccaaagcaccactcctcaacaatcgtcagctcgctgccatcaacttctcgcaagccgaataacggctcaaactgctccgggaattcgttcagacgctctgcggtatcggccatatgttgaaaagccagattcataaagcgcgtcatctctttctctgacgcccagcgcggcacatagtcagccccaccccacacggcaaccagccactgtgccggttcaatctcttgcggagaactcaacaccgccgtcaataaaccgtccagctccgccacatcaaggatggcgtggtcagtgttgtatttggtcagaatatcgtccagccattccaactcactttcgtttaacggtcccgttttcatacgcttttccttgtggatctcaactcgccagcacctatcttacatgccggtccgtatcagagatactttttgagtggctttgctggtgattaaaaattaaggagggtgtaacgacaagttgcaggcacaaaaaaaccacccgaaggtggtttcacgacactgcttattgctttgattttattcttatctttcccatggtacccggagcgggacttgaacccgcacagcgcgaacgccgagggattttaaatcccttgtgtctaccgattccaccatccgggctcgggaagaaagtggaggcgcgttccggagtcgaaccggactagacggatttgcaatccgctacataaccgctttgttaacgcgccaaattcttcaggcctttcagccagacatccgcttgaggccgatgtcttttaaactggagcgggaaacgagactcgaactcgcgaccccgaccttggcaaggtcgtgctctaccaactgagctattcccgcattcatcaagcaatcagttaatcacttgattttattatcgtctggcaatcagtgccgccgttcgatgcgttgcattctacttacctggcgcgatgagtcaacgatatttttcaccacttttgatcgtttgctgaaaattacgccgaaacgatcactgatcaagcaaatctgcacgcgcagcgctcaaatattgcaacattgaccacagagtcagtaccgcagccacaaagaaaagtgcaataccggcgtactcaacccaaatgttcggacgccacagcagccaggccaacgccaccatctgggcagtggttttcactttcccaatccaggagacagccacgctactgcgtttacccaactccgccatccattcgcgtagcgcagaaataataatttcacgggcgatcatcgttgccgccggtagggtcacccaccagctgtgataatgctcggttaccagcaccatggcgatagccacgagaactttatctgctacagggtcaaggaaagcaccaaaccgggtactctggttccagcggcgtgccagaaaaccatcgaaccagtcagtcaccgccgcgacgcagaaaatgagcgcggcggcaaacggcgaccaggtgacaggcagataaaagaccaatacaaagaatgggataaggatgacacggaacagtgtaagcaacgtagggatattaaattgcataatgacgggtaactatctgttgtcagtaagattacccctatgttgctacagagacatcaatgtttcaacgaccagaagatcttttctgccagaccttgcgaaatacccggcacttttgcaatttcctcgacgctggcgttacgtaaaccttgcaaaccgcccatatatttcaacaacatttgccgacgttttggcccgacgccttcaatggtttccagggaactggtatttttgactttcgcccgttttttacggtgcccgccaatcgcgtgatcatgtgattcatcgcgaatatgctggataacatgcagcgcgggtgaatctggcggcaaactaaatccctcaccttccggctcaaagaacagcgtttccagtccagccttacgatctgctcctttggcaacgccaagtagcagcggatgatttttatcccatgagacatccagttcggcgaagacatttttcgcctgcgcaagctggcctttgccgccgtcgataaggatcacatccgggatcttactgtcgtcaatggctttaccataacgccgacgcagcacctgattcatcgccgcataatcatcgcccggcgtaatgccagtaatgttatagcgccgatactccgcacgcagcgggccgttagcatcaaacaccacacaggaggcgacggtttgttcacccatggtatggctgatgtcaaagcactccatccgcttcacttccggcaatttcaacacgctggcaagcgcggtcagccgctggtgaacggtagattgctgcgaaagtttgctggttaaggccgtcgccgcattggtgcgcgcgagtttcagataacgcgcccgatcgccgcgaggtttggtttgaacattaatcttgcgtcccgccagttctgaaagggaatcggcgagcagcgttttatcgctaagattaaaatcgagcaggatctcacccggtaaggtgcgcatctggctgccttgtaaatagaactgacctacgaaggtttctaccacctcgctcagttccgtaccgccaggcactttcgggaaatagctgcggctgccgagcactttgccctgacgaatgaacaatacgtggacacaagccatgcccgcatcgaacgccacaccaataacgtcgaggtcgtcgccggtattggaaacgaattgtttttcggtgacgcgtcgcaccgcctgaatttggtcgcgaatacgtgccgcttcttcaaactccagattctggctggcagtttccatacgactaatgagttgcgtaagcacctgatcatctttgccagacaaaaacaggcgcacatactcgacctgctgagcgtattcttcttcactcaccagtccttcaacgcacggtcccagacagcgccctatctgatattgcagacacggacgcgagcgattgcgataaacactattttcgcactggcgaatggggaaaatcttttgcagtagcgccagtgtttcacgtacggcatagccattcgggaacgggccgaaatattcacctttggcatgcttcgcaccacgatgcatcgccagacgcgggtgggtatcgccactcaggaagataaaaggataagatttatcatcgcgtagcaaaacgttgtaacgcggctgatagagtttgatgtagttgtgttccagcaacagcgcttcggtttctgtatgagtaaccgttacatcaatttgctggatctgggcgaccagcgcttcggttttgcgcgaagcgaggttgctacggaaatagctggaaagccgttttttcaggtctttcgctttgccgacatagataaccgtaccaccagcatcgtacatgcgataaacgcctggctggctggttacggtttttaaaaacgcttttgcgtcaaactgatcactcactgacttgataatgtctccgcattacacagaccatggcgaattgccaggtgagtcagctcaacatcgccatgaatgtttagtttactgaacatacgatagcggtagctgttcaccgttttcggactgagattgagctgttctgagatctcattgaccttctggcccttggtgatcatcagcataatctgcaattcacgttcagacaaactggcaaatgggctttctgttttttctggttcgatctggcttaacgccatttgttgagcgatgtcagaagcaatgtaacgctgccctgaatagacagaacgaatcgcactcacgacttcctgcggagccgcgcctttgctgaggtagcccgcagcaccggcctgcatgactttcgctggtaaagggttttctgtatggacggtaagcatgatgattttgacatcagctgtggaacgcgcgattttacgcgtcgcctcaagaccgccaatgcccggcatactcatgtccattagcaccacgtcaacggcatttgtccggcaccacttaacggcgtcttcaccgcacgatgcctcaccgacgacttttataccctttatatcttccagaatgcgtcgtatccctgcgcgcaccagttcgtggtcatcaacaagtagaacgttgatcaaaggaatatctccagaaatagggataacgctactgatagttagtcattcgtatattagcggtttttattgcaactttgaaacgttaaaaatggtgggtattcgatttttctctcgtttttgtcaattcgattgtccacagttatggtcacgcccgtcaccaacggcttaccggatcgtttcacagtaagccctacgatgaaatgtgacaaaaattgactttattcagcaaaaatgaaaatcagcccgctgaatatgtaacattaattaacccgaacaatacgggcaaaaaacattcatgataaaaatatttattggtcattatattaacgtattttatagcactgccgatatcacgctcaaaaaacaaccactgctatttttagcaaagcttatggtatactccgccgccttaacatttttcaccgcaaattttcattgcaacatgacgaggaaaataaatgagtacgcctgatttttctactgccgagaataatcaagaactggcaaatgaagtctcctgcctgaaagcgatgctgacgctgatgctgcaggcgatgggacaagctgacgcgggccgcgtgatgttaaagatggaaaaacagcttgcgctgatcgaagacgaaacccaggctgcagtattttccaaaacggttaagcaaattaaacaagcctaccgtcagtaatataaaaccggctgagagcgtgcctttcagccggtttttgcatctggcacgcagaaagaaaagcgatcaaattaagccagtagcggccgcgtaacaggccacctgggtcttatttggtgcattgatttttttctgcatgtttttctgatggaaattgaccgtattctcagagattgacaaaatcatcgctatctctgctgatgtcttcccttccgccgtccatttcaaaatttctttttcgcgcttgctgaaattcatctctggcgtcatcactatttcatcatttaaacgcatcagagccatcagactttcgcgcaccagtaactgcatttttaattgcagttcatcactaagaatgggtatttcgcgagcgctgcaacgggaaaaggacaaaaagcccaacgcccgatttggcagcattaaatactgagtgacaccgcggcgtaaaccatgtgcgcgcgcggcttcccataacggctgtgcttcgctgaataagtcatcattccacattaaatggccctgactaaagttttcagggttcagcaccggatcaattgcgagaaagttttttgcctgataataactaacccacgcctcagggtaattggtgtagaaagccactttaggtcgcgtgaatggtaccgggtggcgaacacataacgaatagtaatcgtactccagctgctgagcctgaagctctatttcatggtagacctcttctgcggcctccatcctctgaaaacgcaacagcatcgtgcgacgccagctgaaaaaatccgtatcctgcatagtaaaccgcaacgcccctgagagtgagtatcatttataatgataattcaaactatcacataaataagatttatatataatttatattattcaggcaatgaattacttttgcaagccatcgcattctcttatgttattaatgagttatgctgatttgttaagcagttttatcacgcttgaaatggcgtcccgccccgacaggtgaatcgtcggggctgattttttcttattattgcagcagaaacttctcgaggaactgtcgggtgcgaggctgctggggatcggcaaataacgcttttgctgccccctgctcgactatccgcccctggtccataaaaatcgcccggtccgcaacatcccgggcaaagctcatttcgtgcgtcacaatcaccatcgtgcgcttttcctgcgccagctggcggattgtgttcaggacttcgcccaccagctctggatccagcgctgacgttggctcgtcaaacaaaatcacctcaggacgcattgccagcgcacgcgcaatcgctacacgctgctgttgaccgccagacaaacgacgtggatagctggtttctttaccggccagcccaactttcgccagcagctcgcgagcgcgcgccgtggcctcttctttcggttcgcctttgacgatcaccggcccttcaataatgttttccagcaccgtacgatgcggaaacaaattaaagttctggaagacaaacccgacgtgctgacgcaactggcgaatcagcgatttttgctgacttaatgaacgtgcagtatcaatagtgatatcgccaacggtgatcgttcccgcttccggttgttccagcagatttatgctgcgtagcaacgtggttttgccggaaccactcggaccgataattgccaccacttcgccaggctttacctcgaggtcgataccgtgcagcaccgtctgaccgtggaattttttcaccaggttcttaacttcaatggcactcatttgggttctctctcctggcgattaagttgattctcaaaatggttctgcaacgtcgataacacagtcgccatgatccagtagatgagcgaagccgccaggtacatggtgaacacatccagcgtgcgcgaggtaatcaactgcgcctgacggaacagctccggcacctggattgtcgcggccagcgacgtatcttttaccagactgataaagctgttcgacagcggcggcaacgccacccgcgccgcctgtggcaaaatcgcgcgacgcatggtctgccacggcgtcataccaatactggcagcggcttcccactgacctttatcaatagaagaaatggcggcgcgcagcgtttcggcggcataggcggcagtgttcagcgacagaccaatcattgctgacggaatgggatctaattcgataccaaactgcggcaggccgtaatagatcataaacagttgtgcgatgagcggcgtaccacgaaaaatagagatataaaaacgcgccagccagcgcacgggccagattggcgacaggcgcatcagcgcgagaataaacccgagtagtaagccaaaaaacatgccgccgatactgagttgcagggtatacccagcccctttcaacaggaacggcaaggaatcaataaccagttgtatactttcttgcatgagcgttcccggagctaaacgtggggatgataggcgaacagcgcaggcgcgccgccggtatgaataaacagaatcggcccttcatctttgaagcgtttctgactgataccgtcaatcagccccgccatcgcttttccggtatacacaggatcaagcagaatgccttccagacgcgccagcaatttcactgcttccatgccttcgtcgttcggcacgccgtagccaggtgcaaaatagtcatcccagagtaaaatttccgctgatgcggtcagctccagttctttcgcaatcgcctgttgtaggttaaccactttcggcaattgatcggcaacggaacgcgacacggtcacgccaatcagttcgctttcaggcatcaggtgttccagcccaacagccaatccggcgtgagttccggcactgcccgatgcgaccaccaccgacgaaatattaaccgccccttcacactgttgcgcgatttccagcgcactctccacataacccagcgcgcccagagcattagaaccgccaaccggaatgacatacgggcgaaagccttgtgcttcgactcgcgtcgccagctcttccagttgggcattgggatcggtcagtgcgtcgcacatttcaatctgggtattgaacagatccagcaacaaacgattgccgttggttaaatagttttctgcggttgtgccaataggattttccagcagcgccacgcagtgcaggccgagtttcgccgcaactgcggcagtctgccgcacatggttagactggatcgcgccggcagtaatcagcgtatcggcaccttcgcgcagggcatctgccgcgagaaattccagcttacgtaatttattgccgcccattgccatgggtgtgacgtcatcccgtttgatgaaaatttcccgtccaagataatcagaaaagcgcggcagatattcgagcggcgttggcgcgccgataaactccagccgtggaaaacgggttaaattatgcagtggcataatagcctccgatgtgtgttgttgtgattttcttattatgcacgctgaaaacgcgtaaataaaaaaggcgctagtgaaagcgcccttttttgtcattatgctgattatttggtcacatcagcaccaaaccatttttcggaaagggcttgcagagtgccatctttttgcatttccgcaattgcatcgttcactgctttcagcaggtcttcatttcctttacgcagcgccacgccagactcctgacgggagaatgcttcaccggttactgccagcgtatcgttggttttcttcaccagatccagcgccgccagacggtcaacgaggatcgcatcgatacggcctacgcgcagatcctgatatttggtcgggtcatcatcataggtacgcacatcgacgccctgaacattctgccgcagccactcttcatagttggtgcccagaccgacacccacttttttgcctttcagatcagcagccgttttaatggtgccttcgttaccttttttcaccagcgcctgaataccagaaatggtgtacggggtagagaaatcgtattttttcttgcgctcatcagaaatggtgacctgattaatcaccacatcaatacgtttagagtccagcgacgccagcataccgtcccatttggtcggttttagtgacgcctcaacgccaagatgttttgccagctgttgggcaaattccacttcaaaaccggttaatttgccgtcatccccctgaaaactgaacggcggataagttccttccagccctaccagtagcgtaccgcgctctttgactttattaagcagaccttcatctgcaaaacttttaacgctcatgcccgcaaccagcgccacggccatcacacccatcaatgcctgacgtcccagatgtgctaatttcatattcaccccgaatgttgttatgtctgtttgcagtgtagagccattgtttgtaaacacaaaaacaactccgctacatcttattcttatttaatatatatcagaagcaggcaggctggaggatttctgcacaagtccggtacacgtttgacgctgatagtgttgatacttccgtaatgcgatgcggtaattgctggtgctggtggtgggcagccacggggcgaggatttcatcaaggaaaccgtcctgcagctgatcgagggaaatattttgctcgtgtagatgattccccaaacggcgcaaacgaacgacatattcacgcaccgtaccagggctcatttcagtttgctcaaaaagaaattgcttaaagccgataatatcgaaaaaatcactctgcgttttgcaatgtaaatcaccgcaaaatcggcacaatgccgcccatgattgttgttccacttgccagccattttcatcaagcagcgtgtccagtcgggaaatctcgattttattcactattttgccgtcgcggacgagggtaatgcgatcgagtaatttacggcaatgcgcgcaatgggtctggctgtgtttaaagtctttaagatagcggcttaatggccgtcttttcaggtgctgcaccatcattaagaactcctggtagtcaaaattaaagtgcggcatttactgacgttataacttacccagtttagtgcgtaaccgtttaatagcctggctgtgtaactgactgacccgcgattccccgacctccagcaccgcgccaatctctttgagattcagctcttcctggtaatagagggttaataccagtttttcgcgctccggcaacatttcgatggcctccatcacccgctggcgcagattactgtccagcagttgttgtagcgggttttctcgctgatgatcatcagtaaccagttcgatgctatcgccgtgctcttcacgccactcatcgtaggagaagagctggctgttattggtgtcgagcaacatttggcgataatcggcaatatcgatccctaaacgttccgcaacctcagtttccgtggcgttgcggccaagttcctgctccagttgccctattgcctgtgccacttcacgcgcgttgcgtcgcacgctgcgcggcacccagtcacggctgcgaagttcatccagcatagcgccacggatacgctgcactgcgtaagttgtaaatgccgttccttgtagggcgtcatagcgttcgacggcattaagtaacccaatgccgcccgcctgtagcagatcgtcaagttccacgctcgcgggcagtcgaacctgcaggcgcaatgcttcgtgacgcaccagcgggacataacgctgccacagcgagtgtttatccattacaccttcagcggtatagagtgaattcacgataaacagccctgcgttatatgagttatcggcatgattatccgtttctgcagggtttttaatcggacgattagtgggtgaaatgaggggttatttgggggttaccggtaaattgcgggcagaaaaaaccccgcaggtagcggggtcaggcaggttaaggccattagccttgtaacagagacagaacttgctgcggtacctggttggctttagacagcacggagttgcccgcctgctggataatctgcgctttcgacatgttggacacttcggtcgcatagtcggcgtcctgaatacgggactgcgcttcagacaggttggtggtggtgttgttcaggttggtgaccgcagaatccagacggttttgaacggcaccgagggaggagcggaatttgtcgactttagcgattgcggcatccagtgcttttaacggatcggctgtagcggctcccgccacttccgctgcaccaacagttaccgccgccgccgtaccggtaatgactacagtggcttccatgtatttaccggttgcagaatcaacgaccgcatatttagtactgttagacgcggtgtcagtgtaagacagtaaattgacttgtttacccccagcatccttgacatccgcagcagcaattgctgtatcatcagcagccgtcagtttcgccgcgctgaaatccgccatgccggacacggtaaatcctttcagattcaaagtggtactgtcgatttgttgcaagccaatgctgatcgtctggttatcattggcaccaatctgaatcttcatcgaatcgtttttcgacagcacgttcacaccgttgaactgggtctgaccagatacacggtcaatttcatcaagacgggatttgatttcgtcctgaatagaagacaggtcggaatcagagttcgtgccggtagaggcctgaacggtcagttcacgaatacgctgcaagttgttgttaatctctgacagcgcgccttcagccgtctgcgccagagaaataccgtcgttggcgttacgtgcggcctgagtcagacctttgatgttagaagtaaagcggttagcaatcgcctggcccgcggcgtcatctttagcgctgttaatacgcagaccagaagagaggcgctcgatagaagtcgacagcgcagactggtttttgttgatgttgttctgagtgatcagcgagaggctgttggtattaatgacttgtgccataattcattttcctgttttcaagtctacggtttaagtattgggcttccacccttcggcttcgtcgccgtcaaccctgttatcgtctggtcactcacaacctttagaatttttttctagcggtcgaaatactccccttcctcgttgctgttcgtgccattaaggcaaaaaataaatcgtaaactttaccccgcttacgccgataaccccggtattcgttctatacacgtcgcatgattaaggaaactatatggctagtatttcaacgcttggggttgggtcggggctggacttaagcagcatccttgacagtctggaggcggcagaaaaatctaccctgacgccgatatcaaaacagcaaagctcttacaccgcgaaactgagcgcctacgggacgctgaaaagtgcactagagagtttccagacagccaacacagcactgaataaagccgatttatttaccgccacctcaaccaccagcagttcatcggctttcagcgccaccaccacgggcagcgcgattgctgggaaatacaccattagcgttagccaactggcgcaggcacagacgctgacaacaaaaaatagtcaaaaagacagtaaagccgccatcgccaccagcgatagcgtactgaccatccaacaaggcggcggtaaagatccggtcacgattgatatcagcgcgggtaactcgtcactttccggcattcgcgatgccattaacaacgccaaagctggtgtcagcgccagtatcatcaatgtgggaaacggcgaatatcgtctgtccatcaccgctaacgatacgggcagcaataacgctatgaaacttagcgtcagcggcgacagcgccctggaaagttttatgggttacaacggaacgccgggtgatagcagcaatggcatgattgaaagcgtcaccgcgcaaaacgccaaactgacagtcaataacgttgagattgaaaacagcagtaacactatcagcgactcactggaagatatcaccctcaacctgaatgacgtcaccaccggtaatcagacactgaccatcagtaaagacacatccaaagctgaaaatgcggttaaagcgtgggtggatgcctataacacattgcaggatacattcagcagcttaaccaaatacaccgctgtcgatgccggagctgaaagtcaggactccagtaatggcgcattactcggtgactccacactgcgtaccatccagactcagcttaaaaccttgctcgccaatactcacagcagttcaaactataaaacgctggcacagattggcattaccagcgatgccagtaccggcaagctggaaatcgcgaccgacaaactgcaaacggcgctaaaaaatgatgccgctggtatcggtgaaatgtttataggtgacggcaaaagtactggggtaaccaccggcattagtaacaacctgaccagttggctctcttccaccgggataatccaggcagcaaaagatggcgtcagcaaaacgctgaataatttgaccgaccagtacaacgcagccagtgaacgtatcgataccttaatgacgcgctataaagcccagttcacccaattagatgtgttaatgaactcgctgaactccactagtagctatctgacacagcagttcgacacctcaaatagcaactcgaaataatcttcaggagagactatgtacgcggcaaaaggcacccaggcctatgcacaaattggcgtcgaaagcgccgtaatgagcgccagccaacagcagctggtcaccatgctatttgatggagtgctgagcgcactggttagagcgcgcctgtttatgcaggacaacaatcagcaaggcaaaggcgtctctttatcaaaagcgatcaacatcattgagaacggactgcgggtgagtcttgatgaagagagcaaagacgaattaacccaaaacttgattgctctttatagctatatggtcaggcgcttgctgcaagccaatttacgtaacgatgtctccgcagtcgaagaagtggaagcattaatgcgcaatattgccgatgcctggaaagagtctttactctccccttctttgattcaggacccagtctgatgaacaatgcaccgcatttgtatttcgcctggcaacaactcgtcgaaaaaagccagctcatgttacgcctggcaacggaagaacaatgggacgaactcatcgccagcgaaatggcgtatgtgaatgcggtgcaggagatcgcacacctgactgaagaggttgccccgtccactacgatgcaggagcagctccgcccgatgctgcgcctgattctcgacaacgaaagcaaggtaaaacagttattacagattcggatggatgaactggcgaaactggtcggtcagtcatcggtgcaaaaatcggtgttaagtgcctatggcgatcagggcggctttgtgctggctccgcaggataacctcttttgaatcttaatgagccgatggctcgcgaataatccgattacggctacgcttctaatattccccttgaatggagtcgaagaatgcgtaatcccacgctgttacaatgttttcactggtattacccggaaggcggtaagctctggcctgaactggccgagcgcgcagacggttttaatgatattggtatcaatatggtctggttgccgcccgcctataaaggcgcatcgggcggctattcggtcggctacgactcctatgatttatttgatctaggtgagtttgatcagaaaggcagcatccctactaaatatggtgataaagcacaactgctggccgccattgacgccctgaaacgtaatgacattgcggtgctgctggacgtggtagtcaaccacaaaatgggcgcggatgaaaaagaagctattcgcgtgcagcgtgtaaatgctgatgaccgtacgcaaattgacgaagaaatcattgagtgtgaaggctggacgcgttacaccttccccgctcgtgccgggcaatactcgcagtttatctgggatttcaaatgttttagcggtatcgaccatatcgaaaaccctgatgaagatggcatttttaaaattgttaacgactataccggagaaggctggaacgatcaggttgatgatgaactcggtaatttcgattatctgatgggggagaatatcgattttcgcaatcatgccgtgacggaagagattaaatactgggcgcgctgggtgatggaacaaacgcaatgcgacggctttcgtcttgatgcggtcaaacatattccggcatggttttataaagagtggatcgaacacgtacaggaagttgcgccaaagccgttgtttattgtggctgaatactggtcgcatgaagtcgataaactgcaaacgtatattgatcaggtggaaggcaaaaccatgctgtttgatgcgccgctgcagatgaaattccatgaagcatcgcgcatgggtcgcgactacgacatgacgcagatcttcactgggacgctggtggaagccgatccttttcacgccgtaaccctcgttgccaaccacgacacccaaccgttgcaagccctcgaagcccccgtcgaaccgtggtttaaaccgctggcgtatgccttaattttgttgcgggaaaatggcgttccttcggtgttctatccggacctctacggtgcacattacgaagatgtcggaggtgacgggcaaacctatccgatagatatgccaataatcgaacagcttgatgagttaattctcgcccgtcagcgtttcgcccacggtgtacagacgttatttttcgaccatccgaactgcattgcctttagccgcagtggcaccgacgaatatcccggctgcgtggtggtc

SEQ ID NO: 169 - DNA, 57928 bp, Escherichia coli
  source 1..57928: mol_type = genomic DNA
cataccgtagtcatagcggatgccgtaaccgcgccccggcaaccctaacgtcgccagagaatcaaggaagcaagccgccagacgtcccaggccaccgttaccgaggcctgggtcattttcttcatcaatcagctcttcgagatttaaccccatcgcttccagtgcgccctgtacatcttcgtaaattcctagcgacaacatggcgttggagagcgtacggccaatcaaaaactccatcgacaggtagtaaacctgacgagtttcttgcgacaactgggcacggtttgaacgtaaccagcgctccacgagacgatcgcgcacagcaaataacgttgcgttcagccattcatgtttattggcgacgaccgggtcctttccaatcgtaaacatcagcttgtaagcgatagagtgcttaagagcttctacgctaagcgtgggcgatgaatatgtaaacggagcattcatataggcgtttcctgaaaactatttcaagcgatagtaaagctcacggtacgacttcgccgcgacctgccagctaaaatccattgccatagcctgacgttgcacaaaccgccacagtgaaggacgggaccacagtacaaaagcacgtcgaatagcccgtaacagcgaccaggcattactatcttcaaagacaaacccactggcgacgccatctgcaaggttctcaagagaacagtcagaaaccgtatcagcaagcccaccggtgcgccgcactaacggcagcgtaccgtacttcaatccataaagttgcgttaagccgcacggttcaaaacggctgggcaccagaatgacatccgcgccgcccataatgcgatgcgaaaatgcttcgtgatagccaatctgaacgcccacctggccggggtattccgctgccgccgcaaggaaaccttcctgcagcaccggatcgcccgcgccgagtagcgccagctgcccgccctgctccagaaggcccggtaaggcttccagcaccaggtcgagacctttctggctggtcagacggctcaccactgcaaaaagcggcactttatcatcaaccttaagccccattgcgatttgtaactggcgcttattttccgctttatcttccaacgtatcgcgggtgtagcgcgaggccaacagtaagtccgtctctggactccagattttctcgtccacgccgttcagtacgccggaaagacgcccttcacggtgacgctgttgcaacagaccttccataccgtaggcaaactgcggttcggtgatctcgcgagcgtaggttggactgaccgccgtaatgtgatcggcatagtacagaccggccttcaggaaagagatttgtccgttgaattccagcccatgaatattaaagaatgaccatggcaattggatgtcattcatatgatgtgcataaaacatgccttgataggccaggttgtgcacagtaaacaccgacttcgccggacgcccgcgcgccgccagatacgcaggcgcaaggcctgcatgccagtcgtgcgcatgcaccacatcaggacgccagaatgggtcaagcccgctggccatttctgccccaacccaccccagcagcgcaaaacgcaatacgttgtcggtataggcaaataagttggtatcgtgatacgggcttcccggacgatcatagagatgcggcgcgtcaatcaggtatatgccaaccccgttgtaatgaccgaacaacagcgtgatatgtccggcgaaggtatcacgacgggatactacctgcgcatcggtaacgccacggcgaatatcgggaaatgcaggcaacagtacgcgagcgtcaacgccgtctgcgatttgtgctgcgggtaatgccccaataacatcagccagaccgccggttttaagcagcgggaacatctctgaacatacatgtaaaacctgcattatcgctcctgtttatgccctaacttccgtagcatttcgcgcgttaccagcacgatgcnnnnnnnnnncgattccttcttctgaacgatagaaacgacgtgcatcttcctctgcgttttcaccaatcaccatgccttccggaataacacaagcacgatcgatgacgcagcggcgcagacggcacgagcgacctacccatacttccggtaacaatacggcggaatcaatgttgcagaatgaattcacgcgaacgcgcgagaacagaacggactgcaccaccaccgaaccggagatcacacagccgccggataccagtgagttaagggtcatcccgtggctaccggagcgatcctgcacgaatttcgctggcggtaatgattcattgtaggtgcgaattggccaattgcgatcgtacatatccagttccggcaccacagaggccagatcgaggttcgctttccagtaagcttccagcgtacccacatcgcgccagtacggctcggcatccgggtcggattgtacgcaagagagcgggaacgggtgcgcataggccagaccggcttcggtgatcttgggaatcaaatctttgccaaagtcatggctggagttctcatcacgatcgtcttcttccagcagttcatacagatagtcggcgtcaaagacgtagatacccatactcgccagagatttgctcggatcgttcggcattgacggtgggttagcaggtttttcaacgaattcgataattttatcgttctcatcaaccgccataacgccaaatgcggaggcttcttcaatcggtactggcatacaagcaacggtgcaacgtgcgcctttttcgacgtgatcgataagcatacgcgagtagtcttgcttgtagatatggtcgcccgccaggatcaccacgtattccgctttataacggcggataatgtcgaggttttgggtgaccgcatctgcggtgccgcgataccagttttcccctttcattctctgctgtgctggcagcagatcgacaaactcgttcatttcttcattgaagaatgaccagccgcgctgaatgtgctgcaccagagtgtgggactggtactgggtgatcacgcccatacgacggatcccggagttgatgcagttagacagcgcaaagtcgataatgcggaacttaccgccgaagtgtacggccggttttgctcgcttattggttaaatccttcaggcgggtaccacgtcctcccgccagtatcagggcaacagatttcaatggcagctggcgcgccaacattaagtgatcgttcttctctaaactaaccatgactaactccttttttatcatctctggaacacacacaatccgtgtgcaggtccctgccagacagccgtaatcactgggttatcctctccagcgaatgggggaatggcgtgccactccccagcaggtaaaacaatctctgttacctcaagcgtggcgttaattgcgatcaaaaagcgatccgagagcagaatttgcagctgtttcggcccgttttgccactcatccgtgcttaaaggttgagcatatcgatttagccaacggacattgccgtcgccttcttcccaccagcgattctccaccaaagcgggaatgcgcttgcgcagatggattaacgcggcggtaaatgcggttaaaccactgcttgcctgcgaccagtccaaccaggttaattggttatcctgacagtaggcattgttattgccatgctggctgtgaccatgttcgtcaccggccagtaacatcggcgtaccctgggagagcaacaacgttgttaacagggcgtgaatgctgtcgcgccgccgttcaaccaggtcaagagaaccgcctaacccttctttaccatgattgttactgtaattgttgttggtcccgtcgcgattttcttctccgtttgcttcattgtgtttatggttgaagcaaacgcagtcgcgaagcgtaaaaccgtcatgcgcggtgacgagattaatcgcggcactcggcagacgaccattacgtttaaaaacatcgctggaggcagcaaaacgcccggcaaacgcccccagaggcaaatcataatgtagccagaaacgacgggcagcatcgcggaaatgatcgttccactcggcaaacagcggcgggaaatttcccacctgataaccaccaggagcgatatcccacggttcagcaattaacttcacctgcgagagcaccgggcagttctggatagcggtaaacaacggcgcatcctgacggaactctggcgtacggcccatgactgccgccagatcaaagcggaaaccatcgacgtggcaggtttctacccaataacgcaggcaggcgctggcataatccaccaccgccggatgactcaaattgagcgtgttgccgcaaccggtccagttgtgataatcgccgtcttctcttatccaataatagctacggttatcgatcccacgcagcgagaataacgggccgtcgaggtccagttccgcactatggttgagcacgatatcaagaatgacttcgatacccgctttatgcagtgctttgattgcatcgcgaaactcatccagcgccgtttctggcgagcaggcatacgccggatgcagcgcaaacatcgccaccgggttgtaaccccagtagttacttagccccatgcgttgcagacgtggttcactggcaaactgcgccactggcagcagttccagcgcggtaatgcccaattgtttcaaatagttgatcatcaccggatgcccgagggctttataagtgccacggatctcgaccgggatctccgggtgcaagtacgttaatcctttgacatgggcttcataaatgatggtgctgccccacggcgtgcgcggcggggcatcatcttcccagtcatagtgatcaaccaccactacgcatttcggcgcaatggcggcgttgtcgcgatagtcaggttcattatgaccggcgtgcagcagcgggttatctttaaactccccctcaatttgccgcgcgcaaggatcaatcaacaacttcgccgggttaaagcgatgcccctcggcgggttgccaggggccatgaacgcgataaccataacgcaaacccgggcgcgcatccggcagataaccgtgccaaatgtcgccactgtgccctggcaagtcatagcgatgttcctggccattggcgtcaaagacacacagttctacccgctcggcatgagcggagaaaagtgtgaagttgacgccctgaccgtcgtaatgcgcgccgaggggagcgggtttgccaatggcgagttgtgtcattctgcctcccgaaccagccagatagtggccagcggtggtagcgtcaggcttagtgaatgctgacgaccgtggctggcaatctcatcgctgtgtaccgtgccgccattgcctgcattactgccgtgatagtgcatggaatcggtattgaggatttcacgccatttgcccggctggtttatgccgaagcgataatcatgacgcggcaccggcgtaaagttactggcaacgatgatttcgttaccctctttatcgcgacgcacaaagatcagcaccgagcgttctttgtcatccaccaccagccattcaaagccgtacgggtcaaaatccagttcatgcattgctttatggtggcggtaggtgaggttcagatcgcgcaccagacgctggacaccgtggtgccagttatcgccgccttccaacagatgccagtcgaggctggcgtcatggttccactcgcggccctgggcaaattcgttacccatgaacagtagtttcttgcccgggaatgcccacatccagccatagtaggcgcgcaggttcgcgaatttctgccatgcgtcgcccggcatgcggtcgagaatcgattttttaccgtggaccacttcatcatgcgacaacggcaggacgaagttttcagtgtagttgtagagaatcccgaaggtcagtttatcgtgatgatactgacgataaaccgggtcgagcttcatgtagtccagggtgtcatgcatccagccgaggttccacttgtaccagaagcccagaccgcccatatcctgcggacgagaaacgccagggaaatcggtagactcctcagccattgtcaccgcaccggaaacctgctcaccaagaatacggttggtattacgcaagaattcaatcgcttcaagattctcgcgcccgccaaattcgttcgggatccactccccctctttacggctgtagtcgcgataaatcattgacgccaccgcatcgacgcgcagcgcatcaataccaaaacgttcaatccagtaaagcgcgttaccgacgaggaagttactgacttcacggcgaccatagttgtagatcagcgtgttccagtcctgatgatagccttcacgcggatcgctgtgttcatacaagttcgtgccatcaaattcggcaagcgcaaagtcatcagtcgggaagtggcctggcacccagtcgagaatcacgttcagaccagctgcgtgtgcggcatcaatgaaataacggaagtcgtcgcgagtaccaaaacggcgggttggtgcatacaggccggttggctgataaccccaactgccatcgaagggatgctcgttaatgggcagtagttcgaggtgggtaaagcccatccatttagcataaggcaccagttgatcggccagctcgcggtagctcaaccagaaattgttgtcggtgtggcgacgccaggaacccaggtgaacttcataaatagagattggcgcatcaaactgattcgcttttttgcgctcttcagtctgtacaaccttttccggcagcccgcaaataagagacgcggtttccgggcgcatttgcgcttcgaaggcataagggtcggacttcaaacgcaagttgccattggcatcaatcatctcgtatttatagagctgaccgttatgcgccccagggataaacagttcccagatgccgctctctttacgcaggcgcatcgggtgacggcgaccgtcccagtagttgaattgcccaaccaccgagacccgacgggcgtttggagcccagacagagaaacgcgtacctgtgacgccatccatagtatctgcatgcgcgcctaaggtttcatacgggcgcaggtgagtaccttcagataatagccaggcatccatttcctggattagcggaccaaaacggtaaggatcatcaatcaggttttgctgaccatgccagacaacagccaactgatagcggaaaaaattcttacgtcgcggaatgacgccgctaaagaatccccgtgagtcgagacactccagttttgcgagtttgcgcccggttttcggttcaatcacccacacatcggtagcgtcgggtaaaagggcacggacttccagtcccgcggtggttttatgcattcccagtacggaaaaaggatccgcaaaatggcctgcaattagcgcgttaatcacgtctctatcgatacgatcggacatgcttgtcttcctgttttattgtgtcaccccatccaattggatttttgacttctggttgtgacatttttttgacctgaacggcgcagcactctgtgcatcctctctgcgtcgtcctcacttcaggtaaggctgtgaatactcatgtattcagccacccttaaagaatagccaatgctctatttaactcccggtaaatcatgaaacatctgcgcttactcctgtattacgcactaacaggggcggcatcgcgccccagatttaatgaataaagattacgccagttgacgaagcatccgacgcagcggctccgcggccccccacagcagctggtcgcccacggtaaaggctgacaggaactctggtcccatattcagcttacgcaggcggcctaccggcgtggtcagcgtgccggtaacggcagctggggttagctcacgcatagtgatttcccgatcgttcggaacgactttcgcccacggattgtgcgcagccagcagttcttccacggtcggaatagacacatcttttttcaatttaatagtgaatgcctggctgtggcagcgcaatgccccgacacgcacacataaaccatctaccggaattacggaagatgtgttgaggatcttgttggtttccgcctgccctttccactcttcgcggctctgaccgttatcgagctgtttgtcgatccacggaatcaggctacccgccagcggcacgccaaagttatccaccggcagctcaccgctacgggttaaggttgtgactttgcgttcgatatcgagaatagcagaggacggggtcgcgagttcatctgccacatggccatacagatggcccatctgggttaataactcacgcatatgtcgcgcaccaccgccggaagcggcctggtaggttgcaacggacacccaatcaacaagatcattggcgaataaaccacccaacgacatcaacatcaggcttacggtacagttaccgccaacaaaagtcctgatgccattatttaatccgtcggtaatgacgtcctgattgacggggtcaagaatgatgatggcgtcatctttcatgcgcagagacgatgctgcgtcaatccagtaaccttgccatccgctttcacgaagctttggatagatttcgttggtataatcgccgccctgacaggtcacaatgatatcgagggcctttagcgcctccagatcaaaggcatcctgaagtgtgccagtggttccgccaaaagacggcgcagcctggccaagctgagaagtagaaaagaagacagggcgaatggcgtcgaagtcgcgctcttcaaccatgcgttgcatgagaacggagccgaccataccgcgccagccgataaaaccaacatttttcataagcgtttttttcctgcaaagatgtgtgctgtataaatgtgccggtctcctcttggcacatctttcaccatacaaaaagcagccaaagtcgcaagtgaaattaatcaatgatagcgaagccatcagtaatgcgacttatcctgctttgttagcacgcagaaagtccgcggcaattatcagggaatttgagttatgaatgaaatcatttctgcagcagttttattgatcctgattatggatccgctcggaaacctacctattttcatgtccgtactgaaacatactgaaccgaaaagacggcgggcaatcatggtgcgagagttgcttattgctctcctggtgatgctggtgttcctgtttgcgggtgagaaaattctggcatttctcagcctgcgagcagaaaccgtctccatttctggcggcatcattctgtttctaattgccattaagatgattttccccagcgcttcaggaaatagcagcgggcttccggcaggtgaagagccatttatcgtgccgttggcaattccgttagtcgccgggccgactattctcgccacgctgatgttgttgtctcatcagtacccgaatcagatggggcatctggtgattgctctgctgctggcctggggcggcacctttgtcatcctgctacagtcttcgctatttttacgtctgctgggcgagaaaggggtgaacgcacttgaacgcctgatgggattgattctggtgatgatggcaacccagatgttcctcgacggcattcgaatgtggatgaaggggtaacgaggagagtttttcgaaaagaacccggtagcgtcacaactaccgggcgaacaaacttaactcaacagctggaacgcaatcatcccaacgatggcaccgacagtgccgaggatggtttccatcatggtccaggttttcagcgtttcggcttcggtcgcgccggtaaatttaccgaacaaccagaaaccggcgtcgttaacgtggctgacaacaatcgaaccaccagcgatacaaatcgacagcgccgccatttgcgcaccggagtagttcagttgttcaataaccggcatcaccagtcctaccgccgttaaacaggctacggtggcagaaccctgaatgatgcgcactgcagctgccagcacgaagcaggtgatagcaatcggcaggcccatgccggttaacgcttcgcccagtgccggacctacgccagagtcaaccagcacctgtttgaacacgccgcctgcaccaatcaccagcagaatgatccccgccggttgcagcgcgtgaccgcaaatctccatcactttgtcttttggcatgccctgacgcattgccaggccataaatcgctaccagacaagcaaccagaatcgcggtaaacggatgaccaataaactcgaaccattcgtaagcggtagagccttctggcacaaaacgcgcggcaatggttttcagccccaccagcaccagcggcaacaggatcagcgacaggctgaatccgaaagatggcattttgccttcgccgagatgcggttcgctgatgtcgtcaggaatatgcaactccacgtagcggctgatgaaattaccccacagcggcccggcaataatcattcccggaattgccgcacacaggccaatcaggatcatccagccaaaatcggcgttcatctgcgatgccagcagcattggcgctggccctggcaccaggaacgccgccgctgccgccacgcctgcgaataatgggattaccagcttcaccaggttcgtaccggtgtggcgcgccattgagaaagcaacgctaatcagcagaactatcgccacttcaaagaacagcggtagcgcacagaccaaccccgcaaggccgatggcaaaatgcgcgcggctgtgaccgaaggatttgagcattttgacggcaatctgatcgactgcgccggtttcatgtaagatcttgccaaacatagctcccagggcgacaaccaccgccaggaagccgagggtgcctcccatccctttttccatcgtcgctgcgattttatcgagcggcataccggaaaaaaggccagcccccatggacaccaccatcaaagccaggaaagcgtgcatacgcgccttcatgactaaaaacagcagcagtaaaacagaccctactgctgttaaaacaagcgttaatgtagtcactacttatttgccttttttaataacctcaatggtgcttgccacaacaccttccagcggttgatcgatatccaccaccagtacatcggtttcgtccgcacccggctcctgcagcgtttcaaactgcgtcaccaacatttgggttttaaagaaatggcctttgcgcgctttcaagcgactttcaatcacatcaaaatcgcctttcaggtagatgaaagagagattcggattaccttcacgcagcaagtcgcgatagtgctttttcagtgcagaacagacgatcagcgacactttattggtgcgctgcatagcaaacgcggcgtcgttcagcgcctgcagccacggtttgcgatcgtcatcattcagcggttcgccagacgccattttttcgatattgcgccgtggatggaggaaatcgccatcaagaaacgcggcatgaagttgatgcgccacttcactggcgaccgcagatttgccgctgcccgatacgcccatcaagacgtaaatgtggtgatcatggttagtcgtgctcaaagtggtgcccccacaatacaagaattaaaaatgttacgggtaactgttatcggtaacattgtccagccggacaatatcagaagcaatatccatccgtgccttaagtgtataagtgtgagccacttcaaatttgtgggcttaaatagatccgcccggtgacaaggtgaaacctaaatctaacattttcggtgtcacagattcgccacgaatacgcgccagcaggcgttcagcgccaatactgcccatccgctcacgcggcgtcagcacgctcgccagtcgtggctccatcacctgaccaatgtcatgaccgtggaaaccggcaatcgccatatcgtcaggaacttttaaccccagacgctgacattcaaacgccgcgccgaccgccagatcatcattagtacagaacacgccatccagctgcggatattcccgccgcgcctggcgaatcagttcaataccggaagagtaagaagaagattgctcaaccatcacgctatacggcaccaggcctgcatccagcatcgcctgttcgtatcccttctgtttgatgatagtacgttcgtcgagacgtgcgccgagataggcaatgtggcgatgcccgcgcgcaataatggcggtagtcatctggcgtgccgcttcaaagttatcaaaaccgacggcgatatcgaggcacggcgactggctgtccatcaactccaccaccgggatccccgccacttcaatcatctttaaggtgcgcggcgtgtgggtacgttcggtgaggatcaggccgtcgatattccaggacagcatggattcgagacgttcttgctccatttccggtttataaccgtagtgcgccagcatcgtctgataaccgtgcgcgtcggtgacgctttcgattccgcgtaatacttccgcgaaaacctggttggtgagagaaggtaacaggacgccaatcgcccggctggtagcgttagagaggatatcgggcgcacgattgggaatatagcccagttcatcaagagcggcggcaatcttgccgcgtagagcgacggaaacctgctccgggttgcgtaaaaaacggctgaccgtcattttggtcacgcctacacggtcagccacatcctgaagtacgggtcttttctttttcatcgtcctgaaggtacaaaagagatagattctcttagtttaacacggacgcatcagaaccttcccggggaaaacagtgcttgtttacaattattagatatacactaaatcaattgcatcgcattgtgctaacgacgcggcaaaaccccggaagcgtgcatcagcacgcgaccggagcgagcgaggaagcctgcaaaaaggcaggcttcaaagatgccgttgagttttaaaccggcggcagatcgaacagtaacacttcgctgtcgctatccgcatggatggagattgcctgctcatcccagattgccagaccatcgctggtcgaggctttcacgccgttaatggtgacattgcctttcaccacctggatccagacgcggcgttcagcggcaatctgatgcaccgactgctcatctttcagcaacgcccaacgatacagttccatatcctgatgcactttcagcgaaccatctcgcgcatccggcgagagcaccagctgtttgccctgcacggcatcgaagcgacgctgttcataacgcggcgtaatgccattttcttcaggcatgatccagatctgatacagatgcagacgctcggtgctgtttgggttgtactctgagtgacgaatacccgtacccgcactcataatctggaactcacccgccggaacctgctctttattgcccatgctgtcctgatgctcaacagtaccttccagcacgtaggtcaaaatttccatatctttatgcgggtgagtgccgaagccctgccctgcttcaatcacgtcgtcgttaatcacgcgcagcgcggagaagcccataaagttcggatcgtaatagttggcaaaagagaaagtatgccaggagtccagccagccatgatttgcatgaccacgttcatttgctttgcggaagtagatcatttgtattcgccccctgaatgatttcgatgggcttagtgtggacccgatctgcctgggatgatagagggtgaaaattgacccctctgttcaaaaaaattgaactattcgaggggccagcaaacttacttagcgagagttactgtggagggagaggcttgctcaaatccgcgttcaaggatttccagattggtaagaacttcagattccttgacgtaatttggcgcaccgtgggtgatggtttgatacaacgcatcataaacgcgcccgtaatcgcccatctccggcttcatctcttctctgaccgtcacgccctcgtcattgacatactccagcacaccgaccgaatcatccgctgcgaatcccggttcgcccggcataatattagccttcaggctggtttcctgctggtcgataccgtatttaataaacgaacctttcttaccgtgaacgataaatttcggataatcgattttcaccagatggctggttttgacgatggctttcaggtcgccataaaacagttgcgcttcaaaggtgtcgtcaggattggctttattacgcaggctgcggatgtcataagcgacgtgatccgggcgaccgaacagagaaataatctggtccatcgtatgcacaccaaggccataaaacgcgccatcctgcggcagcccaggtttggtttctgccaccgggcggtaatagtcaaaatggctttccacttcaacaatctctcccaacttgccactttcaatcgcttttttcgctgtcaggaagcaggagtcaaagcgacgattctgatacggcgtgacggtcagccctttgcttttcgccaacgcaaacagctccttcgcctgggcaagcgtcggggtgaacggtttttcgaccagcacatttttcccggcttccagcgcgcgtttcgcgtactcgaaatggctgtccgcgtgggtgcagacaacaaccagcttaacatcgggatcgtttagtacttcgtcgagatcgctggtcaaatggatatgggaataaatgggagcctgttcttccggcttcgcatggcgacgaaaaatatgcgcgacatgccagctatccttgcggttaagtacatacggcagatggtaacgggtggtgcttttgccgaagccaataaaggcgcagttgatgaccatgatttcgtcctttttaaggtggttatttacaccttagcgcaaagcggacgtggttcctactggagtgcgcataacgaacacaagcactcccgtggataaattgagaaagaaagatcaaaaaaaaagccagcacccggctggctaagtaatactggaagcaatgtgagcaatgtcgtgctttcaggttctccgcgagggtcttcctgatcgcgagacaataataatcattctcattcgcacttgtccaacactttttgcaaaaaaatgcatttgactcgtatttgaaagtcaatgatgttgaaagggacatttaccccaaagaggacaaaggaatgagtgagatagtaatacgccacgcagaaacacgggattacgaggccatcaggcagattcacgcccagccggaggtgtattacaacacgctacaggtgcctcatccttccgatcatatgtggcaggagcgactcgctgctcatcccggcatcaaacagttagttgcctgtattgatggaaccgtcgtgggtcacctcaccattgacgtgcaacagcgcccacgccgcagtcatgttgccgattttggtatctgtgtcgactctcgttggaagaaccgcggcgtcgccagcgccctgatgcgagagatgattgaaatgtgcgacaactggttacgggtagatcgcattgaactaaccgtgtttgtcgataacgccccggcaattaaggtctataaaaaatacggctttgaaattgaagggactggtaagaagtacgcattgcgtaatggtgaatatgtcgatgcgtattatatggcgcgggtgaagtgaaaacacttaacttattgtaaatacgaatatttgatgaaggctttgttggatatgttgnnnnnnnnnncacgacttaactaccccgtcgaaaaattcataataattatgatgatatatcaggaagcattcgcgaaagcgaaccattaccttgatgatgcagatctccctgtcgtcatcactctgcatggacggtttagccagggctggtatttctgtttcgaatcacaagaatttcttgaatctggtgatgaggccgcgcgtttagccggtaacgcaccttttattattgataaagacagtggtgaaattcattctctgggaacggcaaagccgctggaagaatatctacatgattatgaaataaaaaaagctaccttcggcttgccctgacaatacggccctcttcccacgaagagggccgctaaccttaataccccgccgttaaatcatccaccgagcgcgggtcggatgcaccgtacaactcaccgtccggcccaaccataatgctttgtgtactacccatcgcctctttcagcgccactttctgaccttttgcttccagcagcttgagcgtatccgggctaaaccctttttcgacacgcagctcgtccggcaaccactgatggtggaaacgcggcgcattggtcgcttcggcgacgttcatgccataatcgatgctattcaccaccatttgcagcactgtagtgatgatccggctcccgccagggctaccggtgaccagccaggttttaccgtctttcaccacaatcgttggtgacattgacgacagcggacgtttattcggcccgacggcgttggcatcaccgcccaccagcccgtaaacgttcggcacgcccggtttagcggagaaatcatccatctgattattaagcagaataccgctctcgcccgcgacaatacccgtaccgaaggtggtgttcagcgtataggtcaccgccaccgcgttaccgtctttatccaccactgagtaatgggtagtttgattactctcataaggcgcaagcttgccagggcgaatctcactggacggcttcgctttattgatatcgatttgatcggcaatagatttggcataggctttattggtcaacgcctgccacgggactttcacaaaatccgggtcgccaagatattccgagcggtcagcgtaggcatatttctccgcttctgccatgatttgcatcgcatcggcgctgccaaagccgtatttcttcatatcgaagttttccaaaatattgaggatttgtacgatatggatcccgccggaagatggcggtggcatggagtaaacctgatacccgcgataatcgccgcttatcggtgtgcgttcgaccgctttatacgccgctaaatcttctttggtgatcaagccaccgtttttctgcatctcctgggcaatctgttccgctatcgtgcctttgtagaattcgtccgggccgttttcggcaatcatctccaggctctttgccaggttcgcctgcaccagcttgtcgccctttttcagcggttcgccctctttccagaagatagctttgctgttttcgtgattcggcaacacttcgctaccgtaggttttgagatcgtcagccagcgcgtcgttaacgataaaaccatcgcgtgcaagtttaaaagcgggctgcacgactttattcagcggcatggtgccgtatttatccaacgccagcgagaaacctgctaccgtaccgggcgtgccagaggccagatgcgaagtgagtgattttttgctgtccgggttgccttgatcatcaaggaacatatcgcgggtcgctttagcgggtgccatctcacggaaatcaatagcagtggtgttgccatctttagtgcggatcagcataaaaccaccgccgcccagattccccgcctgcggatgcgttaccgccagcgcgtagcccaccgccacggcagcatcaacggcattcccgccctccttgaggatatccacccccacctgagtggcagtagcatctacagacgccaccatcccctgtttcgcgcgtactggatgaaagacatcttcctccacgccataagaaacaggaggcgcggcggcggcgctaaaacaacttcctgagagcagagcagcaatggccacccggcgtaaaaacgtcggttttatcatcgttattctccagttatgtgtggggcaaccccagctaagcctggtatataactctgaattaatcatcgttttgccgggaagcgagtaaacttaaagaatatcttcagaggaggatacgcgatgaaacgacttctgattcttacggcactcctgccgtttgtcggctttgcacagcccattaatactctgaataaccctaaccagccggggtatcagatccccagtcagcagcggatgcaaacccaaatgcaaacgcagcaaatccagcaaaaagggatgctgaatcagcaactgaaaacgcaaactcagttgcaacagcagcatttagaaaaccagataaacaataattctcagcgggtgttgcagtcacagccgggggagcgaaatcccgcccggcagcaaatgctgcccaacaccaacggcgggatgttaaacagcaaccgtaatccggatagttcgttgaatcagcagcatatgctgccggagaggagaaacggcgacatgctgaatcagcccagcacgccgcagcctgacattccgttgaaaactattgggccgtaaagttcggaccaattacatcaatcgcatcggtacagatgcaatccacgccccagcgcagcaactctgccgcgcgctggggtttgttgacggtatacaccagaatccgcagtccggcgtctttcaactgcatcactcgcgctttatcgagcaacttatgattgagatgaagagagacgcagcccagccgcatggtcagttcgcgccagtcgtcgcgccactcatccagcaataaaccacgcggcagttccggtgccgccaattgtgcggcttctaaagcatcaatctcaaacgatgacagcagcggcggcgtcataccggcccacagttggcgtgccgccagcgccaccattttgcccgttaatggtccagtgccagtggtgggtttgatttcgatattcgccatcatcccgtgttcgcgacagcgttccgccacctgcgaaagcaacggcagcggctcacctttaaacgctttgctgtaccaactgcccgcatccacgcgcagtaaatcctgccagttcagttcacccgcgacgccccagccgttgctggtgcgttcgagattgtcgtcatggagcaggaagatctcgccatctttcgataacttcgcgtcaaattcgatcatcttatgaccgtattttgccccgacgtcgattgccgccagggtgttttccggggccagcttaccgccgccacgatgagcgacgatgcggggataaggccagttactcatactcgttgtcctgtttcaccatcaaaaagatgcagctgattttccgccagatgcagccacagcgtgctgcctgccgtcgggcgctcctgatgcgccagtcgcaccaccagcttctgctcgccccagcgtccgtgcgccaggttatctgcgccgaggatctccagcgtgtccatcaccagcggcacaccaccttctgcctgcgagcttagcgctatatgttccgggcgaatgccgagagtcattttacgcccggcatactgacggtagccaccgtttagcggtagcacgataccgccgtccagttcgaaatgcgtgccttcattattcacgcggcctgtcagcaggttcatcgccgggctgccgataaaactcgccacaaacaggctggcgggcttttcgtagacttccaccggcgtgccaatctgttcggcaacgccgccgttcatcaccattactcgctgggcgagggtcatcgcttcaacctgatcgtgagtaacgtagagtgaagtcgttttcaggcgacggtgcagctgttgcagctcaaggcgcatctgcacgcgcagcttggcatcgaggttagagagcggctcatcaaacaggaacaccgccggatcgcgcacaatcgcgcgacccatcgccacacgctgacgctgaccgccggatagctcgcgcgggcggcgcttaagcaggccatccagctccagaatgcgcgccgcttctttaacgcgctcggctatttgctgcttgcccatgccgcgaattttcagcccccacgccatgttttcttcgacgctcatatgcggataaagcgcgtagttctggaacaccatcgcaatcccgcgatctttcggctccatttcggtcacgcgctggtcgttgatccagatatcgccttccgtcacccgctccagcccggcaaccatgcgcagcagcgtcgattttccgcagccagacggcccgaccatcacgataaattcgccatccgccacatcaagggtcagtggtttaatcacctgggttttgccatcccagcttttggttactgcctgtaatttcagtcctgccatcttatttctcactatcgaccaggccgcgcacgaaggcacgctgcatcactaaaacaatcaccaccggagggataagcgttaacaacatcgccgccattaccgagttccattccgtggtgccttcgccagtggcgatcatccctttgatccctgccacggtggtgccgagatcaacgtcggtaataatcaacaacggccacaaatactgattccagccgtagataaaggtgatcacaaacagcgccgccagattagttttggagagcggaaaaacgatgtcgcaaaagaagcgcattggcgatgcgccgtcgatccgcgcggcttccaccagctcatcnnnnnnnnnnaagaactggcggaacaggaaagtagcggtcgccgaggccatcagcggcagcgttaaaccggcgtagctgtcgagcatctgcaggttggcgatgacttccaccgtcgggaagatacgtacttcaaccggcagcatcagggtgataaaaatcatccagaagaagaggttacgtagcggaaaacgaaaccagacaatggcaaatgccgagagcatcgagacggtaattttgccgagcgtaatgctgaacgccatcacaaagctgttaagcaacatccgccagaacggcgcgctattcgtgcctaccccgtttacccagatgttgtggatgttttccagcagatgcgtgccggggattagcgtcatcggcgcggcgtagacggcctgtttatccagcgttgccgctacaaacgccacgtacagcgggaagaggatcaccgcgatcccgaggatcagcatggtatggctgaatatcgtcagccacggacggttctcaatcattggtaacgcaccttgctttcaacatagcggaactgcaccaccgtcagcacgatgacgaggaacatcaacaccaccgactgcgcggcagacgaagccagatccagtccggtaaagccttcgcggtagatcttataaatcagcgtcgtggtggcctgaaccggcccgccggacgtggcggcgtcgatcaccgggaaggtgtcgaagaaggcgtacaccaggttcaccaccagcaggaagaaactcaccggagcgataagcggcagagcaatcttaaagaagcggcgaatcggccctgcgccgtcaatagctgcggcttcgatcaacgaacggggaatggattgcagcgcggcatagaagaacagaaagttgtagctgatttgcttccacaccgaggcaaacaccaccagaaacatcgcctgaccgctgttttgcgcgtggttccagtcgtagccgaactcagcgagaaaatgggtgatcagcccgcgaccggggttaaacaggaagatccacaatacggcggcaacggcgggagccacggcatacggcagcagcattaaggtttgatagaaacggctgccgcgcacgatgtactccaccagcgccgcaaagaacagcgataccagcaaaccgctgacggtgacaaaggtgctgaattttatcgtcgtccagaaggagtcgatatagtagctgtcatgaaacagcgcgacgaagttatccaggccgacaaactggctggagaaaccaaatggatcgacgctttgtagcgagtaccacaacgcttcgcccgcaggccagataaaaaagataacggtgatgatgagctgcggcgcgaccagcagataaggcagccagcgcgagcggaacaccggacgggatgatgacattacggttaattcctgaactgtgccggatgcgcttcgcttatccggcctacacgcgatgccaggtcagataagcgaaacgcatccgacattacactgattaagacttcgtcgatttctcaaagcggcgcagtaactggttcccacgctcaacggcggtatccagtgcctgctgcggtgtcttcttaccggtccacacgctctccagctcttcatccacaatcacgcggatctgcggcatgttgcccagacgcagccctttggtgaacggcaacggcggcttgttcagcatctgacgtgtcgcggtatccgcccctgggtttttctcataaaagccctgctcacgggtcaggtcatacgccgctttggtaattggcagataaccggttttctgatgccactcagcagcgttttctggcttcgcgaggaaatcgaggaacttcgccacaccggtatacgtttctttatctttaccctgcatcacccacaggctggctccgccgataatggcgttttgtggcgcatctttcgcatcggcgtcgtaaggcatcatgcctacgccgtagttgaatttggcgtactcgcgaatgttggcaagagaaccggaagaggcggtggtcatcgcgcaatcaccgttatagaacttctcggtggattcatccttacgcccgacgtagctgaaatcgcccttcttgttcatctcttcgagcatggcgatgtgtttcacctgctccggcttgttgaactccagcaccgcgtccgtgccgtcaaagccgttgtttttgctggcaaacggcagaccgttccaggcgctaaagttttccagttggatccagccctgccagccgctggcgtagccgcacttcataccggaggctttcagttttgcggaatagtccgccagatcctgccaggttttcggcggctgttccgggtctaaccccgctttcttgaaggcgtctttgttgtaatagagaacgggagtcgagctgttgaatggctgggagagtaagtggcccgttttgctgtcggagtagtaaccggaaaccgtcggcacaaactgcgactcatcgaattgaatccccgcctctttaaacacgtcatacaccggtttaatggctttcgacgccatcatggtggcggtgccaacttcataaacctgcaaaatagccggtgcgttgccggtacgaaatgcggcaatccccgcgcttaaattctgttcgtagttgcctttataggtcggtacaattttgtaatccgggttttcggcgttaaaacgttgggccagagaatccacctctttacccagttccccttccatagaatgccagaacggaatggtcgtcactgcctgtgcattccccattaacgccagtccgagcgccagtgctgaagctgtataatgtaacggtttcatcgtttatctctcttgttgtaccgaatgcgcgaattcacgcgttttatgctcgcggggtaacatgacatgctcgaattacagaaaaataacttttttgttacatttgtaagatagtaaggtgtcagaaagatgacaaggcggtgacggcgtgggtgagggaaaatgggagatggggcacggataagcggaaaaatagagggtctgaatcaaactctacagattactcatcgtttcatgccggatgcggcgtaaacgccttatccggcctacaagatcgtgcaaattcaatatattgcaacccacccagtaggcctgataagcgcagcgcatcaggcaattttacatttgtcacctgtctcaaagaagtcttttgactccttatcaatcaacgtgttattacccgcctaaatacgcacttctcaccgcttcgttcgccagtagtgcatcaccagtatcggagagcaccacatggccgttttccagcacgtagccgcgatccgccagctttagcgcctggttggcgttctgctcgacgaggaagatagtcatcccctgctcgcgcagctgctcgatggtgtcgaaaatttgctggatgataatcggcgcaagaccgagcgatggctcatcaagtagcagcaaacgcgggttgctcatcagcgcgcgaccaatcgccagcatctgctgttcaccgccggacatggtgcccgcccgttgaacacggcgctcatggagacgtggaaacagctcatacacccactttatgcgctcctgaaactgatcacgttcggcaaaaaagccgcccatcgccaggttctcttccaccgtcatccgcgagaagacgnnnnnnnnnnttccgggacaatcgctaccgcttcgcgcatgattttcgccgtttgccagtcggtaatgtctttatcatcaaacacaattcgcccgctggtggcacgcggatcgccgcataacgtgccgagcaaggtggttttccccgccccgttcgcgccaatgagggtgacaatctcgccctgattgatatgcaggctcacctcatgcagcgcctggattttgccgtagtgggcgctgactttgtcaaaggacaacatgactttttccatcttatgcctcacctaaataggcacggatcacgtccgggttattacggatttgctccggcgtaccgtttgccagtggcgtcccctgattgaccacgtaaattcggtccgaaattcccatcaccagcttcatatcgtgttcaatcaacaagatagtggtgttgtgatgattgcgcagttcggcaatcagctcatccagctctttcgtctctttcgggttaagacctgccgccggttcgtcgagcattaaaatctccggctgcgtcaccatgcagcgggcaatctccagacggcgttggtcaccataggccaggttactcgcctgacggttggcgtgttccagcaaaccaatgcgctcaagccaggtggcggcgcggtcgagcgcttcgctctgggcgcgacggaaagatggcgttttcaacaggccagagaacagcccggttttcagttgctgatgctgcgccaccagcaggttttcaattaccgtcatttcacggaacagacgcacatgctggaaggtacgcaccacgcccatgcgggcaatttgctgccccggtaaaccttccagatgctgatcacgcagtaaaatagtgccgccggtgggtttgtagaatccggtcaggcagttaaaaaccgtggtttttccggcaccgttagggccgattaacgagacgatctcctgcgggtacagttcaagattgacgttgttcaccgccagcaagccgccgaagcgcatcatcagaccgttaacagataataatggctgactcatgcctgctctcctttcgctgcgccgtttttcagcttcagttgcgggcgcgtcatgggcagcaagccctgcggacgccagatcatcatcagcaccatcaaaccaccgagcattaacatgctgtattcgttgaaatcacgcatcaactcgcgcgacaccaccagcaaaattgccgccagaatcaccgcaaattgcgagcccataccgccgagcaccactatcgccagcacaaacgccgattcggcaaaggtgaaggattccgggctgacaaagccctgacgcgcagcaaacagcgttccggcaaaaccggcaaacgcggcactgatggtaaaagcggtcagcttgatacgacgcgggcttaaacccagcgaacggcaggcgatctcgtcttcacgcaacgcttcccacgcacgccccagcggcatccgcagcaggcggttaatgacaaacagacttaataccaccagcagcaacgccaccaggtagaggaagatgacacgatcggagggatcgtatttcaggccaaagaaattactgaacgtgtcccagccgccttcacgagcggtacggtttaactcgagtccgaagagtgtcggtttcgggatctgactgattccgttcgggccgccggtaatttcggtattattgagcaacaatatgcgcacaatttcgccgaaaccgagggtaacgatcgccagatagtcaccgcgcaagcgaagcaccggaaagccgagcaggaagcccgccgccgcggccattaacccggcaatcggcagacaggtccagaagcccaggccgtaatagtgattgagcagcgcaaaagtgtaagcgccgatggcgtaaaagccgccgtaccccagcaccagcagaccagaaagaccaacaaccacattcagcccgagaccgaggataatgtagatcatggtcagagtggcgatatccaccgtcccacgtgacaccataaacggccacgccaccgcaagcaccagcagcgccacgaggaacagtttctgcttcaccgtggagccatcaatcgcgggcagaataaacttcggtccggaaacacttttcaaccctttctggaaagcaggtcgcaaaagctgaaagaaaaagaccaccgccgtgccgataaacacccactgccaacggatgtctgaagccgtgtcgaccaccagtttggtgccatccagctccagttgcacgcccataaagacgcccgccaggacaaaaaacatcgcggcagagagcagcgccattgcaatatgcatcggtttcatactttctctacctccgggcgacccagaataccggtcggcatcaccagcagcaccagaatcagcagggcgaatgagaccacatctttatattccgtactcagataggcagaagagagcgcctccgcaatccccagaatcagcccgccaatcatcgctcccggaatgctgccaatcccaccgagcaccgcagcggtaaaggctttcatcccggccataaagccgatgtaggggttaattacgccgtagaactgaccgagcagcacacctgccaccgccgccatcgccgcgccaatcacaaaggtcagcgcaatcacccggtcggtgttaatgccaagcaggctcgccattttcaggtcttccgcgcaggcacgacacgcgcgccccatacgggaatagcgaatgaaaaccgtcagcgccagcatggcgaggaaggtgacaatccagatcaccgcctgcatggtggtaatagaggcagagaagttttcgctatgccccaccacccactgaccgttaaacagactgggcagcgccacgtcacgcgaaccttcagtcaggctaacgtagttttgcaggaagatggacatgccgattgccgagatgagcgcaatcaggcgcttagagttacgcaccgggcgataggctacccgttcgatactccagccgtaggcgctggcgatgacgattgcgccgacgaatcccgccgccaccagcagccagccggtatcaatgcccatcatcatcagcgcggcgatgatcataaatgagacatagctgccgatcatataaacctcgccgtgggcgaagttgatcatgccgataatgccgtaaaccatggtgtagccgatggcaatcagcgcgtaggtactgcccagcgtgacgccgttaaacatctgctgcaagaaatataaaaactgctcagacataaggtaacctttctaaacccgcccgtttttcacgggcggtgggatgatcacttggctgccgtggatgaaccgtcggcgtgccactggaagacaccaaaatcaaatcccttaagatcgcctttttcatcccagttcagcggcccaatcacggtgtttgcaccgttagcttttaaatctttcaccagcgccagcggctcatcgctgccagtacgctcaagggcagtcgccagagattgcaccgccgcgtaggtgatccagacataaggcccggacggatctttcttgtctgctttcagcgcatcaacgatgccctggtttgccggatcctggtcatagcgttttggcatagtgaccaacatgccttcggcagcatcgccagcaatattcgacaatgatgcgttacccacaccttccggccccataaactgagttttcaggccaacggaacgggcctggcgcagcatctgccccatttccgggtagtaaccgccgtagtaaacgaagtcgatgttttcttttttcaggcgggcgatcagcgcggagaaatctttctccccggcggtaataccgtcgaagaagacgacgttggcgttagccgctttcagcccgtcctgcaccgaacgcgccagcccttcgccatactgttgtttgtcgtgaatgatggcgatgcgctggggcttcaccgtctcaagaatgtattttgccgccgtaggcccctgggaagagtccagcccggcagtacgcataatgtgttgataaccgcgttgggtcagctccgggttggtcgctcccggcgagatcatcagaataccttcgtcttcgtagatatctgacgcaggttgggtagaagaagaacacagatgaccaataacgtatttaatgccgtcgttaacgattttgttggcgaccgcaacggcttgtttcgggtcgcaggcgtcgtcatattccacgcccaccagcttatcgcctttaattccccctttggcattaatgtctttaatcgcctgacgcgcgccgttaaattccatatcgccccactgggcaatcgggccggacatcgcgccgacaacggcaactttaatatcgtcagccatagcggtgtgtgaaattgccagtgcaatcatccctgcgatgatagttttcgcattccgtttcatagtcaaaaatccccattcgtgatgttgtgttgctttgtttttatgtgttaacaaatcagactgttctttttttatactgcactgtttttgcctgtctgattaagggtttagcgcagtattttgtgataatagcgattaaaatccctatttttcagtcgattaagaacagataatattctgaatttattgatagataaacagaaaaaagcgccgttgtcagcataaaataacggtacaaagagcggaataattcactaccattcaggggattatgctgggtatttttcattctctaatgttttaactttgtaattattgctgttaaaaaattaatcacctgccaaaagaaataaaaaagagaaagcctccgattaaattatttcgctacactggttccacttttgtgatttacacgggttccccatgaagctgaccatcattcgattagaaaactttagcgaccaggaccggattgacctgcaaaagatctggccggagtattccccttcctctttacaggttgacgataaccaccgtatctacgccgcgcgttttaacgagcgcctgctagcggccgtgcgggtgaccttaagcggcaccgagggagcactggattccctgtgcgtgcgggaagtcacccgccgtcgcggtgtggggcaatatctgctggaagaggttttgcgtaacaatcctggcgtttcatgctggtggatggcggatgcaggcgtggaagatcgcggtgtgatgacggcgtttatgcaggcactgggatttacggcgcaacagggcggctgggagaagcgttaatcgctctgtgtgaaaagcagttcgatggatttggttgggaaaaataacgcattttcgttttctccgaccaacgggataaagcccagcgattgataaaacgtatgggcttttttattcagcgcctcgacaaaaagaccgtgaatacctaccgctaaagaggctgaccagacgactttcatggcatgagcaaccagtgttgctccccatccctgcccctgtaatgaacgatcaattgccagacgcccaagagtaacgctgggaatatttttgtagggaatttttttctgtttcgatttcgagggcaatgcggctcgttcaaaacaactgccgcataatgtgtaatatcccagcacctgacgttctggagtgttgcgacaaaggatatacgctcgcagaattttgttgcgatgttgacgaacgagatgtgtcgtcagaaagagatttaacgcttcctcgccgcagtcgaatcgctgtagatcataatctgcatcatcggtcagaatctctatcgtcagatcatccataaattattacattccctgaagacgttttgccgcacgttttagcttttcaccaggtgacggtggattactcagcgcatccatcacccgcgtccaggattcctcattgaggatcacccgccgatgctgttcaatcacttccgcagcccgctgcgaagcgctgttcaacataaattggctgacggactgattagatatcgctgccgcttcctcaatcatacttttgtcatcgtcagttaaacgcagatcgatacgctgctttttaacagcagacatgtgaactctcctgctccgtataatatgtacggtatgtcaccgtacattaagcatatcctggattgtttaatctttctacaaccatttcgacaaacacaaaaaaacccgatggcagttcagcgcatcgggcattttcatttatctatctgttacttcgcatcggttgccgtgccgttggcgtgccagtcaaatacgccgaactcaaagcctttcagatcgcctttctcatcccacgtcagcggccccatcacggtatcaaccgagttcgctttcaggtatttggcgatttcagccggatcgtcagactgattcaggcccgcctgcaaagattgcagcgcggcgtaggtggtccagacgaacgcgccgcttgggtcctgttttttcgctttgatcgcgtcaacaatgggtttgttcgccggaacctgatcgtagttcttcggcttggtcaccagcagcccttccgctgattcgcccgcaatgttagacagcgaaacgttagccacaccttccggccccataaactgagttttcagccctgccgcgcgtgcctgacgcaggatctgccccatttccgggtgataaccgccgtagtaaacgaagtcgatattctcttttttcagacgcgccaccagcgtagagaaatctttttccccggcggtgatgccatcaaagaacaccacgttagcattgcctttcttcaggccgtcctggaccgcacgcgccagaccttcgccgtactgctgtttgtcgtggacgatagcaatacgctgcggtttcaccttctcaagaatatatttcgccgccgtcggcccctggtcggagtccaggccggtggtgcgcaggatcagctgatagccacgagcggtcagctctggtgcggttgccgctggggtgatcattaaaatgccttcatcttcatagatgtctgacgctggctgcgttgatgaagaacagaggtgaccaatcacatatttaatgccgtcgttaacgactttgttcgccaccgcaaccgcctgttttgggtcacaggcatcgtcatatttcacgatttgcagtttgttgcctttaatgccgcctttagcgttgatatccgcaaccgcctgctctgcgccagtaaactcctggtcaccgtactgggccaccggaccggacattgcgcccacgaccgcgactttaatatcttctgccagagccatattgctgaatgccagcgcgatacatcctgccagtaacgctttacccttcatgttcatcctgaggttccccattcttctggttattacgtgtgttgtgatgttgttgttcagcactttatttcgttttatgcatgactacccgtgctttagcagcatactctgctaaaacatacccgatttttatgatattggaatagctattttgacagtttattaacaatctgcgtggggattagcgttttgccggagggggaaactgattattgcagaggcccaaaaaacaaaaaccccggattctcatccagggttctctgcttagtagtagaaattacgcttcaatggcagcgcgaagttttttcatcgcgttcttttccagctggcgcacacgctcggcggaaacaccgtaacggtcagccagttcctgcaacgtggacttgttgtcttcgtccagccagcgcgcacggatgatgtcctggctgcgttcgtccagaccctgcatcgcgtcggtcagacggtttgccgcctgctcttcccagttatcatcttcgatgccgtcggcaaagttagatgatttatcctgcagatagagcaccggtgccatcggctggctgtcggaatcgtcgtcggaagacaggtcaaaggtcatgtcctgtgccgccatacgtgattccatctcacgaacgtctttgctggttacgcccagttcacgggccaccatttcgacttcatcctggttaaaccagcccagacgctgcttggttttacgcaggttgaagaacagtttgcgctgcgctttggtggtcgcaactttgacgatacgccagttacgcagaacgtattcgtggatctctgctttgatccagtgaacggcgaaggagaccaggcgcacacccacttccgggttgaaacggcgcactgctttcatcaggccgatgttaccttcctgaatcaaatccgcctgtggcaggccatagcccgcataattacgagcaatatgaacaacaaaccgcaggtgagacaggatcagcgttttagctgcttccagatcgccatggtaatgcagcttttcagccagcgcccgctcctcgtcagccgacaacatcggccacgcgttagctgcccggatgtaggaatccaggttgccaactggggctaaagctaaactttgcattttgtcagtcattcaaatcctctcaatcgatatcttctggcgcttcagtggtagcaacaactgtgccagagcttaagagcaacgaggttatcattcactgttttatcagaccgtgattttatccacaagttcaatgcaagcttgtgaataaattacgcacaaaatgtgacatagagatgaaataccgggaagagacaacgggatctctttccctgctacggaacccatnnnnnnnnnngagtataacacgcttttattattcaggcgtaaagtggcgtaaatgttgtaccgtggcaagccacgctgccacccagccaatcatcgagcataccagcagcaatagcaggcattcatcgaacgataaaccattgatatcaaacttcgttccgaaaacctgtgccacttccgcaaccgccgatgacaatcgcagcaccagaatttctgacaaaattaatgacaacaatgcgccagaaaatcccagcagtgcgccaccatacaggaacgggcgaaggatgaaaccatccgtcgcaccaatcagtttctgcacgttgatggagtcacggcgagcaaagatgctcagacgtacgctgttgccgatgacgaggaacactgccgccaccatcaacacgccgatcatcgccgaaacgcgcccgaccagcccggtcaacgccgccagacgggcaaaccagctgtcatccatccgcacttcgtcaatgccgttaatctgcgtgatacgatcacgcagcgtattgagtgattccgtcccctgaaaatcgagtttcgggatcaccaccgccactgccggaagcgggttttcttccagcatatccagcgcaccaccaaaaccagaccagttacggaactcgcccagtgcgtcttcacgagaaagatagttcactttctccacgccttgctcggcctgcaactgtgccaccacgcccgcagcggcgtcatcgtccagcgttttttgcaagtaaacagtgatttgcggtgacggataatactgcgtcgccgcctgattaacgtttttgtacaccatataacagacgcnnnnnnnnnncgtcagggagatggcgataaccatcaccgttaaaaacgtggcgaacggtttgcttttcagatcctgcaatgcgccgtggaaggcatagcgcacctgttcgttgaaaacgttggttttgcgatttaccggttttggcgaggatttcgcgcgtttcggtgcgttacgaccgccgtcgcctgagccgccgaccgatttacggaagcgatccagacgcccgccaaactgccgaatatgattgattgcatcgcgcttattcatggcccacgcctccatgcaagtgaccatcgctcagggtgagcatgcgataggaacgccgcgaaatcaggttgatgtcgtgcgttgccatcaatacggttaccccaacgcggttaaactcttcaaacagacgtagaatcccttccgacaacgcgtcgtccaggttaccagtcggttcgtccgccagcagtaccgcgggcttgttcaccaccgcgcgggcaatgccaacacgctgttgttcaccgccggaaagctgaatagggaagttcttcgctttgtccagtagcccgactttatccagcgccgccgacacccggcgacgaatatcgtcaccgctggcaccggcgataatcagcgggatcgccacgttatcgtagacagtacggtccatcagtagatggtgatcctggaaaatcatgccaatctggcggcgcagaaacggaacttcacggtttttcagacgcgtgatgtcatggccgctaaaccagattttcccggcgctgggccgctcaatcccacagatcagcttcaggagggtacttttccctgcgccggaatgaccggtcagaaacgccatctcacccggctgcatatggaacgtaacgccctgcagcgcctgtctcccaccgagataagccttgctgacatgttcaaagcgaatcattgttaatcctctcgggcaaaaagtgcctctataaagtcgtccgccttaaacggacgcaaatcctcaatacgttcgccgacaccaatgtagcggatagggataccaaactggtcagccaccgagaaaattaccccgcctttcgccgtgccgtccagtttcgttagcgtgatgccggttaagccaacagcttcatggaacagtttggcctggcttaccgcgttctgcccggtgctggcatcgatagtcagcataacttcatgcggcgcttcaacgtcgagtttcttcatcacgcggacgattttcttcaactcttccatcaggtgcgatttgttctgcaggcgtccggcggtatcggcaatcaggacgtcgatattacgcgctttagcggcctgaatggcgtcgaagataacagaggcggaatccgcaccggtatgctgggcaatcaccggaatattgttgcgctgcccccagacctgaagctgttcaaccgctgctgcacggaaagtatcgcccgccgccagcatcaccgatttaccctgctgctcaaactgacgcgccagcttaccaatcgtcgtggttttacccacaccgttgacgcccaccatcaggatcacgaacggcgttttaccttcaacattcagcggctcatcgactttcgccagaatctcgcccatctcttctttcagcaggccatagagggcctcggcatcacgaagctgcttgcgggatgcgccttccgtcagattggtgatgattttacgtgtggtttccacgcccacatcggcgatcaacagctgttcttccagctcttcaaacagatcatcgtcgatttttttaccgcggaacaggctgataaatccggaaccgagattttctttggtttttaacaggctgcgtttcaggcgcgcgaagaaaccttctttggtcggtttttcctgctcctgagcgatttcttccaccggctgctcttctaccggaggaaccaccatcaccgcctcttctgccgcttcggcagccagcgcctgtgcttccagctcttcgtcggtgatttcttctttagccgcttcttcttccgccgcttcgacaatctctacggtttccgcttcagcctgccactcttctggcgaaacctcttcggcgttgacgtcttccggcaacggcagctcttcacgctcgatagccactggctccggcgtttcttctacgaccggttccggctgtgcaacgacttccgcttcaggctgcgctttttcactttcagcaacctgttcagtgacttccacaacgtcggcagcaaaagtttccgcctcggcttcagtatgcgcctgcggctgctcttcgacggcttgttcagaagccttcacaggctcttgcgcctgaacgatttcttctacaaccggttgttcattctgaacttctgtctctttttccggggtctgctctttttgaccaaagcccagccaggaaaaaaagccacgttttttttctttcgccatttgcgactacactcctcgctgttgcttcatggcacagcgttaacgctatgtacatagcagctaaaaaaatgatgaaatagtctatcacttaacttaattcacatcaccgcctgcaagtatgtgttatctggcggattgagcaatttattatgaaaaaaccgaatcattccggcagcggccaaatccgcattattggcgggcagtggcgaggccgtaaactcccggttcctgatagcccaggtctgcgccccaccaccgaccgcgtacgcgaaacgttgtttaactggctggctccggtcattgttgacgcccaatgtctggattgcttcgccgggagcggcgcgctggggctggaagcgttatcgcgctacgctgcgggggccacgttgattgagatggatcgcgcagtttctcagcagttaattaagaatctggcgacactaaaagcaggcaatgcacgcgtggtgaacagcaacgcaatgtcattcctggcgcaaaaaggcacaccgcataatatcgtgtttgtcgatccaccgttccgccgtggcttgttagaagagacgataaatttactggaagataacggctggctggctgacgaagccctgatttatgtcgaaagcgaagtcgaaaacggtctgcccactgttccggcaaactggtcattacatcgggaaaaagtggcgggtcaggtggcttatcggctgtatcaacgcgaagcacaaggagaaagtgatgctgattaatattggtcgtttgttaatgctctgcgtttggggatttttaatcctcaatctggtgcatcccttcccgcgcccgctgaatattttcgttaacgtggcgctgatttttaccgtgctgatgcatggtatgcaactggcgctattgaaatccactttaccgaaagatggcccgcagatgactaccgccgaaaaggtgcggattttccttttcggcgtgtttgaactgctggtctggcagaagaaatttaaagttaaaaaataaccttattgttcgcctacaaagctgacaaagcgcgttcctttatagctcagcgtacctttatcgcccactgtcagggcgtggtactgctgggcgtcgaggcgaaacgtctgctccattcctccgctttgcggtttgaagcttgcctcatagcgcatactggtgcctgccggagtcacttcctgctggcgcgaacggcgatcgttaatcggtttttcccgcttgttgctcaccaccaccagcttttgctggagcggagccatatcattatcagctttttcccgtcgctgttgcataaaacgaaacgatgcggcgacgacaattaagccaatgataacaataaagaaaagaggtggtttgctcatctttatccctcatcggaaaatgcggaaataagcataccctgccagttatggtgttgtcatccgtccaccctcgccactaaactggaagcaagaccgtaggcattccgcttacgaaaaaataacgaattcaaggaactaagatgctttggtcgtttatcgctgtctgtctttccgcatggctatctgtggatgcatcgtatcgtgggccaacctggcaacgctgggtgtttaaaccgttaacccttcttctcctgctgttactggcctggcaagcgccgatgttcgacgccattagctatctggtgctggcagggctgtgcgcctcactgctgggcgatgcgctaaccctgttgccacgtcaacgtctgatgtacgccatcggcgcgtttttcctctcgcacctgctgtacaccatctatttcgccagtcagatgacgctctctttcttctggcctctgccactggtgttgctggttctgggcgcgctgttactggcgattatctggacgcggctggaagagtatcgttggcctatctgcacgtttatcggcatgacgctggtgatggtgtggctggcaggtgaactgtggttcttccgtccgaccgctccggcactctctgcgtttgttggcgcttcattgctgtttatcagtaactttgtctggctgggtagccactatcgccgccgcttccgggcagataacgcgattgctgcggcctgctactttgccggtcatttcctcatcgtccgctcgctgtatctctgataaaacttgactctggagtcgactccagagtgtatccttcggttaatgagaaaaaacttaaccggaggatgccatgtcgactcctgacaatcacggcaagaaagcccctcaatttgctgcgttcaaaccgctaaccacggtacagaacgccaacgactgttgctgcgacggcgcatgttccagctcgccaacgctctctgaaaacgtctccggcacccgctatagctggaaagtcagcggcatggactgcgccgcctgtgcgcgcaaggtagaaaatgccgtgcgccagcttgcaggtgtgaatcaggtgcaggtactgttcgccaccgaaaaactggtggtcgatgccgacaatgacatccgtgcccaggttgaatctgcggtgcaaaaagcgggctattccctgcgcgatgagcaggccgccgacgagccacaagcatcgcgcctgaaagagaatctgccgctgattacgctaatcgtgatgatggcaatcagctggggtctggagcaatttaatcatccgtttgggcaactggcgtttatcgcgaccacgctggttgggctgtacccgattgctcgtcaggcattacggctgatcaaatccggcagctacttcgccattgaaaccttaatgagcgtagccgctattggtgcactgtttattggcgcaacggctgaagctgcgatggtgttgctgctgtttttgattggtgaacgactggaaggctgggccgccagccgcgcgcgtcagggcgttagcgcgttaatggcgctgaaaccagaaaccgccacgcgcctgcgtaacggtgagcgggaagaggtggcgattaacagcctgcggcctggcgatgtgattgaagtcgccgcaggtgggcgtttgcctgccgacggtaaactgctctcaccgtttgccagttttgatgaaagcgccctgaccggagaatccattccggtggagcgcgcgacgggcgataaagttcctgcaggagccaccagcgtagaccgtctggtaacgctggaagtgctgtcagaaccgggtgccagcgccattgaccggattctgaaactgatcgaagaagccgaagagcgccgcgcccccattgagcggtttatcgaccgtttcagccgtatttatacgccagcgattatggccgtcgccctgctggtgacgctggtgccaccgctgctgtttgccgccagctggcaggagtggatttataaagggctgacgctgctgctgattggctgcccgtgtgcgttagttatctccacgcctgcggcgattacctccgggctggcggcggcagcgcgtcgtggggcgttgattaaaggcggagcggcgctggaacagctgggtcgtgttactcaggtggcgtttgataaaaccggtacgctgaccgtcggtaaaccgcgcgttaccgcgattcatccggcaacgggtattagtgaatctgaactgctgacactggcggcggcggtcgagcaaggcgcgacgcatccactggcgcaggccatcgtacgcgaagcacaggttgctgaactcgccattcccaccgccgaatcacagcgggcgctggtcgggtctggcattgaagcgcaggttaacggtgagcgcgtattgatttgcgctgccgggaaacatcccgctgatgcatttgctggtttgattaatgaactggaaagcgccgggcaaacggttgtgctggtagtacgtaatgatgacgtgctgggtatcattgcattgcaggataccctgcgcgccgacgcagcaactgccatcagtgaactgaacgcgctgggggttaaaggagtgatcctcaccggcgataatccacgcgcagcggcggcaattgccggggagctggggctggagtttaaagcgggcctattgccggaagataaagtcaaagcggtgaccaagctgaatcaacatgcgcccctggcgatggtcggtgatggtattaacgacgcgccagcgatgaaagctgccgccattgggattgcaatgggcagtggcacagacgtggcgctggaaaccgccgacgcagcattaacccataaccacctgcgcggcctggtgcaaatgattgaactggcacgcgccactcacgccaatatccgccagaacatcactattgcgctggggctgaaagggatcttcctcgtcaccacgctgctagggatgaccggactatggctggcggtgctggcagataccggtgcgaccgtgctggtaacagcgaatgcgttaagattgttgcgcaggagataaggcaaaccgatcgcaacattgagcgcgatcggtcccctcgctcctctggggagagggttagggtgaggggaaaaggcggcatcgaagccaatctttccccatcaaccgcctttacgaatcaaataacgataaggcagtccatccgtctctttcgcaaccagttcgtgttccataaaggtacaaaacccaggaatatcgcgggtcgtcgccggatcgtcggcgataatcagtaaagtttcgccaggctgcatattgcgcacggttttgcgcaccatcatcaccggttccgggcagcgcaggccaagcgcgtcgagtgtgtggtcagggctggaaaagagatcggtcattttcttctcatcacttaaaaaaacggcgctagtttacgccctgtgagtccgtaagcaaaccaggttaacgattgcgtgaaaattaaccattgcattgtcaacgtaaagcagtatcatgcggcggctcgaaaaaagggtaagcacgttattatgttaagataacagacgtgtcgtacgtattgggttccctcaccccaatggttaatcaaaaaggtacaatatgaacgttttctcgcaaactcaacgctataaggcgttgttctggttatcgttatttcatctgctggtgatcacctccagtaactatctggtccagcttccggtctccatttttggttttcataccacctggggcgcgtttagttttccgtttatctttctcgcgaccgacctgaccgtgcgtatttttggcgcaccgctggcccgacgcattatcttcgcggtaatgatccctgcgttattaatctcctatgtcatctcgtcgctgttctatatgggttcatggcagggattcggcgcactcgcccacttcaacctgtttgtcgcccgtatcgccaccgccagtttcatggcctacgcgctggggcaaatcctcgacgtgcacgtttttaaccgcctgcgtcaaagtcgccgctggtggctggcaccgacagcgtccacactgttcggtaacgtcagtgacacgctggcctttttcttcattgccttctggcgtagcccggatgcctttatggctgaacactggatggaaatcgcgctggtcgattactgtttcaaagtgttaatcagtatcgttttcttcctgccaatgtatggcgtattactcaatatgctgttgaaaagactggcagataaatccgaaatcaacgctttgcaggcgagttaaaggttcgttatcagagttgtgataagatggatgaatgagccgttatggccgtttatcgaaaggaagaagtcaatgcgcaatctggttaaatatgtcggaattggcctgctggttatggggcttgcggcctgtgatgataaagacactaacgctacggcgcagggttcggtcgcggaaagtaacgctaccgggaatcccgtcaacctgcttgatggcaagttaagtttctcgctgccagcggatatgaccgaccagagcggtaagctgggaacgcaggccaataacatgcatgtctggtccgacgccaccgggcagaaagcagtcatcgtcatcatgggcgatgatccgaaagaagatctggcggtgctggcgaagcgtctggaagatcagcaacgtagccgcgatccgcagctgcaagtggtaaccaataaagccattgagctgaaaggtcacaaaatgcagcagttagacagtattatctccgcgaaaggccagacggcgtactcttccgttattctgggtaacgtgggtaatcaactgctgaccatgcaaattacgctgcccgctgacgatcagcaaaaagcgcagaccaccgcagaaaacatcattaatacgctggttattcagtaagttttaagatgatgaggcggcctcagggacgtgttccggaggccgtttttttaatcgccacgtcagtaataacgcgattgcgaccagtcccgccgccgccagataaatcaccggtacgcccgcccagctcatcaccagcccagccagtggtccagtcacgccaagcgataaatccataaatacggtgtaagttgccagcgccgccccctgattttgctgcggcaccgcttttaccgccactacacccaatgccgggaacaccagcgaaaacccggcccccgccagtaagacgccgattttcgccatccacggcatagtcgccacgccaaccagtagcaggccgattatctcaacgctaaagcaaatcatcgctacgtttaagccaccgatacggttaatgccgttagggaataacaaacgcgtaccgacaaacgcacagctaaacagcgtcagcgcgaaagccgcaccgtcccaacctttagcgtcataaaacagcgtgataaaggtggcgatgacgccaaatccggcggaagccagtgccagcgccataccgtacagccagacgctcccaagcaccgcgcgaaacggcagcggtttgcctttactggcttttaccgtcggacgcgggatcgccaacaaaatggccaccagcgccacgcccataatgattaacgctaacgcctgcaagccgccccagtgataaaacacgacgcctaacggcgcacccatcgccatcgccccgtaagtgacaatgccgttccacgaaatcacccgcccgatatgcagcgagccaaccacgccaacgccccacagggtcgatcccgttccggcaaaactttgcccaatcccaaggatgacgcgccccaggcaaagtaataacaggctgatgacaggcagactggcggttaatcctgccgtcagataccccagaccgctcaaaaagcagccgcataaaccgaagacgacaatctttttgggtcccagcaaatcggcataacgtccggcatgagggcggctcagcaaggtggcgaaatattgcaggctgataaccaatcctgcccagaaagcgctaaagcccatcacatcatggacatagcccggtaatacagcgagcggcaacccgatggtgaggtagctggcgaagttaaacatgacaatggagacaatgcgcaaattcaggcgcaatccgtttagcgcgggttcggctacgggttcgggcatgaggatcaccacatttttacaacagtgtttcatttttaccatgtgctgacgtgaaaatcagcagtaagaatcagaatattgctggcgtgactcccgctacacttaatacaaaaagtcacaaggaagccccaatggaaacccctcaacccgataaaacgggcatgcacattctgctcaagctggcctcgctggtagtgatcctcgcgggcattcacgcagcggcagatatcattgtgcagctgttactggcgctgttttttgccatcgtcctcaacccgctcgtcacctggtttattcgtcggggagtacaacgccccgttgccattacgattgtagtggtggtgatgctgatcgcactaaccgcgctggtcggcgtactggcggcatcgtttaacgaatttatctctatgctgccgaagtttaataaggagctgacgcgcaaactttttaaattgcaggagatgttgccttttcttaatttgcatatgtcgccggagcgaatgctgcagcggatggactcggaaaaagtggttaccttcaccacagcgctaatgaccgggctttccggggcaatggcgagcgtgcttttgctggtgatgaccgtagtttttatgctgtttgaagtgcgccacgtcccttacaaaatgcgttttgcgctgaataatccacagattcacatcgcgggattacaccgcgcacttaaaggcgtttcgcactatcttgcattgaagacgctactcagtttatggacaggtgtcatcgtctggctggggctggagctgatgggggtacagtttgcgctgatgtgggcagtactggcgtttttgcttaactacgtgcccaatatcggcgcggtaatttccgccgtaccgccaatgattcaggtgctgctgtttaatggtatttacgaatgtattctggtcggcgcattgtttttagttgtccatatggtcatcggcaatattttagagccacggatgatgggccatcgcctggggatgtccaccatggtggtatttctttcattgttaatctggggatggctgctcggcccggtagggatgctactttcggtgccattaaccagcgtgtgtaaaatctggatggaaacgacgaaaggtggcagcaaactggcgattttactggggccgggcagaccgaaaagtcggttaccgggatgaggcgacaagtgatacgatacgcactttcattttccattaaacgttggccctgatatgtatcggatagttctggggaaagtttcgaccttaagcgcagctccactgccaccgggtttacgcgagcaagcaccgcaaggtccacgacgcgaacgctggctggcggggcgtgcattgctttcgcacacgctttccccgctaccggagatcatctatggcgaacaaggcaaacctgcattcgcgccggaaacgccgctatggttcaacttaagccatagcggtgacgatatcgctctgctgttgagtgatgaaggcgaagtcggctgcgatatcgaagtgattcgcccgcgcgccaactggcgctggctggcgaacgccgtattcagcctcggggaacacgctgagatggacgccgtgcatcctgatcagcaactggaaatgttctggcgcatctggacgcgcaaagaagccatcgttaaacagcgtggcggcagcgcctggcaaatcgtcagcgtagacagcacctatcactcctcgctgtcagtcagccattgtcagcttgaaaatttaagcctggcgatctgcacccccaccccctttacgctcaccgccgacagtgtgcaatggatcgattcagttaactgatccgcccacccgactgcccatctattgatccagaacaggtaatcagtatgacgaatacttaaaatcgtcatacttatttccgccatctattttaatccattggggttaccatgctctccacactccgccgcactctatttgcgctgctggcttgtgcgtcttttatcgtccatgccgctgcaccagatgaaatcaccaccgcctggccggtgaatgtcgggccactaaacccgcacctttacacgcctaaccagatgttcgcccagagcatggtttatgaaccattggtgaaatatcaggcagacggttcggtgatcccgtggctggcaaaaagctggactcattcagaagatggtaaaacctggaccttcaccctgcgtgatgacgtgaaattctccaacggtgaaccgttcgatgccgaggcggcggcagaaaacttccgcgcagtgctcgataaccgtcaacgtcacgcctggctggagctggcaaaccagattgttgatgttaaagcactcagtaaaacagagctgcaaattaccctgaaaagcgcctactatcctttcctgcaagaactggccctgccccgtcctttccgttttatcgctccctcgcagtttaaaaaccatgaaaccatgaacggaattaaagcgccgattggcaccggaccgtggattttgcaggaatcgaaactgaatcagtacgatgtcttcgtccgtaacgaaaactactggggcgaaaagccagcgattaaaaagatcacctttaacgtcatcccggacccgactacccgcgcggtggcgtttgaaactggcgatatcgacctgctgtacggaaacgaagggttattaccgctcgataccttcgcccgctttagccagaatccggcttaccacacccaactgtcacagccgatcgaaaccgtgatgctggcgctcaataccgccaaagcccccaccaacgagctggcagtacgtgaagctcttaattacgcggtaaacaaaaaatcgctgattgataacgcgttatatggcacccagcaggtcgccgacaccctgtttgccccttctgtgccttacgctaatctcggcctgaaaccgcgccaatacgatccgcagaaagcgaaagagttgctggaaaaagccggttggacgctgcctgcgggcaaagacatccgcgagaaaaatggtcagccgctgcgcattgaactgtcgttcatcggcaccgatgcgttaagcaaatcgatggcggaaatcattcaggctgatatgcgccagattggcgcagatgtctcgctgattggcgaagaagagagcagtatctatgctcgtcagcgcgacggtcgttttggcatgattttccaccgcacctggggcgcgccatacgatccacacgccttcctgagttcaatgcgcgtaccgtcgcacgctgacttccaggcacagcaaggattagccgacaagccgctgattgataaagagatcggcgaagtgctggcgacccatgacgaaacgcaacgtcaggcgctgtatcgcgacattctgacccgtctgcatgacgaggcggtttatctgcctatcagctacatctcgatgatggtggtatcaaaaccggagctgggtaacatcccctacgcgccgatcgccaccgaaattccgttcgaacagattaaaccggtgaaaccttaatgttgcgttacgtattacgccgctttctgctgctgatcccgatggtgctcgccgcctcggtgatcatttttctgatgctgcgcctcggtaccggcgacccggcgctcgattatttgcgtctgtctaacctgccgccgacgccggagatgctggcctctacccgcaccatgctgggactggatcagccgctgtacgtccagtacggcacctggttgtggaaggcgctgcatcttgactttggtatctcattcgccagccaacgcccggtactggacgatatgctgaacttcctgcccgccacgctggaacttgcaggtgcggcgctggtattaattctgctcacttccgtaccgctcggtatctgggcggcgcgccaccgcgaccgtctgccggatttcgccgtacgtttcatcgcgtttcttggcgtgtcgatgcctaacttctggctggcgtttttactggtgatggcgttttcggtgtatctgcaatggctacccgcgatgggttacggcggctggcagcacatcattttgcctgcggtttccattgcctttatgtcgctggcgattaacgcgcgtttactgcgcgccagtatgctggacgtcgccggtcagcgtcacgtcacctgggcgcgtctgcgcggcctgaacgacaaacagaccgaacgtcgccacatcctgcgcaatgcctcgctgccgatgatcaccgccgtggggatgcacatcggcgaactgatcggcgggacgatgattatcgaaaacatctttgcctggccgggcgtcgggcgctatgcggtgtcggcgatttttaaccgtgactatccggtgatccagtgctttacgctgatgatggtggtggtttttgtggtctgtaatttgattgtcgatttgctcaacgccgcgctggacccgcgcattcgtcgtcatgaaggagcgcacgcgtgaactttttcctctcttcccgctggtcggtacgcctggcgctgatcattatcgccctgctggcgctgattgcgcttaccagccagtggtggctgccgtatgaccctcaggctattgatctgccgtcgcgcctgctttcgccggatgcgcagcactggctgggcaccgatcacttagggcgtgatattttctcgcggctgatggcggcgacccgcgtgtcgctcggttcggtaatggcctgcctgctgctggtgctgacattagggctggtgattggcggcagcgccggactgattggcggacgcgttgatcaggccaccatgcgcgtcgccgatatgtttatgaccttcccgacctcgattctgtcgttctttatggttggcgtgctcggcaccgggctgaccaacgtaattatcgccatcgccctgtcgcactgggcgtggtatgcacgcatggtgcgcagcctggtgatttcactacgccaacgcgagtttgtgctggcgtcacggctttccggtgcgggccatgtgcgggtgtttgtcgatcatctggcaggcgcggtgatcccttcgctgctggtgctggcaacgctggatatcggccatatgatgctgcacgtcgcggggatgtctttccttggcctcggtgtgaccgcgccgaccgccgaatggggcgtgatgattaacgacgcgcgccagtatatctggacccagccgctgcaaatgttctggccggggctggcgctgtttatcagcgtgatggcctttaacctggtgggtgacgcactgcgcgatcatctggatcctcatctggtgacggagcacgcacactaatgccgcaacagattgaactacgtaatatcgcgctacaggccgcgcagccgctggtacacggtgtatcgttaaccctgcaacgcgggcgcgtgctggcgttagtcggcggtagcggcagcgggaaatcattaacctgcgccgcgacgctgggcattttgcccgctggcgttcgccagacggcgggggaaattttagccgatggcaaaccggtttcgccttgcgccctgcgcggcatcaaaattgccaccatcatgcagaacccgcgcagcgcctttaatccactgcacaccatgcacacccacgcgcgggaaacctgcctggcgttagggaaacccgccgatgacgctacgcttaccgctgccatagaagcggtggggctggaaaacgccgcgcgcgtgctgaagctgtacccgttcgagatgagcggcggcatgttgcagcgcatgatgattgcgatggcggtgctgtgtgaatcaccgtttatcatcgccgatgaaccgaccaccgacctcgacgtggtagcacaggcgcgcatcctcgatctgctggaaagcattatgcaaaaacaagcgccgggaatgctgctggtcacccatgatatgggcgttgtggcgcgtctggcggatgacgtggcggtgatgtcacaaggtaaaattgtcgaacagggcgatgtagaaacgctgtttaacgcccccaaacatacggtgacgcgcagcctggtttccgctcatctcgccctctacggtatggagctggcatcatgaccttacttaacgtctgcggcctttcccatcactatgcccacggtggatttagcggaaaacatcaacatcaggcggtgctgaataacgtttccctgaccctgaaaagcggcgaaaccgtcgccctgctgggacgcagcggctgcggaaaaagcaccctcgcgcggctgctggtaggcttagagtctccctcacaagggaatattagctggcgcggcgaaccgctggcgaaactcaatcgcgcccagcgtaaagcgttccgccgcgatattcagatggtatttcaggactccatcagcgccgtgaatccgcgcaaaaccgtgcgcgagatcctgcgtgaaccgatgcgccacctgctatcactgaaaaaatccgaacaactggcgcgcgccagcgaaatgctgaaggcggtcgatctcgatgacagcgttctcgacaaacgcccaccgcagttaagcggcggccagctccagcgcgtctgcctggctcgcgcgctggcggtcgaaccgaaactactgattctggatgaagccgtttctaaccttgatctcgtgttacaggcgggcgtcattcgcctgctgaaaaagctacaacaacagtttggcaccgcctgcctgttcatcacccacgacttacgcctggtggaacgcttctgtcagcgggtgatggtgatggacaacggacaaatcgtcgaaacccaggtggtgggagataaattaaccttttcctctgacgccggacgtgtgctacaaaacgcggtattacccgcattccccgtgcgccgtcgcaccacagaaaaggtttaacgcaaatgcaacgagtcaccatcacgcttgatgacgatttactggagacgctggacagcctgagccagcgtcgtggttataacaaccgttccgaagctatccgcgatattctgcgtagcgccctggcccaggaggccactcagcagcacggcacgcaaggtttcgcggtgctctcctatgtgtatgaacacgaaaaacgcgacttagccagccgcattgtctccacccagcaccatcaccacgatctctccgtcgccacgctgcatgtgcatatcaatcacgacgactgtctggaaatcgccgtgctgaaaggtgatatgggcgacgtgcagcattttgccgatgacgttatcgcccagcgcggcgtgcggcacgggcatttgcagtgcttgccgaaggaagattgagttatttctgaaacgaggaaagaaaagatattaactgaacttaatttataaaattaagttcagttgcatagatagatcctgtaaaggcagatattctgcgtaatgtacgccgctaaaatttataaatgattcaaacgctcattcagtgtttcaataatataggtattaacagagacttgttgctgcgcagccgcattattaaggcgttcactcagcgattctggatagcgtaacgtaaaggtcttaatcttttctgtacgcgcatacggctcaatacccgcagctttacaatcctcaagatactctcgcagggaaagttccccttctttttgcagcccctgaatgctgtcagagacaaaatcacaataacctgacaagcccaggaatttgccacgaaatgcattcagttctggcacgtaagtgataacagcaggttgcccggcaatctccatagagtttggcgtcttcagtttgatcatggttttacccctatacttagtaaccagtcacgcacgctttctacagcgcctttatcggtatctggcgacggatgaggccgatggaaacacgcaacgctcatatttagtatgaacttacagcgcgaccccctaccttccttaatttctccgcctaacgctttaaccagagattctatatcagtccatttgattccttgaggtaaaggtgatttaaatagctgatccagtgtgtttttttgtttctttcgtaaagcctgtacctgtgtttacatgacattcccttatgacttcactttatgacatcacagtatgaagtcaagtttcccttccttacgccattgtcccaatcgtcttcctgaatcgcagcagcgcgatggtgaaaaacgcgccgccaattgccatcagcgtcaggaactgcggccagacgatttcgaatccggcaccccggtagagaatggcctgcgcgaggctaacaaagtgtgtcgtcggcatggtcagcataatgtcctgcaccatctgcggcatactttcgcgcggcgtggatccaccggaaagcatttgcagcggcagcagcaccagaatcaccagcagccccagttgcggcattgaacgcgctatcgtccccataaaaatgccgattgacgtggtggcaaacagactgagcgccacgcccagcataaacagcgggatcgagccttcaatcggtacacccagcacgcctttcaccatcagcaccagtgataatcccgacaccaccagcaccaccagccccatcgaccagacctttgccatcatgatctcaaacggcgttatcggcatcaccaacaagtgttccaccgtgccgtgttcacgctcgcggatcagcgccgatccggtcaatacaatcgccagcatggtaatgttgttgatgattgccatcaccccgccaaaccacgcgggatcaaggttcgggttaaagcgcatccgggtttccagcgataccaacggttcgctgttatcacggtagcgcgcgacaaagctgttcacttcaccgttgataatattctggatatacccattgccggtaaatgcctggctcatgcgcgtggcatcgacgttcacctgaatatccggctggcgtccggcgaggacatcacgctgaaaattaggcggaatatttatcgcaaaggtataacgcccggcgtccagtccggcatccatctcatcggcggtgatcatctccggtggcaaaaaccacgggcgatagaagctgttaacgatccggttcgataactgcgattgatccatatcggcaatggcgatcggcgcgaggttcaacgatcctggcgtaacggtcgctgacgaatacaccgacaccgtaaacgagaagacaatcagcgtcagcatcgctttatcaccgagcagactgcgcaactctttgatacccagattaaaaatattgcgtaaatggcgcatcatccctcctgttttttcagcagcaggatacttaagcccatcaccagcgggatggctatcagcaacgggataaaaagttgccacaaatcagtcagatccagcgctttcgagaacgttccgcgggcgatagtcagaaaatgactggtcgggtaaacctcgccgatccaacgtccaggcccttccagcgaagctaccggatcgatcatcccggaaaactgtgtcgccgggatcaacgtgataatcgccgttccgaaaatggcggcaatctggcttttcataaaggtggagatcagcagccccattccggtggcaatgatgatatacagcagcgccgccagggtgagcgtcaggaaactgcctttatgcggtacgccaaacacaaacaccgacaggccgcagagcaggaaaaagttcagcatccccagcgcgatgtatggcaactgtttaccaagcaaaaattcactacgcgtggtgggggtcacgtaaaggttgataatcgacccaagctctttttcccgcaccacgctaagggcgcttagcattgacgggatcatcatcagcagaagcgggatcaccgccggaacaatcgctggcaggctttttacgtccgggttatagcgatagcgcgtctcaatattcatcagcccgctttggctggcgggtgtggattgtcggctcgccacatcctgtagccagctctggtgcattgcctgcacgtaaccttttaccgtttcggcacggctcggcatcgctccgtcgatccagacgccgagttccacaggcgtaccacgcgcgatatcgcgcccgaaattgggagggatctcaattgccaccgttatatcgcccgcacgcatccgacgatcaagctcgtcataactggtgagcggcggctgttcgataaagtaacgggaaccggagagattgagcgtccacgcctggctactgacggtctggtcgcggtcgagcaccgcaaagcgcaggttttccacatccatactgatgccgtaacccattatcagcatcaggatcactgttcccatcagcgccagcgtcgaacgtaccggatcgcgtcgcagttccagtgcttcgcggcggctgtagctaaacagacggcgcaggctaaatccctgacgcggcgcgtgggtggtgtcgtgtatcacgggcggcgcttcggcttcgttgctctgtcctgccgcttcctgcaaataggcgataaatgcctcttccagactggcggctccgcgtttctcaaccagttcctgcggtgtaccgctggcgagcacttttccggcgtgcatcagtgagatgcggtcgcaacgttccgcttcgttcataaagtgggtggagataaaaatggttactttgtcctggcgcgagagatcgaccatcaactgccagaacatatccctcgccaccggatcgacgccagaagtaggttcatcgaggattaacatctccgggcgatgaatcaccgccaccgccagcgaaagccgctggcgaatgccgagcggcaatgactccggcagaacatcttcaacgtcgttgagcttaaaacgctcgctcatttcagccactcgcgcgggaatttccgcttccgggatgtgaaacaaacgggcatgtaactcaaggttttgccgcacggtgagttcgttatagagcgaaaacgcctgcgacatatagcccacccgacggcgggtatcgatatcttttggatcaaccggttgcccaaacagccacgcctcaccttcgctggcgggcagcagtccggtgagcattttcatggtggtggatttaccgcagccgttcgatccaagaaaaccaaaaatctccccgcgtggaatgcggaaattgacgtgatcaacggcaacgaaggaaccaaaacgcatggtcagatcgcgcgcttcgatggcaatctctgcattttcaggttgatacggtgggatcactaccgcctgatgcgcctggcgttgcgcttgcggtaacagatttataaacgcctcttccagcgtggcgctttgcgtttgctgccgcagctcttcggcgctgccagttgccagcacttctccggcattcatcgctaccagccagtcgaagcgttcggcctcttccatataggcggtggcgaccagcacgctcatattgctctgccgctggcgaatactgtcgatcagatcccagaactgggcgcgggagagcgggtcaacccccgttgttggctcatcaaggatcaacagttccgggtcgtggattaacgcgcagcacagccccagtttttgcttcatcccgccggagagtttacctgccggacgatcgcgaaacggtgctaacccggtgctggtcagcagctcattaattcggacttcccgctccgctttatcgtgaccgaacaagcgagcgaaaaaatcgacattttcatacaccgataaggtgtggtagagatttttgcccagcccctgcggcatccaggcgatgcgcgggcagacgtcgcggcgatgcttcgggtcgcgcatatcgccgcccagcaccatcacattgccctgttcaatgacgcgggcaccggaaatcaacgacaacaagctcgacttcccgacgccgtccgggccaatcagcccgaccatgcaacgggccggaatatcgagtgtgatattgttcagcgcaacggtttttccataatgctggctcacgcccgccagttgcgcgacaggcgggacgggaaccagttccagatgcgtcattgcggcaacctcaccacgaggtcgtcaggccacggaagttcttcattcacccgcacccacgctacgcccggtaaaccggttttgacatattccagatgctgctggagtaattccggtgggatacgcgctttgacgcggaacatcagtttcagccgttcatcgctggtttcgacggtttttggcgtgaactgggcgacactggcgacaaaactgatggttgcaggaatacgcagatctggcgcggcatcgaggatcagccgggcttcaccgcccagtttcagcgtgcccgcctgttcggttggcaggaagaaagtcatatagacgtcgctgagatcgaccatattcagcacccgaccgcctgccgccagcacttcgcctggctcggcaacccgatactgcacgcgtccgtcacgcggggctttcagttcgctgtcatcgatatctgcggcaatgcgccgttcagtggcttgtgcggcttcgacgcgagtttgcgcctgaatgatattggtgcgtgccgcttctatagcggctttagaagccgaaacctgagcttttgccgattccagcgcagctcgggcgctctcagcggcggcgcggtcgtcatccaactgttgcgcagaaatagccccacgatgggcgagcgagcgggaacgggtatgacgtttggctacggagtccagttcagcttgccgttgattaaccagcgactgagcggcgcgagtttcactttggcgttgctccagcaaagcctgcgcggcagcaacggcgctttgtgcttctttgatttgcgcgatggcttccagtcgctgttcctgcaacacgcgagtatccatcttcgccagcacttcaccttctcgaacaaactggccttctttcaccagaatggtgtcaatacgcccggcaattttgctggcgatatccacttccgtcgcttcaatgcgcccattgctgacagcaaagccttccggcacacctgccgggcgcaacagccaccacgccacgatagccgccaccgccagtaacccgacaacccaccacgccagatggcgcttactcttatccataatcgacccgccataatccctgtaagcaaacgacgcgtgttacaactgccgccgaacgacgttcagcggattcttccatccgggataagaaggaaacggcaaatacgaccagcgcgcagagcattgagcgccaacggggaaggcttagtgaaaacgggtagtaatgttgtcatcatcagcattcctggccgtaaatgaaacacgcatactcataagtgtgatctataaaactggctgacaaaacggtatccatcctgttggatagcgtttcacgcctgttcagttgcaggaacagagcattcctttttacgttttatcaacagtctcaaccagatagtaacattaatattcatgttgtctatggttcagagctgtaacattgtgcgccttctaatcaaaggcataagtccatttctgtttttttcatgctggtaagacttccagggagtggttatctcaggccctgcaccagggttaatttggcaattatgcatgctgaacattcttccagcatgtttactgtcacgggcgttaagacctaaaactgtccccgtttcgcctatgcgttctcttccaccatttccgttatgtgcaacaacttgatttatacctaacatttgtgaacatgctaatagtgcttcaagtttaggtctgtaatctgtcgaaacagaaaaataacgattaaaggatcgacaagagatagcccggctagttttaaactttttgccattaattatagcatgatgctttttattgataattgccgctaattcgaccggatcgagagcattggtcatttcatcaatagagactgttatcggtcctataatgtaacgttttcgctgctcatcaaaagttatcccatgatgatttgccattattttgtatttggggtcatagaaacatacaggataatcttttatcccagcgtaggtatcctcatcaagtggtttcatacgcgtgaagttctgcatatagttaccattgcaattcgtttcatgatttccagctaatacatgaacattttcattgatactcattatgcgttttaacaaatcgatgataaattgatcgccacagatattactaaatcgatcgccggtttggtcgccaagaaacgtacatggcgtcacagcgtctttattaataactaaataaggctgaagactttctaaaactatatctcttctgttcagaatactgattattgtattaacattagtgtcaagttgctcattaaagttctcccttagcaatacgttgagaacttcatcttctatattaagcaactggctaaggaaattttctccttcagccatgattctcaaatgtcccgttgcaaaaagcgcgtacaaaactgcaccgactgagccatcggtatcgccaaaataggttggtctggtacttgtgggatcaacaggtgaacaattggagaaataggttctgtcagcgaactgggggtttatcattgtttcgaatttaatatcagatacattgaattgcgatattttccagtcccagacgggtttgtacgactcagtaactgcaacatcattagcatcatcatttactgtcatatta

SEQ ID NO: 170 - DNA, 57778 bp, Escherichia coli
  source 1..57778: mol_type = genomic DNA
cccacagctcgccctggtgttccgcaatcagcccgcgtgacagcacgctggactcgaagaacggatcgatgttgctgatcgcaaacacctggtcgctgtgatacgggcggaaaatcgcgacctgctcgtcgcctaacagcgcgcagacgccggtttcaggcaggatgtcatcgattttgcagatgtctttccactggctcatgcgttgtcctccaccagagttaccgggatacgttcatacggcgttgccggacggtgctgttcgcgctctggcaccatctgcacgttcgggtcacgcttgtcgctgttgatgaagtgtttgaagcgagtctgcgcggacggtgtattgaccgtttcagtccactcacacactaccgcttcacgcaggcgcgccatctcttcttccagatgagcgttcagccccagtttgtcgtcaatgatcaccgctttcaggtaatcgatgccgccttcgaggttttctaaccacggcgcggtacgcgtcagtttgtcggcggtacggatgtagaacatcatgaagcggtcgagatatttgatcagcgtttcgcgatcgatatccgctgccagcagatccgcatgacgcggtttcatgccgccgttaccgcaaacatacaggttccagcctttttcagtggcgataatacccacgtctttaccctgagcttctgaacattcacgggtacagccggagacaccgaacttcattttgtgcggcgtacggatgcctttgtagcggttttccagttccacgccgaggccgacgctatcgccaacaccgtagcggcaccaggtgctacccacgcaggttttcgccatacgcagtgctttcgcataggcatgaccggtttcgaagccagcttcaatcagctgacgccagatttccggcagatcgtctttctgtgcgccaaacatcgccaggcgctgggagccggtgattttggtgtagagattaaattcacgcgcgatacgacccactgccatcagcccttccggggtgatttcaccgcccggagaacgcgggatcaccgagtaggtgccgtctttctggatgttagcgaggaagttgtcgttagaatcctgcagcggagtatgttccggcttcagaatgtattcgttccagcaggaggccagcagcgaaccgacggtcggtttacaaacttcacaaccgtagcctttgccgtgtttcgccagcagttcttcgaaggttttaatgccttcaacgcggatcaaatggaacagttcctgacgcgaataagcaaagtgttcgcacaggttgttgttaacttcgatgccctgtttcgccagttccgcgttcagtacctgagtaaccagcgggatacagccaccgcagccagtacccgctttggtttcagctttcagcgccgcaacggtgtggcagcctttgttgatggcagcaatcagatcacctttggtgacgtcgaagcaggagcagatttgcgcgctgtccggcagtttatcaacaccgatagacggcttaccgctacccgagtgcgccggcagaatcagagaatccgggttttccggcagctcgatagcattcagcaccagttgcagcaggttgccgtagtcgctggtatcgcccaccagtaccgcaccgagcagggttttgttgtcttcgctgacaatcaggcgtttgtagatctctttactttcgtcgaggtaaacgtagctacgtgcgccaggcgtgcgaccgtgcgcatcaccaataccgcctacgtctacgcccagcagtttcagcttggcgctaaggtcagcaccttcaaaggcgttttcgctaccgagaatatggtcaacggcgacctgcgccattttgtagccaggtgctaccagaccaaatacacggttgttccagcttgcgcattcaccgatggcgtagatatccggatcggaagtctggcaggaatcattaatgacgatacccccacgcggagcaacgtccagaccacactgggttgccagcttatcgcgcggacggataccggtagagaagacgataaagtcgacttccagttcgctgccgtcggcaaaatgcatggttttacgcgcttcgacaccttcctgcacaatctcaagggtgtttttgctggtgtgaacgcgcacgcccatactttcgattttgcgacgcagctgctcgccacccatctgatcaagctgttccgccatcagcataggggcaaattcgataacgtgggtttcaatacctaagtttttcagcgcgccagcggcttccagacctaacaggccgccaccaacaacggcaccgcgtttgctgcgacgggcgcaggattcaatggcgttgaggtcttcaatagtgcgatagacaaagcagtcctgagtatcagaacctttgattggcgggatccacgggtaggaaccggtcgccatgatcagcttgtcataaaaaacggtgcgcccggcgctggagtgaatcaccttctcctgacggttgatggtgatagcgcgttcgccgaccagaactttgatgccgtgtttctcgtagaagccttcgcgcaccagcgacagctcttcggcggtgtggtgagagaagtaagacgagaggtgtacgcggtcataagcgatgcgcggttcttcacagaaaacggtaatatcaaagttggccgcatcagatttatcaagaagatcttcgataaagcgatggccgaccataccgttaccgataattgcgagtctgactttgctcatttttgcctcgatttcttttctattaccgcctaccttaacgattcagcaaccccgcttattgatgtaaatcaaattcacctttatatactccttaaggggtatattgctgatttgtataaattttcttaagtcacggaattgtctgacatttcatgtttgtgcaaaaaatggacaaaatgaacgggtttatagaaatagatgcacgtagcgggggaagagaggaaaaggccggacgacgagagtgccgtccggcatgagcaattaatgagaggtcagggtgttatgctgacggtgacggctgacgaaacctaacaggaagcacatcacaaagacgacagcgtacagaccgtttgctgtaagcagtgccgcctgcggaccgctatgttcaacaatcgggccggtaaccacaaaggtcaacatagtaccgatggttccgcaggtcaggacaaagttaaccagttttggcgacggtactttggtctgctgtgaacccagggtgatgatggtggtatagatcgcgctggagaagaagcccagagcgagaattgaccacgccatatgtgctggtgttccggtgttaaagacgtacatcagaatcgcagccagaccagccagtacggtcagaatgcgttgcaaatcaaagaagcgaagaataaagctgaacgcccacatgccgaccatgtatgacatccagaagttactcaccagcgtgcccgcgtcgttcaggctcatgcccaggcctttggcatactcaggcacccaggagataaaacctaactgaccgaggatgtagcacagcgccgcaacagagagaaacagtacgccgatcccccacttttctttctctaccggagcatccgtttttggcgcatgtttgcccagcgccgggaactcacagccgaaggtcagaataaaaatagcgacatacaccagcccgatgcaggcataaacccagtaccactcaatgctgcgcgccagtagaaacgcggcgatcattgggaaaatcatcccagccatactgaagaaggagtcggtaaataacaggcgggaaccgcgctgacgcccttcatacatttgtgttaccaggaatgtaccaatagacatggtgatgccgctgaccaccccgagaatgaacatcgccgccgagaacagcgccaggctgtggctgaacatcaaaccggcaaccgccagcaccatcaggagaaagccaaaacgtaactgcgttttcaacgggacgatttccatcagccaggcgttgaggaagatagagattaaaatgccggcgttgaggaaggtgaaggtgttactcatactggaaacaggcagattgaaataatcggcgatatttcccatcaccatcccggtgacaataaccaacgcaccagtcagtgcgtaggagagaaagctaatccatgtgagcttgatgcgattgctgttagtcatgattggcctgcgttcaaaaataaaatggcatagcgggatatgccgcgagcgggcgattttaggtgattttgtgatctgtttaaatgttttattgcaatcggttgctaaattgcattttaagaggtgattttgatcacggaataaaaagtgatcgtcaggttacatatatttcagatacgtaaaattaggtaaagggatggccttgttcttgaaggctatttagaatctcttcacttgctttttttctgctctgtttgttaaggaaatctcatgttcaaatcgaccctggcggcgatggctgctgttttcgctctttctgctctttctcccgcagcaatggcagcgaaaggggacccgcacgtattgttgacaacctcagctggtaacatcgaactggagctggataaacaaaaagcgccagtgtctgtgcaaaactttgtcgattatgtgaacagcggtttttataacaacactacctttcaccgcgtcattcctggctttatgattcagggcggcggtttcaccgagcagatgcagcagaaaaaaccaaacccgccaatcaaaaatgaagccgataacggcctgcgcaacacgcgtggcaccatcgcgatggcgcgtaccgctgacaaagacagcgccaccagccagttctttatcaacgttgccgataacgccttccttgaccatggtcagcgtgatttcggttacgcggtatttggtaaagtggtgaaaggcatggacgttgccgataagatttcccaggtgccgactcatgacgttggtccgtaccagaatgtgccgtcaaaaccggtagttatcctttccgctaaagtcctgccgtaatgatttttcgcgcgggcaatcttgcccgcgcttctgctctcccggcgtaacccggatttgccgcttatacttgtggcaaatggacacgttcagggaggcatcaagtgaagaaactcaccgataagcaaaagtcccgtctctgggagcttcagcgtaatcgtaatttccaggccagtcgccgtcttgaaggcgtcgagatgcctttagtcactcttactgccgcagaggctttagcgcgccttgaagagttgaggaggcactatgagcgataaattcggcgaagggcgcgatccgtatctttatcctggccttgatatcatgcgtaaccggctgaacatccaccagcagcagcggctggaacaggccgcttacgaaatgacggcgctgcgtgctgcgaccattgagcttggtccgctggtgcgcggtttaccgcatttgcgcactatccatcgccagctgtatcaggatattttcgactgggcggggcaactgcgtgaagttgatatttatcagggcgatacgccgttctgccactttgcttatatcgaaaaagagggcaatgccctgatgcaggatctggaggaagaaggttatctggttggcctggagaaagcgaagttcgtcgagcggctggcgcattactattgtgaaatcaacgtgctgcatcccttccgtgtgggaagcggactggcacagcggatcttcttcgagcaactggcgattcatgccggatatcaactgagctggcagggtatcgaaaaagaagcctggaatcaggcaaatcagagtggggcaatgggggatctcaccgcgctgcagatgatatttagcaaagtggtaagcgaagccggggaatctgagtaaaatagcgtggttctttcgtaccggagccgccatgatcctgcttatagataactacgattcttttacctggaacctctaccagtacttttgtgaactgggggcggatgtgctggttaagcgcaacgatgcgttgacgctggcggatatcgacgcccttaaaccacaaaaaattgtcatctcacctggcccctgtacgccagatgaagccgggatctcccttgacgttattcgccactatgccgggcgcttgccgattcttggcgtctgcctcggtcatcaggcaatggcgcaggcatttggcggtaaagttgtgcgcgccgcaaaggtcatgcacggcaaaacctcgccgattacacataacggtgagggcgtatttcgggggctggcaaatccacttaccgtgacacgctaccattcgctggtggtggaacctgactcattaccagcgtgctttgacgtgacggcctggagcgaaacccgcgagattatggggattcgccatcgccagtgggatctggaaggtgtgcagttccatccagaaagtattcttagcgaacaaggacatcaactgctggctaatttcctgcatcgctgatttctgattgccatttagtgattttttatgcatattttgtgattataatttcacatttatttatgcgtaacagggtgattatgagatggcaattgaacaaacagcaattacacgcgcgactttcgatgaagtgatcctgccgatttatgctccggcagagtttattccggtaaaaggtcagggcagccgaatctgggatcagcaaggcaaggagtatgtcgatttcgcgggtggcattgcagttacggcgttgggccattgccatcctgcgctggtgaacgcgttaaaaacccagggcgaaactctgtggcatatcagtaacgttttcaccaatgaaccggcgctgcgtcttgggcgtaaactgattgaggcaacgtttgccgaacgcgtggtgtttatgaactccggcacggaagctaacgaaaccgcctttaaactggcacgtcattacgcctgtgtgcgtcatagcccgttcaaaaccaaaattattgccttccataacgcttttcatggtcgctcgctgtttaccgtttcggtgggtgggcagccaaaatattccgacggctttgggccgaaaccggcagacatcatccacgttccctttaacgatctccacgcagtgaaagcagtgatggatgatcacacctgtgcggtggtggttgagccgatccagggcgagggcggcgtgacggctgcgacgccagagtttttgcagggcttgcgcgagctgtgcgatcaacatcaggcattattggtgtttgatgaagtgcagtgcgggatggggcggaccggcgatttgtttgcttacatgcactacggcgtgacgccggatattctgacctctgcgaaagcgttaggcggcggcttcccgattagcgccatgctgaccacggcggaaattgcttctgcgtttcatcctggttctcacggttccacctacggcggtaatcctctggcctgtgcagtagcgggcgcggcgtttgatatcatcaatacccctgaagtgctggaaggcattcaggcgaaacgccagcgttttgttgaccatttgcagaagatcgatcagcagtacgatgtgtttagcgatattcgcggtatggggctgttgattggcgcggagcttaagccacagttcaaaggtcgggcgcgtgatttcctgtatgcgggcgcaggggctggcgtaatggtgctgaatgccggaccggatgtgatgcgttttgcaccgtcgctggtggtggaagatgcggatatcgatgaagggatgcaacgtttcgcccacgcggtggcgaaggtggttggggcgtaaatacgaagcatcaggcaaaagatgtcggatgcggcgtgaatgccttatccgatggtttagcctgcattacgccttcgaatcccgcaacttgcgactcagccaaatcccgtgatgcggtcgctgacgccatgccatcgacgaaatggtgtgcatggtgttcagatgaccaataacccgctgtaaatgctgctccagcgtacctgccgcgccttcgtgcggctgcatctccggcgaatccatgatattggcatcgccagaactccccggttcgtcatattccagtcgctgctgacaacgctgaatggcgatttcacaagactgtaaatactcttgtgccagttcaggtggcaatgcccggtgttcccgcgccagcgtggtcatggcattaatatgctcaacaataaactggctgtgcgttacccacagtttcatatctgccagataatggctgttaaacgccggttcctgcatcgcctgattcaatgagttatacagagtgttatgtgcctgatttacccgcattcgctgccaggccagtggcgtaggttgcggatcctcgctaagaatcaagcgaatcgcttcctgataggcttctaaagcgtcatgggcgtttttacgcaataacccgctctgccactgcggccacagccagacagtaccgccgaaagcaattaaacaaccaataatggtatcgataagacgcggaaggatgtattgctcgccgttcagccacaacagttgcagggtatacactgcggtaatagtaaaaccgaccgttgcccagccgtagtttttgcgcaatatcaggtagctggcgagggtggtaatcagcatcaacgtcagggtgtaaccttcgggaattttaaagtgcagcgccacgcccgcaatgattaacccgaccacggttcccacggagcgattcacaatcctcagacgggttgcgccatagccattttgtgtcaccagcaataccgtcatcaggatccagtacgacttcggcagatgcagcgcggtgcccatcaggctggcaacgcttaacatcacactgagtcgtccggcattgcgtagcgccggagactttagtgacagataacttttcagcgccggaagtaacggcattcgccgctgtttatcggccagtaagtcacgggcatagagcggtttttgggtgcgcagcacgcgggcgatgcggctgaaatgccagtagcagaattgcccaaccggattatccggatgctggcgggcgattttttccagtgcgccaatttgcttttccatcgtaaaacgcgttggcaggcgatggtaaagaatgtcatcagccagcacgcgcaggcgagcggcgacggtttgcgcattccagcggataacttcttccgcatggctacgctcgaccagcttttgcacctcttccggctgatgcaaactgaccgaaatatgttcctgtaaatccagcgcctcctggaaaatacgcagcatccgcttgtagtcagtattattttgcgcggaaagcatatgcatttgctgatagcactgggtaattagatcgaccgctttttgctggcgcaccagcagcggcggcagcgctttttcagggtcggtgtgctgggtaagcaggctgtatttggcttcacaataatctgctagttcacggtacagcagacttagtgactcgcgcagcggttgttcgcgccagatccagaaccaaaaccagttaaacaatccgtaccagagagtgcccaacgcatagatgagcaacggttcccagaccggcatgtatcccgccagactgagggtaaaaatggctgccagcagcgatgcgggaagcaattttgcgtgcaatggccccaactcagcagtgacgccaagtaccagcgttaatccggtcagcaaaaagggcaggggaacatcttttgccagtagcagctgtgtcagcaagctacaggctgcaaacagcgacgcaccaatgattaagcgtttgaaaaaacgtttatgaggcgtatcaaggcccgcaatattgcaacaggcaggaacgagggagaagagcagaccgaatcgtaattcgccaagcattaacccaacggccacgggcaaacagagcaccagcgtttgccgcagtgcatagttaatatcggggtgataaatcagtctgcgccacatcgggggaaacaaaatggcgcgctactcagtaacgcgccactccgacgggattaacgagtgccgtaaacgacgatggttttaccgtgtgcggagatcaggttctgatcttccagcatcttcagaatgcgtcccacggtttcacgagaacagccgacaatctgaccgatttcctgacgggtaattttgatttgcataccgtccgggtgagtcatagcatctggttgttttgccaggttcagcagagtctgtgcaatgcggcccgtcacgtcgaggaacgccaggttgcccactttctctgaagtgacttgcagacgacgcgccatctgtgcagacagacgcatcagaatgtccgggtttacctgaatcaattggcgaaattttttgtacgaaatttcagccacttcacaggcggttttcgcacgtacccatgcgctacgttcctggccctcttcaaacaggcccagttcgccaataaaatcaccctgattcagataggagaggatcatttctttaccctcttcgtctttgatcagcactgccacagagcctttaacgatgtagtacagcgtttccgctttttcaccctggtgaataagcgtgctcttggatgggtacttatgaatgtggcaatgagacaagaaccattcgagagtcgggtctgtttgcggtttgccaagcaccatgcgcggttatcctctgttataagctttctccagagccagataacgccgctgtctctggattgccgaaatatgcttcccgctacctgggaaggggctatcaactgtactgcacggtaatgtgacgtcctttgcatacatgcagtacatcaatgtattactgtagcatcctgactgttttagcatagctttcgctttgtgtctcctggtgtctcgcttcagcatgacccaggtcgccttccgttgcgcgatttggttagtacgcgtactctgtcaggaaaattgacgcagtggagtagcaaaaatgcaagcgcgagtgaagtgggtcgaagggttaacttttctgggcgaatccgcctctggtcatcagattttaatggacggcaactcaggcgataaagcaccaagtccgatggaaatggtgttgatggcggcgggtggttgcagtgccatcgatgtggtttcgatcctgcaaaaagggcgtcaggatgtggtcgattgtgaagtaaaattgacctctgaacgccgcgaagaggcaccacgcctgtttacgcacattaatctgcattttatcgtcaccggtcgcgacctgaaagacgcagcggttgcgcgtgcggttgatctctctgctgagaaatattgttcagtggcgttgatgctggaaaaagcggtgaatattactcactcgtatgaagtggttgccgcgtgatttaactatcccgttgtgaagccggatagtattttatccggcgtaatagcagagttactcgattttctttccttccatcaatcgttgcaccagcggcagcataattaattccattgccagacccattttgccgccgggcaccactaacgtattgatgtgggaaatgaatgagccttgcaacatcgccagcagccaggggaaatcgatcccttccagattacgaaaatggatcaccacaaagctttcatccagcgacgggataccttttgccgcgaacgggtttgaagtgtcgacggtgggaacgcgctggaagttaagatgggtgcgggaaaactgcggtgtgatgtagttgatatagtcttccattgaacgcactaccgagtccatcactgcttctcgtgagtgcccgcgctcgctggtgtcgcggatcagtttttgaatccactcaaggttaacgataggcactacgccgaccagtaagtccacatgctgcgcaacgttatgctgtggcgtgactacgccgccgtgtaaaccttcataaaacagtacatcagtgggttctggtaaaggttgccagggggtgaatgttcccggtacctgattccagggtacggcttcgtcgtaggtatgcagatatttgcgagatttccctttgccgctctgaccgtattcaatgaaggtttgttccagcaggccgaagtcgttcgcttcggggccgaagtagctgatatgccgcccggcgtcgcgcgctttgcggatcgccatgtccatttccgggcgggtgtaacggtgaaaactgtcgccttccacctcagctgcatgcagatttaactgcgcgaatattttacgaaacgcgaggctggtggtggtggtccccgcgccgctggatcctgttaccgcaatgaccggatgtttggcagacatagtaactccatgacttagctatcattattatctcgtccgccgacggttgcaggttattcgcgaaactgactgcgcggcataatattgaccgtttcgtgcagctccgaccataccagcaccgcttctccgcactgtagctggcgtttgacgtcggcgactttctgttcaagtgtacgctcatgttcaccataatcggtgccttcacgtaacacaaagctttcaattaaattttccagcgtttcgggggagaggtcttgccacggaatcaacatgatttcgcctccagatacgttgttaaccagtcaggaatgcgtgactccagccacatttgcggatgaagtaatgtaccgccaataaagccaacatgaccgccatgttcagtcagttgatactccacctgcgaggggagactttccggtttcgggatcacctgatgatccataaacggatcgtctttggcgtgaataatcagcgtcggtttggcgatccggttcagcatcggcatggcgctacactgacgataatagtcgatagcgtcggcgtagccgtgaattctggcggtgattagatcgtcaaattcacggatgcgacgtaccgattttaactgcgcgagattaatcggcagcgttccggggtaggctgccagcttgcgcgcggcattggcttttaacaggttcagcaagtaacgctgataaacgcgggaaaagcccttttccatatgatagctacaggcttccagcataaacggcgcagagacaatcaccgccgcatcaaccgggagatcattgccttcctttgccagcaaacaggccagcatattaccgccgagcgaatagccgacggcagccgttggcgcatgaccaaattcgcgttgcagccagcgtaaaaaccaactggcgtcttcggtttcgcccgaatggtaaatgcggtgcatacggtttggttcaccgctgcatccgcgaaaatgcatcaccacgcccagccagccgcgcttttgcgccgcctcaaccagaccgtgggcgtaagggctattgagactgccttccagcccgtgaaataccactaaacgcggtttatgccgagcctgtgcaggggcttcactccacgcgagatcgacaaaatcgccgtcgggcaactccagccgctgccagtacggggtgaatttcaccttgcgacgaaacagacgcggcagcatggtttgcagatgacaattgctaaagccgcgcataggggtgaattcagcactgctgctgaattcattggcatcggtcgtcgttatctgcgccatcagttgctttggccttccagcaacatctgctcaagctgctcctgggcttccagccatgccatttcgcactcttccaggccggatttggcgctggcttgctgttgcaggcaggcggtcaactccgctttacggctctggtcatacagttcgctgtcgccgagtttctcttctgcctgcgccagttgcgcgttcagcttctccatctctttttccagacgggcaatctctttacgcagtggctgggtttgcgcacgcaactccgcttcccgacgcttctgatctttacgtgcctgggcgctgttcgcgttctcttttggcgcttcgtcggcctggttttcctgcttttgtacgtcgctcaaccactgttgataatcttccagatcgccgtcgaacggttcgactttacgatcgtgaaccaggtagagatcgtcagtggtggaacgcagcaaatgacggtcgtgcgaaacgacaaccagcgcgccttcgaactcgattaatgcttcggtgagtgcctgacgcatgtcgaggtcaaggtggttagtcggttcgtcgagcagcagcagattcggacgctgccagacaattaatgccagcaccaggcgggctttttccccacctgagaagcggcgcgtttcttcggttactttatcgccctggaaaccaaagccgccgaggtagtcacgcagtttttgttccagctcctgcggcgctaaacgtgccagatgttgaataggtgattcgtcggcgcgcaggtattcaagttgatgctgggcgaagtagccgagcttgatccctttcgccagaccaatttcaccgctgactggcgcaagttcaccggctaacagtttgattaatgtcgatttacccgcgccgttgcggcctaacagaccaatgcgcgagccgggcaccaggttcagtttaatcgagtcgagaataatgcgatcgccatagcccgcgctgactttttccatcttcagtaacggatttggcaggctttccggcgcgcggaagctaaagcggaacgggttgtcgacgtgcgcgggggcaatcagctccatacgctcgagcatcttaatgcggctctgggcctgcttcgctttggtggctttggcacggaaacggtcgatataactttgcagatgcgctacgcgttcctgctggctttcatacatcgcttgttgctgcgccagacgggtggcgcgctgtacttcaaacgaactgtagttaccggtgtactcgaacatgctttgttgttcgatatgaataattttatcaacgatcggatcgaggaagtcgcggtcgtgagagatcaggatcagcgtgccctgatagctcttcaaccatttttccagccagataacggcatcgagatcgaggtggttagtcggttcgtcgagcagcagcaagtctgaacggcaaatcagcgcctgggcaaggttaagacgcatacgccagcccccggaaaaatcacttaccgggcgctccagttgttcattgctgaaaccgaggccgtgcagcaggctggcagcacgggagcgaatactccatgcgtcaatagcatccagcttgccatgaatggtcgcaatggcgtgcccgtcgttacgttcgttggcgtcgtgtagctgcgcttctagttgacgatattcacggtcgccgtcaatgacatattccagcgccgcttgcggtaacgccggcgtttcctgattcacccacgccagttgccagcttcccggaaaggtgtagctgccgccgtcggcgctgatttcatttttcagcaatgccagcagggtagatttaccacagccgtttttacccaccaggccgactttctgccctgggttgatggtggcggtggcattatccagcaggacgcgcacgccgcgacgaatttgtaacgaggagaaaacaatcataaggtgccgtatgttcagactatgttaacttatcattatgataatgtaatgtatgggcgagctgccgcaccgggcgcaatggtagcccaaaacagcgactatacacaaaaaccataccgggagggggatgatgtctcagccagcgaaagttttgctgctgtatgcccatccggaatctcaggactcggtggcaaaccgggtactgcttaaaccggccacgcagctcagcaatgttaccgtgcacgacctttacgcgcactatcccgatgtttttattgagatcccccgtgagcaggcattactgcgcgagcacgaggtgattgtctttcagcatcctctttatacctatagctgcccggcgctactgaaagagtggctggaccgggtattaagtcgtggttttgccagcgggccgggaggaaaccaactggcgggaaagtactggcgtagcgtgattaccaccggcgagccagaaagtgcttaccgttatgacgcgctgaatcgctacccgatgagcgatgtgctgcgcccctttgaactggcggcgggcatgtgccggatgcattggttaagtcccatcattatttactgggcgagacggcaaagcgcacaggagctggcgagccacgccagagcctacggtgactggctggcaaatccgctgtctccaggaggccgctgatggaaggttccgattttttactcgcaggagtgctgtttctcttcgcggcggtggctgcggtgccgctggcatcgcggctgggtattggcgctgtgttgggatatttgctggcagggattgcaattggcccgtgggggctggggtttattagcgacgtcgatgagatcctccacttttcggaactcggcgtggtattcctgatgtttatcatcggccttgagttgaatccctccaaactttggcaactgcggcgttcgatttttggcgtaggcgcggcacaggtgctgttaagcgcggcgttgctggcgggattattgatgctgacggatttcgcctggcaggcggcggtggtcggtggcattggccttgcgatgtcttcaactgcaatggcattgcaattgatgcgtgagaaagggatgaatcgcagcgaatccggccagctcgggttttcggttctgctgtttcaggatctggcagtaatcccagcactggcgttagtgccgttgttggcggggtcggcagacgaacatttcgactggatgaagatcggcatgaaggtgctggcgtttgtcggcatgctgattggtgggcgctatttactgcgtccggtattccgctttattgcagcttctggcgtgcgggaagtgttcaccgccgcgacgctgctgctggtgttgggttccgcattgtttatggatgcgctggggctgtcgatggcgctcggtacatttattgcgggcgtgctgctggcggaaagtgaatatcgccatgaactggaaacggctatcgatcccttcaaaggcttgctgctcggtttgttctttatctctgtcggcatgtcactcaacctcggggtgctttatacnnnnnnnnnnttgtatggcgtgcgtagctcagagcggatgcagtttgctggcgtgttgagtcagggtggtgagtttgcctttgtcctcttttctaccgcttcttcacaacgcttattccagggcgaccagatggcgttgttgctggtgacggtgacgctttccatgatgaccacgccgttgctgatgaagctggtggataaatggctatcccgccagtttaacggaccggaagaagaagacgaaaaaccgtgggtcaacgatgataaaccccaggtcattgtcgtgggcttcgggcgttttggtcaggtgattggtcgtttgctgatggcaaataaaatgcgcattaccgtgctggagcgggatatcagcgccgttaacctgatgcgtaaatacggctacaaagtttattacggcgacgccacgcaggtcgatcttttacgttctgcgggtgcagaggccgctgagtctatcgtcattacctgtaacgagccggaagacaccatgaagctggtggaaatatgccagcagcactttccgcatttgcatattcttgcgcgagcgcgcggacgtgtggaagcgcatgagttattacaggcaggggtgacgcagttttcccgtgaaacattctccagtgcgttagagctggggcgcaagacgctggtcacgcttggcatgcatccgcatcaggcacagcgagcgcaactgcattttcgccgcctggatatgcggatgctgcgagagctcatcccaatgcatgccgataccgtacaaatttctcgcgccagggaagcccgacgcgaactggaagagattttccagcgtgaaatgcaacaagaacgacgccagctggacggctgggatgaatttgagtagagggtaaagatggcaatccgaaaacgttttattgcgggcgcaaaatgcccggcctgtcaggcgcaggattcaatggcgatgtggcgcgaaaataatattgatattgttgaatgtgttaagtgcggacatcagatgcgagaagcagacaaagaagcccgcgatcacgttcgcaaagatgagcaagtgatcgggatttttcatccggactagcgatatgcgccgagtttttttaagctagtgagtacacggctgcagaattccgctacaatctgcgccactattcttcccatgctcaggagatatcatgaaagtagcaaaagacctggtggtcagcctggcctatcaggtacgtacagaagacggtgtgttggttgatgagtctccggtgagtgcgccgctggactacctgcatggtcacggttccctgatctctggcctggaaacggcgctggaaggtcatgaagttggcgacaaatttgatgtcgctgttggcgcgaacgacgcttacggtcagtacgacgaaaacctggtgcaacgtgttcctaaagacgtatttatgggcgttgatgaactgcaggtaggtatgcgtttcctggctgaaaccgaccagggtccggtaccggttgaaatcactgcggttgaagacgatcacgtcgtggttgatggtaaccacatgctggccggtcagaacctgaaattcaacgttgaagttgtggcgattcgcgaagcgactgaagaagaactggctcatggtcacgttcacggcgcgcacgatcaccaccacgatcacgaccacgacggttgctgcggcggtcatggccacgatcacggtcatgaacacggtggcgaaggctgctgtggcggtaaaggcaacggcggttgcggttgccactaataccgaaaaagtgacaaaaaagcggggaatccccgctttttttacgcctcaataatgtggcggtggcgtttcttcagcctgcgacgcgatgttcgacggctggctggcttttaacttctcggtcagcagacgcagatgatcgcgcagtttcgccatctccatttcatgagcggtcaccgtgacgttcagttcttcaatggtgatttcctgaaaagccagtcggctctccagctctgccaggcgtgtttccaatgataaatcctgcatgattcacctcttttgtcgaatggtcgccgcggattctacttaactttgctgcccgagacagcactcatttcgcggtcatcgaaactaatttaaacaaaaagagtctgaaaatagatgataatagggcgtgtctgtatgtagatttgttcgacaacgctttatagtacccttctgataatagttaaccctggggtgagatgccccgatcctggagatatggatgaaatcactgtttaaagtaacgctgctggcgaccacaatggccgttgccctgcatgcaccaatcacttttgctgctgaagctgcaaaacctgctacaactgctgacagcaaagcagcgttcaaaaatgacgatcagaaatcagcttatgcactgggtgcctcgctgggtcgttacatggaaaactctctaaaagaacaagaaaaactgggcatcaaactggataaagatcagctgatcgctggtgttcaggatgcatttgctgataagagcaaactctccgaccaagagatcgaacagactctgcaagcattcgaagctcgcgtgaagtcttctgctcaggcgaagatggaaaaagacgcggctgataacgaagcaaaaggtaaagagtaccgcgagaaatttgccaaagagaaaggtgtgaaaacctcttcaactggtctggtttatcaggtagtagaagccggtaaaggcgaagcaccgaaagacagcgatactgttgtcgtgaactacaaaggtactctgatcgacggtaaagagttcgacaactcttacactcgnnnnnnnnnnctttccgtctggacggtgttatcccgggttggacagaaggtctgaagaacatcaagaaaggcggtaagatcaaactggttattccaccagaactggcttacggcaaagcgggtgttccggggatcccaccgaattctaccctggtgtttgacgtagagctgttggacgtgaaaccagcgccgaaggctgatgcaaagccggaagctgatgcgaaagccgcagattctgctaaaaaataagcattaagaaccgccgcctgaccaggcggcggtttttttattacaggccggatataattagtgctggaaagcggaacctccgctgtattaatttagttacccgcatcattaatgagcctgccctgaaaagttaacgacaggctcctgaaaaggagtgttttttttcatgtccaggtcgcttttaaccaacgaaaccagtgagttggatttactggatcaacgtcctttcgaccagaccgattttgatattctgaaatcctacgaagcggtggtggacgggttagcgatgcttattggctcccactgtgaaatcgttttgcactctttgcaggatctaaaatgttcagccattcgcattgctaacggtgaacatacaggccggaagattggttcgccaattactgacctggcgctacgtatgctgcacgatatgacgggagcggatagcagcgtttctaaatgctactttactcgcgccaaaagcggcgtattaatgaagtccctgactatcgcgattcgtaaccgcgaacagcgtgtaattggtctgctgtgcatcaatatgaatcttgatgttcccttctcgcagattatgagcacttttgtgccgccagaaaccccggatgtcggttcaagcgtcaactttgcctcttctgttgaagatctggttacccaaacgctggagttcaccatcgaagaagtaaatgccgatcgcaatgtttctaataacgccaaaaatcgtcagatcgtgctgaatctctacgagaaagggatcttcgatattaaagacgcgatcaaccaggttgctgaccgcctgaacatctccaaacacactgtctatctctacatccgccagttcaaaagcggtgatttccaggggcaagataagtaatgcgttttgccatcgtggtgaccgggccagcatacggtacgcaacaggcgagtagtgcttttcagtttgcgcaggcgctgatagtagaaggccatgagttaagcagcgtctttttctatcgggaaggggtctataacgctaaccaattgacctcaccggcaagtgacgaatttgaccttgtgcgcggctggcaacagttgaatgcgcaacatggtgtggcgctgaatatctgcgtagcggcagcgttacgccgcggtatcgtcgatgaaactgaagcaggaaggctggggctggcttcgtcaaaccttcagccgggatttaccttaagcggacttggcgcgctggcggaagcctcgctgacctgtgacagggtggtacagttctgatgaaacgaattgcgtttgttttttctactgcacctcatggtacagctgctggtcgggaaggtttagatgctttactggcaacttccgcattaactgacgatctggccgtcttctttattgctgatggcgtttttcagctgctgtcaggacaaaagcccgatgcagtgctggcgcgtgattacattgccacttttaaattgttgggtctgtacgacattgaacagtgctgggtttgtgcggcttcactgcgcgaacgcgggttagatccgcagacaccctttgttgtcgaagccacgccgctcgaagcagatgccttacgccgcgaactcgccaactacgatgttattttgaggttttgaggcgtttatgctgcacacgttacatcgttcaccctggctgacggattttgctgcgctgctgcgtctgctcagtgaaggagacgaactgctattattgcaagatggcgtaactgccgcagttgacggtaaccgctaccttgaaagtctgcgtaatgcccccattaaggtctatgccctgaacgaagaccttattgcccgcggtttgactggtcaaatttcgaacgacatcattcccattgactatactgatttcgtcagacttacggttaagcactccagccagatggcctggtgatggcgggatcgttgtatatttcttgacaccttttcggcatcgccctaaaattcggcgtcctcatattgtgtgaggacgttttattacgtgtttacgaagcaaaagctaaaaccaggagctatttaatggcaacagttaaccagctggtacgcaaaccacgtgctcgcaaagttgcgaaaagcaacgtgcctgcgctggaagcatgcccgcaaaaacgtggcgtatgtactcgtgtatatactaccactcctaaaaaaccgaactccgcgctgcgtaaaggatgccgtgttcgtctgactaacggtttcgaagtgacttcctacatcggtggtgaaggtcacaacctgcaggagcactccgtgatcctgatccgtggcggtcgtgttaaagacctcccgggtgttcgttaccacaccgtacgtggtgcgcttgactgctccggcgttaaagaccgtaagcaggctcgttccaagtatggcgtgaagcgtcctaaggcttaatggttctccgttaagtaaggccaaacgttttaacttaaatgtcaaactaaactcgtagagttttggacaatcctgaattaacaacggagtatttccatgccacgtcgtcgcgtcattggtcagcgtaaaattctgccggatccgaagttcggatcagaactgctggctaaatttgtaaatatcctgatggtagatggtaaaaaatctactgctgaatctatcgtatacagcgcgctggagaccctggctcagcgctctggtaaatctgaactggaagcattcgaagtagctctcgaaaacgtgcgcccgactgtagaagttaagtctcgccgcgttggtggttctacttatcaggtaccagttgaagtccgtccggttcgtcgtaatgctctggcaatgcgttggatcgttgaagctgctcgtaaacgcggtgataaatccatggctctgcgcctggcgaacgaactttctgatgctgcagaaaacaaaggtactgcagttaagaaacgtgaagacgttcaccgtatggccgaagccaacaaggcgttcgcacactaccgttggtaatcccttcggagttttagtcaccaggcgggcgcttccagtaagcagcccgctttgggctacttaaattgaacgcctaaaagataaacgaggaaacaaatggctcgtacaacacccatcgcacgctaccgtaacatcggtatcagtgcgcacatcgacgccggtaaaaccactactaccgaacgtattctgttctacaccggtgtaaaccataaaatcggtgaagttcatgacggcgctgcaaccatggactggatggagcaggagcaggaacgtggtattaccatcacttccgctgcgactactgcattctggtctggtatggctaagcagtatgagccgcatcgcatcaacatcatcgacaccccggggcacgttgacttcacaatcgaagtagaacgttccatgcgtgttctcgatggtgcggtaatggtttactgcgcagttggtggtgttcagccgcagtctgaaaccgtatggcgtcaggcaaacaaatataaagttccgcgcattgcgttcgttaacaaaatggaccgcatgggtgcgaacttcctgaaagttgttaaccagatcaaaacccgtctgggcgcgaacccggttccgctgcagctggcgattggtgctgaagaacatttcaccggtgttgttgacctggtgaaaatgaaagctatcaactggaacgacgctgaccagggcgtaaccttcgaatacgaagatatcccggcagacatggttgaactggctaacgaatggcaccagaacctgatcgaatccgcagctgaagcttctgaagagctgatggaaaaatacctgggtggtgaagaactgactgaagcagaaatcaaaggtgctctgcgtcagcgcgttctgaacaacgaaatcatcctggtaacctgtggttctgcgttcaagaacaaaggtgttcaggcgatgctggatgcggtaattgattacctgccatccccggttgacgtacctgcgatcaacggtatcctggacgacggtaaagacactccggctgaacgtcacgcaagtgatgacgagccgttctctgcactggcgttcaaaatcgctaccgacccgtttgttggtaacctgaccttcttccgtgtttactccggtgtggttaactctggtgataccgtactgaactccgtgaaagctgcacgtgagcgtttcggtcgtatcgttcagatgcacgctaacaaacgtgaagagatcaaagaagttcgcgcgggcgacatcgctgctgctatcggtctgaaagacgtaaccactggtgacaccctgtgtgacccggatgcgccgatcattctggaacgtatggaattccctgagccggtaatctccatcgcagttgaaccgaaaaccaaagctgaccaggaaaaaatgggtctggctctgggccgtctggctaaagaagacccgtctttccgtgtatggactgacgaagaatctaaccagaccatcatcgcgggtatgggcgaactgcacctcgacatcatcgttgaccgtatgaagcgtgaattcaacgttgaagcgaacgtaggtaaaccgcaggttgcttaccgtgaaactatccgccagaaagttaccgatgttgaaggtaaacacgcgaaacagtctggtggtcgtggtcagtatggtcatgttgttatcgacatgtacccgctggagccgggttcaaacccgaaaggctacgagttcatcaacgacattaaaggtggtgtaatccctggcgaatacatcccggccgttgataaaggtatccaggaacagctgaaagcaggtcctctggcaggctacccggtagtagacatgggtattcgtctgcacttcggttcttaccatgacgttgactcctctgaactggcgtttaaactggctgcttctatcgcctttaaagaaggctttaagaaagcgaaaccagttctgcttgagccgatcatgaaggttgaagtagaaactccgtaagagaacaccggtgacgttatcggtgacttgagccgtcgtcgtggtatgctcaaaggtcaggaatctgaagttactggcgttaagatccacgctgaagtaccgctgtctgaaatgttcggatacgcaactcagctgcgttctctgaccaaaggtcgtgcatcatacactatggaattcctgaagtatgatgaagcgccgagtaacgttgctcaggccgtaattgaagcccgtggtaaataagcctaagggttaataccaaagtcccgtgctctctcctgaaggggagagcactatagtaaggaatatagccgtgtctaaagaaaaatttgaacgtacaaaaccgcacgttaacgttggtactatcggccacgttgaccacggtaaaactactctgaccgctgcaatcaccaccgtactggctaaaacctacggcggtgctgctcgtgcattcgaccagatcgataacgcgccggaagaaaaagctcgtggtatcaccatcaacacttctcacgttgaatacgacaccccgacccgtcactacgcacacgtagactgcccggggcacgccgactatgttaaaaacatgatcaccggtgctgctcagatggacggcgcgatcctggtagttgctgcgactgacggcccgatgccgcagactcgtgagcacatcctgctgggtcgtcaggtaggcgttccgtacatcatcgtgttcctgaacaaatgcgacatggttgatgacgaagagctgctggaactggttgaaatggaagttcgtgaacttctgtctcagtacgacttcccgggcgacgacactccgatcgttcgtggttctgctctgaaagcgctggaaggcgacgcagagtgggaagcgaaaatcctggaactggctggcttcctggattcttatattccggaaccagagcgtgcgattgacaagccgttcctgctgccgatcgaagacgtattctccatctccggtcgtggtaccgttgttaccggtcgtgtagaacgcggtatcatcaaagttggtgaagaagttgaaatcgttggtatcaaagagactcagaagtctacctgtactggcgttgaaatgttccgcaaactgctggacgaaggccgtgctggtgagaacgtaggtgttctgctgcgtggtatcaaacgtgaagaaatcgaacgtggtcaggtactggctaagccgggcaccatcaagccgcacaccaagttcgaatctgaagtgtacattctgtccaaagatgaaggcggtcgtcatactccgttcttcaaaggctaccgtccgcagttctacttccgtactactgacgtgactggtaccatcgaactgccggaaggcgtagagatggtaatgccgggcgacaacatcaaaatggttgttaccctgatccacccgatcgcgatggacgacggtctgcgtttcgcaatccgtgaaggcggccgtaccgttggcgcgggcgttgtagcaaaagttctgagctaattgccgataacatttgacgcaatgcgcactaaaagggcatcatttgatgccctttttgcacgctttcgtaccagaacctggctcatcagtgattttctttgtcataatcattgctgagacaggctctgttgagggcgtataatccgaaaagctaatacgcgtttcgatttggtttgcctcgcgatcgcggggtgaaaatgtttgtagaaaacttctgacaggttggtttatgagtgcgaataccgaagctcaaggaagcgggcgcggcctggaagcgatgaagtgggtcgttgtggtggcattgctcctggtggcgattgtcggcaactacctttatcgcgacattatgctgccgctgcgtgcgctggccgtagtaattctgattgctgcagcgggtggtgtcgcgctgttaacgacaaaaggtaaagctaccgttgcttttgcccgtgaagcgcgtaccgaagtccgtaaggtcatttggccgactcgccaggaaacattgcacaccacgctgattgtggctgcggttaccgcagtaatgtcactgatcctgtggggactggatggtattctggttcgcctggtatcctttatcactggcctgaggttctgagatgtctgaagctcctaaaaagcgctggtacgtcgttcaggcgttttccggttttgaaggccgcgtagcaacgtcgctgcgtgagcatatcaaattacacaacatggaagatttgtttggtgaagtcatggtaccaaccgaagaagtggttgaaatccgtggcggtcagcgtcgcaaaagcgaacgtaaattcttccctggctacgtcctcgttcagatggtgatgaacgacgcgagctggcacctggtgcgcagcgtaccgcgtgtgatgggcttcatcggcggtacttccgatcgtcctgcgccaatcagcgataaagaagtcgatgcgattatgaaccgcctgcagcaggttggtgataagccgcgtccgaaaacgctgtttgaaccgggtgaaatggtccgtgttaatgatggtccgttcgctgacttcaacggtgttgttgaagaagtggattacgagaaatctcgtctgaaagtgtctgtttctatcttcggtcgtgcgaccccggtagagctggacttcagccaggttgaaaaagcctaacccagcgatcaaaaaagcggcgatttaatcgttgcacaaggcgtgagattggaatacaatttcgcgccttttgtttttatgggccttgcccgtaaaacgattttttatatcacggggagcctctcagaggcgttattacccaacttgaggaatttataatggctaagaaagtacaagcctatgtcaagctgcaggttgcagctggtatggctaacccgagtccgccagtaggtccggctctgggtcagcagggcgtaaacatcatggaattctgcaaagcgttcaacgcaaaaactgattccatcgaaaaaggtctgccgattccggtagtaatcaccgtttacgctgaccgttctttcactttcgttaccaagactccgccggcagcagttctgctgaaaaaagcggctggtatcaagtctggttccggtaagccgaacaaagacaaagtgggtaaaatttcccgcgctcagctgcaggaaatcgcgcagaccaaagctgccgacatgactggtgccgacattgaagcgatgactcgctccatcgaaggtactgcacgttccatgggcctggtagtggaggactaagaaatggctaaactgaccaagcgcatgcgtgttatccgcgagaaagttgatgcaaccaaacagtacgacatcaacgaagctatcgcactgctgaaagagctggcgactgctaaattcgtagaaagcgtggacgtagctgttaacctcggcatcgacgctcgtaaatctgaccagaacgtacgtggtgcaactgtactgccgcacggtactggccgttccgttcgcgtagccgtatttacccaaggtgcaaacgctgaagctgctaaagctgcaggcgcagaactggtaggtatggaagatctggctgaccagatcaagaaaggcgaaatgaactttgacgttgttattgcttctccggatgcaatgcgcgttgttggccagctgggccaggttctgggtccgcgcggcctgatgccaaacccgaaagtgggtactgtaacaccgaacgttgctgaagcggttaaaaacgctaaagctggccaggttcgttaccgtaacgacaaaaacggcatcatccacaccaccatcggtaaagtggactttgacgctgacaaactgaaagaaaacctggaagctctgctggttgcgctgaaaaaagcaaaaccgactcaggcgaaaggcgtgtacatcaagaaagttagcatctccaccaccatgggtgcaggtgttgcagttgaccaggctggcctgagcgcttctgtaaactaatgcctttacgtgggcggtgattttgtctacaatcttacccccacgtataatgcttaatgcagacgtatatccgagatattcgggttgtggcaaggcggcaactgagtgagtcgccaggagcatagctaactatgtgactggtgcgaatgaaggaagccaacgccgccacaagttgaatagcgacggatagaaaagatttgttcgttggagcctggcctatccaggcctccgtcgaagaccgcaggagtttcgcaagaaacttaatcccctgcgtagacggtgacagaacgctaagattattcttttatattctggcttgtttctgctcaccgtaattaagacgctctctccgtttggaggagtgaagtgagttccagagattttctctggcaaacatccaggagcaaagctaatggctttaaatcttcaagacaaacaagcgattgttgctgaagtcagcgaagtagccaaaggcgcgctgtctgcagtagttgcggattcccgtggcgtaactgtagataaaatgactgaactgcgtaaagcaggtcgcgaagctggcgtatacatgcgtgttgttcgtaacaccctgctgcgccgtgctgttgaaggtactccgttcgagtgcctgaaagacgcgtttgttggtccgaccctgattgcatactctatggaacacccgggcgctgctgctcgtctgttcaaagagttcgcgaaagcgaatgcaaaatttgaggtcaaagccgctgcctttgaaggtgagctgatcccggcgtctcagatcgaccgcctggcaactctgccgacctacgaagaagcaattgcacgcctgatggcaaccatgaaagaagcttcggctggcaaactggttcgtactctggctgctgtacgcgatgcgaaagaagctgcttaatcgcagttatctttttaacgcattcgcttacgtataaacttattctgatattcaggaacaatttaaatgtctatcactaaagatcaaatcattgaagcagttgcagctatgtctgtaatggacgttgtagaactgatctctgcaatggaagaaaaattcggtgtttccgctgctgctgctgtagctgtagctgctggcccggttgaagctgctgaagaaaaaactgaattcgacgtaattctgaaagctgctggcgctaacaaagttgctgttatcaaagcagtacgtggcgcaactggcctgggtctgaaagaagctaaagacctggtagaatctgcaccggctgctctgaaagaaggcgtgagcaaagacgacgcagaagcactgaaaaaagctctggaagaagctggcgctgaagttgaagttaaataagccaacccttccggttgcagcctgagaaatcaggctgatggctggtgactttttagtcaccagcctttttgcgctgtaaggcgccagtagcgtttcacactgtttgactactgctgtgcctttcaatgcttgtttctatcgacgacttaatatactgcgacaggacgtccgttctgtgtaaatcgcaatgaaatggtttaagcgtgatagcaacaggcattgcggaaagtgttccattttccggtcaacaaaatagtgttgcacaaactgtccgctcaatggacagatgggtcgacttgtcagcgagctgaggaaccctatggtttactcctataccgagaaaaaacgtattcgtaaggattttggtaaacgtccacaagttctggatgtaccttatctcctttctatccagcttgactcgtttcagaaatttatcgagcaagatcctgaagggcagtatggtctggaagctgctttccgttccgtattcccgattcagagctacagcggtaattccgagctgcaatacgtcagctaccgccttggcgaaccggtgtttgacgtccaggaatgtcaaatccgtggcgtgacctattccgcaccgctgcgcgttaaactgcgtctggtgatctatgagcgcgaagcgccggaaggcaccgtaaaagacattaaagaacaagaagtctacatgggcgaaattccgctcatgacagacaacggtacctttgttatcaacggtactgagcgtgttatcgtttcccagctgcaccgtagtccgggcgtcttctttgactccgacaaaggtaaaacccactcttcgggtaaagtgctgtataacgcgcgtatcatcccttaccgtggttcctggctggacttcgaattcgatccgaaggacaacctgttcgtacgtatcgaccgtcgccgtaaactgcctgcgaccatcattctgcgcgccctgaactacaccacagagcagatcctcgacctgttctttgaaaaagttatctttgaaatccgtgataacaagctgcagatggaactggtgccggaacgcctgcgtggtgaaaccgcatcttttgacatcgaagctaacggtaaagtgtacgtagaaaaaggccgccgtnnnnnnnnnngtatcactgcgcgccacattcgccagctggaaaaagacgacgtcaaactgatcgaagtcccggttgagtacatcgcaggtaaagtggttgctaaagactatattgatgagtctaccggcgagctgatctgcgcagcgaacatggagctgagcctggatctgctggctaagctgagccagtctggtcacaagcgtatcgaaacgctgttcaccaacgatctggatcacggcccatatatctctgaaaccttacgtgtcgacccaactaacgaccgtctgagcgcactggtagaaatctaccgcatgatgcgccctggcgagccgccgactcgtgaagcagctgaaagcctgttcgagaacctgttcttctccgaagaccgttatgacttgtctgcggttggtcgtatgaagttcaaccgttctctgctgcgcgaagaaatcgaaggttccggtatcctgagcaaagacgacatcattgatgttatgaaaaagctcatcgatatccgtaacggtaaaggcgaagtcgatgatatcgaccacctcggcaaccgtcgtatccgttccgttggcgaaatggcggaaaaccagttccgcgttggcctggtacgtgtagagcgtgcggtgaaagagcgtctgtctctgggcgatctggataccctgatgcctcaggatatgatcaacgccaagccgatttccgcagcagtgaaagagttcttcggttccagccagctgtctcagtttatggaccagaacaacccgctgtctgagattacgcacaaacgtcgtatctccgcactcggcccaggcggtctgacccgtgaacgtgcaggcttcgaagttcgagacgtacacccgactcactacggtcgcgtatgtccaatcgaaacccctgaaggtccgaacatcggtctgatcaactctctgtccgtgtacgcacagactaacgaatacggcttccttgagactccgtatcgtaaagtgaccgacggtgttgtaactgacgaaattcactacctgtctgctatcgaagaaggcaactacgttatcgcccaggcgaactccaacctggatgaagaaggccacttcgtagaagacctggtaacttgccgtagcaaaggcgaatccagcttgttcagccgcgaccaggttgactacatggacgtatccacccagcaggtggtatccgtcggtgcgtccctgatcccgttcctggaacacgatgacgccaaccgtgcattgatgggtgcgaacatgcaacgtcaggccgttccgactctgcgcgctgataagccgctggttggtactggtatggaacgtgctgttgccgttgactccggtgtaactgcggtagctaaacgtggtggtgtcgttcagtacgtggatgcttcccgtatcgttatcaaagttaacgaagacgagatgtatccgggtgaagcaggtatcgacatctacaacctgaccaaatacacccgttctaaccagaacacctgtatcaaccagatgccgtgtgtgtctctgggtgaaccggttgaacgtggcgacgtgctggcagacggtccgtccaccgacctcggtgaactggcgcttggtcagaacatgcgcgtagcgttcatgccgtggaatggttacaacttcgaagactccatcctcgtatccgagcgtgttgttcaggaagaccgtttcaccaccatccacattcaggaactggcgtgtgtgtcccgtgacaccaagctggggccggaagagatcaccgctgacatcccgaacgtgggtgaagctgcgctctccaaactggatgaatccggtatcgtttacattggtgcggaagtgaccggtggcgacattctggttggtaaggtaacgccgaaaggtgaaactcagctgaccccagaagaaaaactgctgcgtgcgatcttcggtgagaaagcctctgacgttaaagactcttctctgcgcgtaccaaacggtgtatccggtacggttatcgacgttcaggtctttactcgcgatggcgtagaaaaagacaaacgtgcgctggaaatcgaagaaatgcagctcaaacaggcgaagaaagacctgtctgaagaactgcagatcctcgaagcgggtctgttcagccgtatccgtgctgtgctggtagccggtggcgttgaagctgagaagctcgacaaactgccgcgcgatcgctggctggagctgggcctgacagacgaagagaaacaaaatcagctggaacagctggctgagcagtatgacgaactgaaacacgagttcgagaagaaactcgaagcgaaacgccgcaaaatcacccagggcgacgatctggcaccgggcgtgctgaagattgttaaggtatatctggcggttaaacgccgtatccagcctggtgacaagatggcaggtcgtcacggtaacaagggtgtaatttctaagatcaacccgatcgaagatatgccttacgatgaaaacggtacgccggtagacatcgtactgaacccgctgggcgtaccgtctcgtatgaacatcggtcagatcctcgaaacccacctgggtatggctgcgaaaggtatcggcgacaagatcaacgccatgctgaaacagcagcaagaagtcgcgaaactgcgcgaattcatccagcgtgcgtacgatctgggcgctgacgttcgtcagaaagttgacctgagtaccttcagcgatgaagaagttatgcgtctggctgaaaacctgcgcaaaggtatgccaatcgcaacgccggtgttcgacggtgcgaaagaagcagaaattaaagagctgctgaaacttggcgacctgccgacttccggtcagatccgcctgtacgatggtcgcactggtgaacagttcgagcgtccggtaaccgttggttacatgtacatgctgaaactgaaccacctggtcgacgacaagatgcacgcgcgttccaccggttcttacagcctggttactcagcagccgctgggtggtaaggcacagttcggtggtcagcgtttcggggagatggaagtgtgggcgctggaagcatacggcgcagcatacaccctgcaggaaatgctcaccgttaagtctgatgacgtgaacggtcgtaccaagatgtataaaaacatcgtggacggcaaccatcagatggagccgggcatgccagaatccttcaacgtattgttgaaagagattcgttcgctgggtatcaacatcgaactggaagacgagtaattctcgctcaaacaggtcactgctgtcgggttaaaacccggcagcggattgtgctaactccgacgggagcaaatccgtgaaagatttattaaagtttctgaaagcgcagactaaaaccgaagagtttgatgcgatcaaaattgctctggcttcgccagacatgatccgttcatggtctttcggtgaagttaaaaagccggaaaccatcaactaccgtacgttcaaaccagaacgtgacggccttttctgcgcccgtatctttgggccggtaaaagattacgagtgcctgtgcggtaagtacaagcgcctgaaacaccgtggcgtcatctgtgagaagtgcggcgttgaagtgacccagactaaagtacgccgtgagcgtatgggccacatcgaactggcttccccgactgcgcacatctggttcctgaaatcgctgccgtcccgtatcggtctgctgctcgatatgccgctgcgcgatatcgaacgcgtactgtactttgaatcctatgtggttatcgaaggcggtatgaccaacctggaacgtcagcagatcctgactgaagagcagtatctggacgcgctggaagagttcggtgacgaattcgacgcgaagatgggggcggaagcaatccaggctctgctgaagagcatggatctggagcaagagtgcgaacagctgcgtgaagagctgaacgaaaccaactccgaaaccaagcgtaaaaagctgaccaagcgtatcaaactgctggaagcgttcgttcagtctggtaacaaaccagagtggatgatcctgaccgttctgccggtactgccgccagatctgcgtccgctggttccgctggatggtggtcgtttcgcgacttctgacctgaacgatctgtatcgtcgcgtcattaaccgtaacaaccgtctgaaacgtctgctggatctggctgcgccggacatcatcgtacgtaacgaaaaacgtatgctgcaggaagcggtagacgccctgctggataacggtcgtcgcggtcgtgcgatcaccggttctaacaagcgtcctctgaaatctttggccgacatgatcaaaggtaaacagggtcgtttccgtcagaacctgctcggtaagcgtgttgactactccggtcgttctgtaatcaccgtaggtccatacctgcgtctgcatcagtgcggtctgccgaagaaaatggcgctggagctgttcaaaccgttcatctacggcaagctggaactgcgtggtcttgctaccaccattaaagctgcgaagaaaatggttgagcgcgaagaagctgtcgtttgggatatcctggacgaagttatccgcgaacacccggtactgnnnnnnnnnnctgctgaaccgtgcaccgactctgcaccgtctgggtatccaggcatttgaaccggtactgatcgaaggtaaagctatccagctgcacccgctggtttgtgcggcatataacgccgacttcgatggtgaccagatggctgttcacgtaccgctgacgctggaagcccagctggaagcgcgtgcgctgatgatgtctaccaacaacatcctgtccccggcgaacggcgaaccaatcatcgttccgtctcaggacgttgtactgggtctgtactacatgacccgtgactgtgttaacgccaaaggcgaaggcatggtgctgactggcccgaaagaagcagaacgtctgtatcgctctggtctggcttctctgcatgcgcgcgttaaagtgcgtatcaccgagtatgaaaaagatgctaacggtgaattagtagcgaaaaccagcctgaaagacacgactgttggccgtgccattctgtggatgattgtaccgaaaggtctgccttactccatcgtcaaccaggcgctgggtaaaaaagcaatctccaaaatgctgaacacctgctaccgcattctcggtctgaaaccgaccgttatttttgcggaccagatcatgtacaccggcttcgcctatgcagcgcgttctggtgcatctgttggtatcgatgacatggtcatcccggagaagaaacacgaaatcatctccgaggcagaagcagaagttgctgaaattcaggagcagttccagtctggtctggtaactgcgggcgaacgctacaacaaagttatcgatatctgggctgcggcgaacgatcgtgtatccaaagcgatgatggataacctgcaaactgaaaccgtgattaaccgtgacggtcaggaagagaagcaggtttccttcaacagcatctacatgatggccgactccggtgcgcgtggttctgcggcacagattcgtcagcttgcaggtatgcgtggtctgatggcgaagccggatggctccatcatcgaaacgccaatcaccgcgaacttccgtgaaggtctgaacgtactccagtacttcatctccacccacggtgctcgtaaaggtctggcggataccgcactgaaaactgcgaactccggttacctgactcgtcgtctggttgacgtggcgcaggacctggtggttaccgaagacgattgtggtacccatgaaggtatcatgatgactccggttatcgagggtggtgacgttaaagagccgctgcgcgatcgcgtactgggtcgtgtaactgctgaagacgttctgaagccgggtactgctgatatcctcgttccgcgcaacacgctgctgcacgaacagtggtgtgacctgctggaagagaactctgtcgacgcggttaaagtacgttctgttgtatcttgtgacaccgactttggtgtatgtgcgcactgctacggtcgtgacctggcgcgtggccacatcatcaacaagggtgaagcaatcggtgttatcgcggcacagtccatcggtgaaccgggtacacagctgaccatgcgtacgttccacatcggtggtgcggcatctcgtgcggctgctgaatccagcatccaggtgaaaaacaaaggtagcatcaagctcagcaacgtgaagtcggttgtgaactccagcggtaaactggttatcacttcccgtaatactgaactgaaactgatcgacgaattcggtcgtaccaaagaaagctacaaagtgccttacggtgcggtactggcgaaaggcgatggcgaacaggttgctggcggcgaaaccgttgcaaactgggacccgcacaccatgccggttatcaccgaagtaagcggttttgtacgctttactgacatgatcgacggtcagaccattactcgtcagacagacgaattgaccggtctgtcttcgctggtggttctggattccgcagaacgtaccgcaggtggtaaagatctgcgtccggcactgaaaatcgttgatgctcagggtaacgacgttctgatcccaggtaccgatatgcctgcgcagtacttcctgccgggtaaagcgattgttcagctggaagatggcgtacagatcagctctggtgacaccctggcgcgtattccgcaggaatccggcggtaccaaggacatcaccggtggtctgccgcgcgttgcggacctgttcgaagcacgtcgtccgaaagagccggcaatcctggctgaaatcagcggtatcgtttccttcggtaaagaaaccaaaggtaaacgtcgtctggttatcaccccggtagacggtagcgatccgtacgaagagatgattccgaaatggcgtcagctcaacgtgttcgaaggtgaacgtgtagaacgtggtgacgtaatttccgacggtccggaagcgccgcacgacattctgcgtctgcgtggtgttcatgctgtgactcgttacatcgttaacgaagtacaggacgtataccgtctgcagggcgttaagattaacgataaacacatcgaagttatcgttcgtcagatgctgcgtaaagctaccatcgttaacgcgggcagctccgacttcctggaaggcgaacaggttgaatactctcgcgtcaagatcgcaaaccgcgaactggaagcgaacggcaaagtgggggcaacttactcccgcgatctgctgggtatcaccaaagcgtctctggcaaccgagtccttcatctccgcggcatcgttccaggagaccactcgcgtgctgaccgaagcagccgttgcgggcaaacgcgacgaactgcgcggcctgaaagagaacgttatcgtgggtcgtctgatcccggcaggtaccggttacgcgtaccaccaggatcgtatgcgtcgccgtgctgcgggtgaagctccggctgcaccgcaggtgactgcagaagacgcatctgccagcctggcagaactgctgaacgcaggtctgggcggttctgataacgagtaatcgttaatccgcaaataacgtaaaaacccgcttcggcgggtttttttatggggggagtttagggaaagggcatttgtcagaatatttaaggaatttctgaatactcataatcaatgtagagatgactaatatcctgaaactgactgaactaattgagtcaaactcggcaaggattcgatactattcctgtgtaactttcttaaggaacgagaatgaaacaggaagtggaaaagtggcgaccttttggacatccggatggtgatattcgtgatttatcatttcttgatgctcatcaggctgtctacgttcagcatcatgagggcaaagagcctttagagtatcgcttttgggttacctactctcttcactgcttcacaaaagattatgaacatcagacgaacgaagaaaaacaatcgttaatgtaccacgcgcctaaagaatctcgtcccttctgccagcaccgttataacttagcgcgcacacacttaaaaagaactattttggcgctgccagaaagcaacgttattcatgccgggtatggtagctatgccgtgattgaggtggacttagacggaggagataaggcattttactttgttgcgttcagggctttcagggaaaagaaaaaactccgtttgcatgtaactagcgcttatcccatttctgaaaaacagaaaggtaaatcagtgaaatttttcaccattgcctacaacttattgagaaataagcagcttcctcagccctcaaaataacaaaacccaccttaaggtgggtttcgccagagaattatctctggtattcagaacgccattaccggactttgccttgaccttgcgataatcgcaggttgcgggatgtctgaatttcttcagtctgctgcatcctggaagatgagaacatgtgttcttattttcgtctctatcatagttgagtatttactctcttacaatcagatctctttcattgctcaacaggcgatggcttcagactttgcattacggaatttttaagaaaggcagggcgaaacgaggaagaagcttttcgccctggacannnnnnnnnnttcctgctgacggcactaccataaaaaaacagaacgctttcaacaaccttgcgtttttcatcttccgtagcggctcggaataaatttacgttcttacattccgtctcatagtctttgcgaggcccgtcccagatagctgtcccagtctttccataccggctgcaaaccctgagcggttaacgcggcagcaaccgcttccggtctgcgatcgtcgtgcggtgagaactgttccaactcggggtgattatcggcatagccacctggctgcgttttcgagaaggcgctgacgttattgatcgccagcggaataacgcgatcgcgaaaccacggtgattcccgcgtggagagtgacagttcaatctccggtgcaagcagtcggaaggcgcagatggtttgcactaactggcgttcatccataatcgacgcaggctcaatgccgccagtacacgggcgcaggcgcggaaaggagacagagtaacggctttgccagtaatgctgttgcagccatagcaaatgttcggcaaccatatagcagtcaacgcgccagttgtcggaaaggccaattagcgcgccgaggcctatcttatcaatccccgcacgccccagccgatccggcgtttccagccgccagaagaagtcctgttttttgcctttcagatgatggcgggcataagtcgcctcgtgatatgtctcctgataaaccatcacgccatccagaccaagctgctttaactcggcgtattccgtctccgccagcggttgcacttccatttgtagtgaagagaactgttcacgcagggcggggagatgacgacgaaagtaatccatccccactttcgcctgatgttcaccagtgactaatagcagatgttcaaagcccatctcccgtatagcggcgctttccctggcaatatccgcttcatccagcgttttgcgcttgatgcgattactcatggaaaatccgcagtacgtgcagtcgttagcgcaaagattggaaagataaagcgggacgtagaaactaactgtgttgccaaatcgctgacgggtcagacgctgcgcccgttgggccagttgttccagatagccactggcggctggcgataacagcgccatcatatcgtcgcgggtgaattgcgaggcatttagcgcccgctctacgtcaacagccgttttgccgttgatacgcaggcggatgtcatcccagtccagttgtcgccagcgatcgctgaaggttttcatgccgatgcctccagaaatccagtcagcgggctggtggcatgagcaaaatgactgcggctgcccggtccggactgacgtgccagcaggcctgcttctaccgccagacgaaatgccttcgccatgttgacgggatcgtccgctacggcaatcgccgtattcactaacaccgcgtcggcccccatttccagggcctgcgcggcatggctgggaacgccgatgccagcatcgacaaccaccggaactgtggcctgctggataataatctccagcatggcacaggtttccagtccctgattcgagccaatcggcgcgccgagcggcatcaccgctgcacagccgacttcttccagacgtttacacaataccggatcggccccgcagtaaggcagcacgacaaatccctgttgtaccagcatttcggcggctttcagagtttcgatgggatcgggcaacagccagcgggcgtcagggtgaatctccaattttagccagttagtgcctaacgcttcacgtgccagatgggcggcgaaaatggcttcttccgctgttttcgccccggatgtatttggcagcagggtcacacccgccgcgataagcggttcgaggatagcgtcgttgtgctggcgcaagtcgacacgtttcatcgccagtgtcaccagctggctgccggaagcgcggatcgcctccaccatcagttgtgaagaagcgaatttccctgtgccggtaaacagatgtgaatcaaacgttttgtccgcaatacgtaacatttcaacctcctgcaataacctgaaaaagcaggatctggtcgccatcctgcacgatatgttgcgcccactgctcacgcgggacgatttgctgattaatcgccagagccgcgcccgcttgtcgttggtcgagttgctccagtagttcgtgaacagtttgcccggcggcgcactgcatcggttgatcgttaaacaggatctgcattgcttcctccgcataccgggcaaccactggcgcggcgcaacgccaggctgcgccactggctcgatttaccgtcgaacagtcggagttctcccgcaggtgtctctataccgcttaataacttaatggcttccagtgcctgcaaagtgcccataaccccgaccaccgggccaaccacgcccgccgtgcggcagttgcgttctggctcctggttatctggccacaggcagcggtaacacccctgctcccagggcggcgtcagtaccatcaactgaccgccaaatccgaccgcgctggcggtgataagcggcgtgttgagtgccacgcaggcggcattaatctcctggcgagtcgccatattgtcggtacagtcgagcaccacatcggcccgtgcaaccgcatcttttaacgcctcacccgttaaccgttgttgtaatgctgtcagttgaatgtcgggattcaactgtgtcagtcgctgttggctgacctgcgatttcgggcgatcgatatcttcagtggtaaagaggatttgtcgttgcagattgcttaaatgcacatcgtcgtcatctgccagtaccagcgtcccgacgccagcgcccgccaggtacagcgcagcaggtgtacccagcccgcccnnnnnnnnnncccgcccagaccgataatcagcacctggctgtcgagcagtttttgctgcccgtccagagcgatatcgtcgagcaggatttggcggctataacgcataaagtcacggtcattcatcgccaactcctgcaatttccagcaactgtgccgttgccaaacgccagtctgcagcttgagtaatggcgctgacgacggcgatactgccgacacccgttgctatcaccgcaggcgcgcgtgccagactgataccgccaatcgccacggtgggataatccgccagtcgctcaacatgccgtgccagctgttccagcccctgcggtgcagaaggcatctgtttggtttgcgtcgggaacacatgtcccagcgcgatataagaggggcgtgctgccagcgcgacgtcgatttccatatcgtcatgtgtcgaaacgcccagccgcaggcctgccgcgcggatggcgttgagatcggtggcttgcaaatcttcctgccccaaatggacgccatacgcctgatgcttgatcgccagccgccagtaatcgttgataaacaatcgcgcgttatagcggcggcccagcgcaattgccgccacgacatcggcttccacctcttcatcgcgccgatctttgatgcgtagctggagagtacgtacgcctgcatccaacagacgttcgatccactgtacgctgtccaccaccgggtacagtcctaaacgaaaaggtacaggaggaaaatcaggctgatacatcacgcttcctccttacgcaggtagatttctccgcctctggcacggaagttctccgacatatccgccattcccatttcaatagtttgcgtggcggcgtaatcacgcacttcctggctgattttcatcgagcaaaatttcggtccacacatggagcaaaaatgggcgactttgccggactcttggggcagggtttcatcgtgataagcgcgggcggtaaacgggtcgagggccagattaaactggtcttcccagcgaaattcgaagcgggctttcgacatggcgttatcgcgaatttgcgcgcccggatgccctttcgccaggtcagcggcgtgggcggcaatcttataggtgataagcccctgcttaacatcttctttattaggcagacccagatgctcttttggcgttacgtaacagagcatcgcgcagccaaaccagccaatcatcgccgcaccaatccccgacgtgaagtggtcatagcccggcgcaatatcggtagttagcggccccagagtgtaaaacggcgcttcgtggcagtgctctaactcctcggtcatattgcggcggatcatctgcatcggcacgtggcctgggccttcaatcatcacctgcacgtcatattcccaggcaattttggtcagttcgcccagcgtatgcagctcggcaaactgcgcttcatcgttggcgtcctgaatagaaccggggcgcagaccgtcgcccagcgacagcgaaacgtcataagcggcacagatttcacaaatttcgcggaagtgttgatagaggaaattttcctgatgatgggagaggcaccatttcgccataatcgaaccgccgcgagagacgataccggtcaggcgtttcgcggtcatcggcacatagcgcagcagtacgcccgcatggatagtgaagtaatccacaccttgctcggcctgttccagcagcgtgtcgcggaacgcttcccaggtaagatcttcggcgatcccgttaaccttctccagcgcctggtagatcggcactgtaccgatcggcaccgggctgttacgcaaaatccactcgcgggtttcgtgaatatagcgaccggtggagagatccatcaccgtatccgctccccagcgcgtggaccataccagcttttccacttcttcttcgatggaagaggtgaccgccgagttgccgatattggcgttaacttttaccaggaaattgcgaccaataatcatcggctccgattccggatgattaatgttggccgggataatcgcacgtccggcagcaacttcatcacggacaaattccgcagtgatattttccggcagatgtgcgccaaagctcattcccggatgctggtggcgtaaaacctcgctacggatgcgctcgcggcccatattctcgcggatggcgatgaattccatttccggcgtgatgatgccctggcgggcgtagtgcagttgggtgacacggcgtcctgctttggcgcgttttggtgttagtacgccgctaaaacgcagttcgtcgaggccatcatctgccagccgcgctttagtgtaatcggaactgcgcacggtaagttcttcggtatcgccgcgcgcatcgatccacggctggcgtagttttgccagcccttgctgcacgttaatggcaatctgcggatcaccatacgggccggaggtgtcgtagaccggaatcgcttcgttttcttcgtactgcggctgttctttgctaccgccaattagcgtcgggctaagctggatctcacgcatcggcacgcgcacgccggggtgtgtgccagtgatataaatgcgttttgagttgggaaaggcggtgccttccagggtgtcgataaaatgttgggcccgggcgcgttgttcgcggcgggtcagttttgttgcagacatagctcattccaaaaagttaaggacgtggcttgtcagacgacggatgaagcaagagacgatcgccgcaggggcgatgcgatagcagattaactcttgttcccttcgcaggtattagcctgatcaggttccgcggatcccgaataaacggtctcagccagttaaggcactccgacaagaaattagccccgcaaatggggcattgaatgtaaattacgcgttaacagcgcagaactcaagcaggatgtttgacgcgggcggcgtcaagcaccagcagaatcagcttatcttccagcacaaagcgcgcttccagcgcctcgccgatgtcagataaaacctgttgaaactcaaggtaattatcatgatcgatggcggtttccagactggaatcgtagtaatccataatctgttgagtattggcttcgagttgcggccaaatcttcgcggcgcgcgcgagttgcccgttgccttccagcttatgaagaatgcgctcataaatactgaaatgtccggcagacaagtaatcgaccaggctctgacaaaaatcatcaagggctttttcgtttagcctcatgtacgattctttgccaggcttaatgccaaccagattgtagtaagccacgagcagatgcttacgtacatgtagccagcgatcaaccagtttgttacttcctctgacgcgctccgtcaggttatcgagctggttaagcatgattgactccgcaagtttgtattcaaaaactgctcagtgagaaatgtaaaaaccatgttaaacatgccagtgatgcaaaggtagtgcaagagctatggatcgtataattgaaaaattagatcacggctggtgggtcgtcagccatgaacaaaaattatggttgccgaagggagaattgccatatggcgaagcggcaaatttcgatcttgtgggtcagcgcgcactacaaatcggcgaatggcagggggaacctgtttggttagtacaacagcagcggcgtcacgatatggggtcggtacgtcaggtcattgatctcgatgttgggctgtttcaactggccggacgaggcgtacaactggcggagttttaccgatcgcataaatactgtggttactgcgggcatgaaatgtatccgagcaaaaccgaatgggcgatgctgtgcagccattgccgtgagcgttactacccgcaaatcgccccctgcattattgttgccatccgtcgcgatgattcgatcctcctcgcccagcatacccgccatcgtaacggtgtccatacagtacttgccggattcgtcgaagtgggcgaaaccctcgagcaggcagtcgcgcgggaagtgatggaagagagcggaattaaagttaaaaacttgcgttacgtgacttctcagccgtggccgtttcctcagtctttaatgaccgcgtttatggcggaatatgacagcggcgacatcgtgatcgacccgaaagaattgctcgaggcgaactggtatcgctatgacgatttgccgttactcccgccgcccggcaccgtagcgcgccgtctgatagaagatacggtggcgatgtgtcgggcagagtatgagtgatgatacactgaccgcctgacgcactaaggaacagccaaaatgaccgaacttaaaaacgatcgttatctgcgggcgctgctgcgccagcccgttgatgtcactccagtatggatgatgcgccaggcgggtcgctatctaccggaatataaagccacgcgcgcccaggcgggcgattttatgtcgctgtgcaaaaacgccgagctggcgtgcgaagtgactttgcaaccgctgcgtcgctacccgctggatgcggcgatcctcttttccgatatcctcaccgtgccggacgcgatggggttagggctctattttgaagccggagaaggtccgcgttttacctcgccagtcacctgcaaagccgacgtcgataaactgccaattccggacccggaagatgaactgggttacgtgatgaacgcggtgcgtaccattcgtcgcgaactgaaaggcgaagtgccgctgattggtttttccggcagcccgtggacgctggcgacctacatggtggaaggcggcagcagcaaagccttcaccgtgatcaaaaaaatgatgtatgccgatccgcaggcgctgcacgctctgctcgataaactggcgaaaagcgtcactttgtatctgaatgcgcagattaaagccggtgctcaggcagtgatgattttcgacacctggggcggcgtgcttaccgggcgcgattatcaacagttctcgctctattacatgcataaaattgttgatggtttagtgcgtgaaaacgacggtcgccgcgtaccggtcacgctgtttaccaaaggcggcggacagtggctggaagccatggcagaaaccggttgcgatgcgctgggcctcgactggacaacggacatcgccgatgcgcgccgccgtgtgggcaataaagtcgcgttgcagggtaatatggatccgtcgatgctgtacgcgccgcctgcccgcattgaagaagaagtagcgactatacttgcaggtttcggtcacggcgaaggtcatgtctttaaccttggtcacggcattcatcaggatgtgccgccagaacatgctggcgtgttcgtggaggcagtgcatcgactgtctgaacagtatcaccgctaaggagtgattatggatctcgcgtcattacgcgctcaacaaatcgaactggcttcttctgtgatccgcgaggatcgactcgataaagatccaccggatctgatcgccggagccgatgtcgggtttgagcagggcggagaagtgacgcgagcggcgatggtgctgctgaaatatccctcgcttgagctggtggagtataaagttgcccgcatcgccaccaccatgccttacattccaggttttctttccttccgcgaatatcctgcgctgctggcagcgtgggagatgctgtcgcaaaagccggatttagtgtttgtcgatggtcatgggatctcgcatcctcgccgtcttggcgtcgccagccattttggcttattggtggatgtgccgaccattggcgtggcgaaaaaacgtctctgcggtaaattcgaaccgctctccagcgaaccgggcgcgctggccccgctgatggataaaggcgagcagttggcctgggtctggcgcagcaaagcgcgctgtaacccgttgtttatcgctaccggccatcgggtcagcgtggacagcgcgctggcgtgggtacaacgctgcatgaaaggctatcgtctgccggagccaacgcgctgggcggacgcggtggcctcggaacgtccggcgttcgtgcgctatacagcaaatcagccctaattcaggtaaactgcggataatttccgtatttgagaactcaacatgttacaaaacccaattcatctgcgtctggagcgcctggaaagctggcagcatgtcactttcatggcttgcttatgcgaacgcatgtaccccaattacgccatgttctgccagcaaaccggttttggtgatgggcaaatttaccgtcgtattctcgatctcatctgggaaacgctgaccgttaaagacgcaaaagtaaatttcgacagccaactggagaaatttgaagaagcgattccttcagccgacgatttcgatctgtacggcgtttatccggcaatcgatgcctgcgtggcgttaagtgaactggtccattcgcgtttgagtggtgaaacgctcgaacacgcggtggaagtgagtaagacctccatcacgaccgttgcgatgctggaaatgactcaggctggtcgcgaaatgagcgatgaagagcttaaagaaaacccagctgtagagcaagaatgggacattcagtgggaaatattccgacttttagctgagtgcgaagaacgcgatatcgagctgataaaaggccttagggcagacctgcgtgaggcgggtgagagcaatattggtataatttttcagcaataagaccagaaaacgtgatttaacgcctgatttgtcgtacctggagtcttccctttcgccccccgtctggtctacatttggggggcgaaaaaaagtggctatcggtgcgtgtatgcaggagagtgctattctggcatttccgtcgcactcgatgcttagcaagcgataaacacattgtaaggataacttatgaacaagactcaactgattgatgtaattgcagagaaagcagaactgtccaaaacccaggctaaagctgctctggagtccactctggctgcaattactgagtctctgaaagaaggcgatgctgtacaactggttggtttcggtaccttcaaagtgaaccaccgcgctgagcgtactggccgcaacccgcagaccggtaaagaaatcaaaattgccgcagctaacgtaccggcatttgtttctggcaaggcactgaaagacgcagttaagtaagattgcgtggcagtgaacagttttaacgaaggggtggtttcaccccttttgtctttctggcgtcgatcattgatgctggcaggtgcgctgtttctcactgcctgtagccacaactcttcacttcctccctttaccgccagtggatttgctgaagaccagggcgcggtacgcatctggcgaaaagacagcggcgataatgtgcatctgcttgccgtgtttagcccgtggcgcagtggcgataccacgacgcgagagtatcgctggcagggcgataacctcacgctcatcaatatcaatgtttacagcaaaccgccggtgaacattcgcgcgcgttttgacgatcgcggtgatctgagctttatgcaacgtgaatccgatggggaaaagcagcagctttctaacgaccaaatcgatttataccgttatcgtgctgatcagatccgccagattagcgatgccttacgtcaggggagagtcgtgctgcgccaggggcgctggcatgcgatggaacagaccgtgaccacctgcgaagggcaaaccattaaacctgatttagattcgcaggcgatagcgcatatcgagcgccgccagagccgctcttctgttgatgtcagcgtggcatggctggaagcgcccgaaggttcgcaattactgttagtggcaaactctgatttctgtcgctggcaacccaacgagaaaacgttctgatttaccagtggcccatacccatatgaccgccaccaccgcagccgccgtagcccatgcccattccggctccgcgcggaatacccgcttcagccatcgcgatatctcgtttcacccgtaactcatctaacgactgacgcaaattctccatctctttggcgaccgcgttaattttgctgctatccggtgggttcgcggctaacagggcattgtattcataacgcttcgtcaccagttgctgttgcagtgcgctgctttgagcgtaaaagtcattatggattttctgccacgctgtctgttgttcgctggtcaaaggcgcggcattttgctgccacataccgtgtccgccgtgagcaaatgcagatgtcgatcccatcgccattgctgaaagcgccatcattaccagggcaattttcgtgttccgtttcatggttaatcctccagtggttgtcttacttcgggtattgcatcttccgtgccaacgatgaaacgctgatatgacgggtaatctggcatgataaacgagtaaaaatgactcgcctgctgcgggtagcgagtcatttttactcattgaaacttaagcctttgtgttacagcgcagggtaagcgctgataaaagatggcatgatttctgctgtcagaaagggatgagcaggcaaagaagaagatgcgttttatgcaacgttctaaagactccttagctaaatggttaagcgcgatcctccccgtggtcattgttgggctggtagggttgtttgcggtgacggtgattcgcgattatgggcgcgagactgccgccgccagacaaacgctgctggaaaaaggcagtgtacttattcgcgctcttgaatccggctcgcgcgtcggcatggggatgcgcatgcatcatgcgcagcagcaggccttactggaagaaatggccgggcagcctggagtacgttggtttgcggtcacggatgaacaaggaacaatcgtgatgcatagcaactccggcatggtgggaaaacagctttattccccgcaggaaatgcagcagttacatcctggagatgaagaagcgtggcggcggatcgatagcgcagacggcgagtctgttctggaaatttatcgccagtttcaaccgatgtttgctgctggaatgcaccggatgcgccatatgcagcagtatgccgcgacaccacaagcaattttcatcgctttcgacgccagtaatattgtgagtgccgaagatcgtgagcagagaaacaccctgattatcctcttcgccctggcgacggtcttgctggcaagcgtgttgtcattcttctggtatcgccgctatctgcgctcgcgccagctgttgcaggatgaaatgaagcgcaaagagaagctggtagctctggggcatcttgcggcaggcgttgcccacgaaatccgtaatccactttcctcaattaaagggctggcgaaatactttgccgaacgcgcgccagcagggggagaagcgcatcaattggcgcaggtgatggcgaaagaagccgaccgtttaaaccgcgtggtaagcgagttgctggaactggttaagccaacgcatctggctttgcaggcggtggatctcaacacgctgattaaccactcattacagctggtaagccaggatgcaaacagccgggagatccagttacgctttaccgccaacgacacattaccggaaattcaggccgatccggacaggctgactcaggtcctgttgaatctctatctcaatgctattcaggcgattggtcagcatggcgtgattagcgtgacggtcagcgaaagcggcgcgggcgtgaaaatcagcgttaccgacagcggtaagggaattgcggcagatcagcttgaagccatcttcactccgtacttcaccaccagagccgaaggcaccggattggggctggcggtcgtgcataatattgttgaacaacacggtggtacaattcaggtcgcaagccaggagggaaaaggctcaacgttcaccctctggcttccggtcaatattacgcgtaaggacccacaaggatgacgcacgataatatcgatattctggtggtggatgatgacattagccactgcactattttgcaggctttactgcgcggctggggctataacgtcgcgctggcgaacagcgggcgacaggcgctggagcaggtgcgggaacaggtttttgatcttgtgctttgcgatgtgcgaatggcggagatggacggcatcgccacgctgaaagagatcaaagcgttaaacccggcaattccggtgctgattatgactgcgtactccagcgtcgagacggcggtagaggcactgaaaactggggcgctggattatctcatcaagccgctggatttcgacaccctgcaggcgacgctggaaaaggcgctcgcgcatacgcacagtattgatgctgaaacacctgcggtgactgccagccagttcggtatggtcggtaaaagctcggcgatgcaacacctgctcagtgaaatcgccctcgtcccgccatcggaagccacggtactgatccacggcgattccggcaccggtaaagagctggtcgccagggcgattcacgccagtagcgcacgtagcgaaaaaccgctggtaacgctcaactgtgcggcactcaacgaatccttgctggaatctgaattgttcggtcacgaaaaaggggcgtttactggagccgataaacgccgggaagggcgctttgttgaggcggacggcggcacgctgtttctcgatgaaattggcgatatctcgccgatgatgcaggtgcgtctgctgcgtgcgattcaggagcgcgaagttcagcgtgtcggtagcaaccagactatctcggttgatgtccggctgattgcggcgacccatcgcgatcttgccgcagaggtgaatgccgggcattttcgccaggatctctactatcgcctgaatgtggtggcgattgaagtaccatcgctgcggcaacggcgggaagatatccctctgctggctggccattttcttcagcgctttgccgagcgtaatcgcaaggcggtaaaaggctttacgccacaggcgatggatttgctgatccactacgactggccgggaaatattcgtgaactggaaaacgcggtggaacgggcggtggtgctgctgaccggggaatatatttccgaacgcgagctgccgctggcgattgccggtacgccgatcccgctggggcaaagtcaggatattcagccgctggtagaagtcgaaaaagaagtgattctggcggcactggagaaaacgggcggcaacaaaaccgaggccgcccgtcagttagggatcacgcgcaaaacgctattggcaaaactgtcgcgttagttctgctcgcgttcgatagcgcgccagccaatatctttccggcagaagcagtcgtcccagtgaatatcggtcattaaggcataagcgcgtttctgcgcttctgccacggtatgacccagcgcggtgacgcacagtacgcgcccgccgctggtcactacctgctcgttatccgccagtttcgtgcccgcgtggaacactttgccgtcagccacttcttccagcggcaggccgtggatcacatcgccggtgcggtaatcgcccggatatccacccgcagccatcaccacgccgagagaagcgcgttcatcccactcggatgttttctcgtccagcttcccttcacaggctgccaggcagagctcaaccagatcggacttcatgcgcagcataatcggctgggtttccggatcgccaaagcggcagttaaattcgataaccttcggattgccctgtttgtcgatcatcaggcccgcgtagagaaaaccggtgtaggtgttgccttccgccgccatgcctttcacggttggccagatgatacgttccatggtgcgctgatgaacttcatcggttactaccggcgcgggggagtaagcgcccatcccgcccgtgtttggtccggtatctttatcgcctacgcgtttgtgatcctggctggtagccatcggcaacacatgctcgccgtccaccatcacgataaagctcgcttcttcgccatcgaggaactcttcgataacgatgcgatgacccgcgtcgccaaaagcgttgcccgccagcatatcgtgaacagccgcttccgcttcttccagcgtcatcgccacgataacgcctttcccggcagccagaccgtccgctttaatgacaattggcgcgcctttctcacgcagatacgccagcgcaggttctacctcggtgaagttctggtattccgccgtagggatcttatggcgggccaggaaatctttggtaaacgcttttgagccttccagttgggccgcacctgcggttgggccgaagattttcagcccggcggcgcggaaggtatcgaccacgcctttcaccagcggcgcttccgggccgacgatggtcagatcaatcttttcgttttgtgcgaaatccaacagcgccgggatatcggtcacgccaatagcaacgttttgcagcgcgggttccagcgcagtgcctgcattacccggagcaacaaaaacagtctcaaccagcggcgactgggccgctttccaggccagcgcgtgctcgcgcccgccgttaccaatcactaatactttcatctattgctccattaatggcggaagtggcgcatgtcggtgaagagcatcgcaataccgtgctcgtcggcggcggcaatcacttcgtcatcacggatggaaccgccaggctggattacgcaggtcacgcccgcagcggcggcggcatcaataccgtcgcggaacgggaagaacgcgtcagaagccatcgaggaacctttcacttccaggccttcatcagcagctttaataccggcgattttcgcggagtacacgcggctcatctggcccgcgccaataccgatggtcatattgtttttggcatagacgatagcattggatttcacgaacttcgccactttccagcagaacagcgcatcgcgcagttcctgttcggtcggctgacgttgggtgacgacgcgcagttcttccgcaccgaccatccccaggtcacgatcctgaaccagcagaccgccgttcacgcgtttgaaatcaagacccggaacacgctcgccccactgaccgcaggtcagaacgcgtacgttctgcttggcggcggtgattttcagggcttcttcgctggcggaaggcgcaataatcacttcgacaaactgacgagaaatgatggcctgtgcggtttccgcatccagctcgcggttaaaggcaatgatgccgccgaatgcggaggttgggtcggttttgtacgcgcgatcgtaagcatcaagaatggaattgccgatagctacaccgcaagggttggcgtgcttcacaatcacacatgccggctcggcgaactctttcacgcactccagcgccgcatcggtatcggcgatgttgttataagagagggctttaccctgaacctgggttgcggtagcaacggaggcttctttcacattctcttctatatagaaggcagcctgctggtggctgttctcgccgtaacgcatatcctgcttcttaatgaagttcaggttcagcgtgcgtgggaagcgaccagcggcttctttgctttcaccgtggtacgccggaaccatgctgccgaagtagttggcaatcatgctgtcgtaggcggcagtgtgttcgaaggctttgatggcgaggtcgaaacgggttgcaagcgtcagcgatccttcgttgtcatccatctctttaataatggcgtcgtagtcgctgctcttcaccacgattgcgacatctttatggttcttagcggcggagcgcaccatggtcgggccgccgatatcgatgttctcaaccgcatcttccagcgagcaaccttcacgggccacggtctgggcgaacggatacaggttaacaaccaccatatcgataggctggatctgatgttcttccataatggcatcgtcctggccgcgacggcccagaatgccaccatgtactttcggatgcagggtcttcacgcgtccatccatcatctccgggaaaccggtgtaatcggaaacttcggttaccggcagacctttttctgctaacagacgggcagtgccccctgtagacagcagctccacaccgcgtgcggaaagtgcctgggcgaattcgacgataccggctttgtcagaaacactgagcagagcgcggcggactggacgacgttgttgcatggtaaatcccctggatttgactattacagagagcgttagctgaatttttcgcgaaaaactcagctaacgcccctaacggggcatccttatttttcgcccgcattgtaacgaaaacgtttgcgcaacgctcgcgaatttttctctttcaatggtgatcacaattttgacagtggttaccgtgggaaaaatacagaaattacattgatgattgtggataactctgtgcgtaaaaaggtataaagcggggttttgctggggaatgcagcagtcagtcatttttctgcaatttttctattgcggcctgcggagaactccctataatgcgcctccatcgacacggcggatgtgaatcacttcacacaaacagccggttcggttgaagagaaaaatcctgaaattcagggttgactctgaaagaggaaagcgtaatatacgccacctcgcgacagtgcgctaaagcgcgtcgcaactgctctttaacaatttatcagacaatctgtgtgggcactcgaagatacggattcttaacgtcgcaagacgaaaaatgaataccaagtctcaagagtgaacacgtaattcattacgaagtttaattctttgagcatcaaacttttaaattgaagagtttgatcatggctcagattgaacgctggcggcaggcctaacacatgcaagtcgaacggtaacaggaagaagcttgcttctttgctgacgagtggcggacgggtgagtaatgtctgggaaactgcctgatggagggggataactactggaaacggtagctaataccgcataacgtcgcaagacc

SEQ ID NO: 171 - DNA, 57650 bp, Escherichia coli
  source 1..57650: mol_type = genomic DNA
gaattccgcgaagatctctattaccgcctcaacgttgtcagcctgaaaattccggcactggcggagcgcacagaagacattccgctactggcaaatcacctgttgcgccaggcggcagagcgacataaaccgtttgtccgcgcgttctctaccgatgcgatgaaacgcctgatgaccgcgagctggccgggtaatgtgcgccagttggtcaacgtgattgaacagtgcgtggcgctgacctcatctccggtgattagtgatgcgctggtggagcaggcgctggagggtgaaaacacggcgctgccaacctttgttgaggcacgtaatcagtttgaactcaactatttgcgtaagctgctgcaaatcaccaaaggcaacgtcacccacgcggcgagaatggcggggcgcaaccggacagaattttataaactgcttgcccgacacgagctggatgcaaacgatttcaaggaatgaattggcgttatgtgttacgtttagcagatcaaaagacaggcgaccttttcaaggaatagcatgaaaaagattgatgcgattataaaacccttcaagctggacgatgtccgcgaagcactggccgaagtcggtattaccggcatgacggtgaccgaagtgaaaggctttggtcgccagaaaggccataccgagctgtaccgcggcgcggagtatatggtggattttctgccgaaagtgaaaattgagattgtcgtaccggacgacattgtcgatacctgtgtcgataccattattcgcacggcgcaaaccggcaaaatcggtgacggtaaaatcttcgtctttgacgtggcacgggtcattcgcatccgtaccggtgaagaggacgacgcggcaatttaaaccgcgtcaagggttgccggatgtttccatccggcaacatcaaattacagcaccttatgcgggccaaagcattcgtaatgaatgttttcctgcttcacgcccagatccactaactgtttcgcggtaaactgcatgaagccaaccgggccgcagagatagaactgcattgtcggatcgctgaacgcaccttccagtttgctcaaatccatcagaccttcgctatcaaactgacctttagcgcgatcggcttcgctcggctgacgataccaggtgtgcgcggtaaagcgcggcagtgactgccccagttccttaacttcatcagcaaaggcgtgaacatcgccattttctgccgcatggaaccagttcacttgtgctgtgtggcctgcttttgccagcgtgtcgagcattgccagcattggcgtttgaccaacaccggcagagattaacgtcactggtgtgtcatctgcgacagccataaagaaatcacctgccggagcgaccagtttcacgacatcgccaacattggcgtgattgtgcaaccagttggatacctgcccaccctcttcgcgtttcaccgcaatacgatagcctttgccatccggtttgcgagtcaaagagtactgacgaatttcctgatgcgggaaaccttccggcttcagccagacgccgagatattgccccggacggtattctgccactgcgccaccgtcgaccggctccagttcgaagctggtgataagcgcgctgcgcggtgttttagccacaatgcggaaatcgcgagtaccttcccaaccaccggctttgctggcgttttcgttatagatttccgcctcgcgattgataaatacattagccagtacaccataggctttaccccacgcgtccagcacttcctgccccgggctgaacatttcgtccagcgttgccaacaggtgttcaccgacgatgttgtactgttccggtttgatctggaagctggtgtgcttctgcgcgattttttctaccgctggcagcagcgcaggcaggttttcaatattactggcgtaggcggcaatagcgttaaacagggcttcacgttgatcgccattacgctggttactcatgttaaaaatttctttgagttctgggttatgagtaaacatacggtcgtagaaatgggcggttaactttggccccgtttccaccagtaaagggatggtggcttttactgtagcgatggtttgagcgtcaagcatatggtcttcctttttttgcatcttaattgatgtatctcaaatgcatcttataaaaaatagccctgcaatgtaaatggttctttggtgtttttcagaaagaatgtgatgaagtgaaaaatttgcatcacaaacctgaaaagaaatccgtttccggttgcaagctctttattctccaaagccttgcgtagcctgaaggtaatcgtttgcgtaaattcctttgtcaagacctgttatcgcacaatgattcggttatactgttcgccgttgtccaacaggaccgcctataaaggccaaaaattttattgttagctgagtcaggagatgcggatgttaaagcgtgaaatgaacattgccgattatgatgccgaactgtggcaggctatggagcaggaaaaagtacgtcaggaagagcacatcgaactgatcgcctccgaaaactacaccagcccgcgcgtaatgcaggcgcagggttctcagctgaccaacaaatatgctgaaggttatccgggcaaacgctactacggcggttgcgagtatgttgatatcgttgaacaactggcgatcgatcgtgcgaaagaactgttcggcgctgactacgctaacgtccagccgcactccggctcccaggctaactttgcggtctacaccgcgctgctggaaccaggtgataccgttctgggtatgaacctggcgcatggcggtcacctgactcacggttctccggttaacttctccggtaaactgtacaacatcgttccttacggtatcgatgctaccggtcatatcgactacgccgatctggaaaaacaagccaaagaacacaagccgaaaatgattatcggtggtttctctgcatattccggcgtggtggactgggcgaaaatgcgtgaaatcgctgacagcatcggtgcttacctgttcgttgatatggcgcacgttgcgggcctggttgctgctggcgtctacccgaacccggttcctcatgctcacgttgttactaccaccactcacaaaaccctggcgggtccgcgcggcggtctgatcctggcgaaaggtggtagcgaagagctgtacaaaaaactgaactctgccgttttccctggtggtcagggcggtccgttgatgcatgtaatcgctggtaaagcggttgctctgaaagaagcgatggagcctgagttcaaaacttaccagcagcaggtcgctaaaaacgctaaagcgatggtagaagtgttcctggaacgcggctacaaagtggtttccggcggcactgataaccacctgttcctggttgatctggttgataaaaacctgaccggtaaagaagcagacgccgctctgggccgtgctaacatcaccgtcaacaaaaacagcgtaccgaacgatccgaagagcccgtttgtgacctccggtattcgcgtgggtactccggcaattacgcgtcgcggcttcaaagaagcagaagcgaaagaactggctggctggatgtgtgacgtgctggacagcatcaatgatgaagctgttatcgagcgcatcaaaggtaaagttctcgacatctgcgcacgttatccggtttacgcataagcgaaacggttaatctgttgaaaaaaggcttccttcgggaagcctttctacgttattgcgccatcaaatctgccgtaactgcgcctcaacatacaaatagccaattcccagcacctgttgtgcgcggcttaattgcccgaagccaatttgcgtcgctttcacgctcggtccttcgtcgcggtcgaacgggttaaatcctgtctggcgaataatagtattaagccagttctcaccaaaggcacaactgcgaccgtacaaccaaatctgattaatattgaggatgttgaggaagttatacagactcaaaccaatggcattggcactgcggtcaacccagctggtgatccacggttctccactttgccaggcagcgattaactgcgctgtagtcagtttttcaggatcaagttgagtactaaccggttgtgattttagccatacccgcgcctgtttttttaattcgcttaacgaggcgacggtttccaggcagccataacgtccacagtcgcagacgacgccatccggattaacgatggtgtgaccaatctgtccgctaccatacaaactgccgcgataaatttgctcgttaatcacgaacgacgagccaatgccgtaatcaacgttgatcacgcagaaatcccgttcctgcgaattattttgccatttctccgccagcgccagcatcacgcagtcattatcgaccatcacccgaatgccgagcttctcttccagcagatatttcacctccaccggcgttgtccacggcgcttgcggcatggtttgcgacacgccggtcacaggatcaacctgaccgtggattgccagcgccagattgatggtgcggtccggccacaatttacggtggcgatgccagcatttttcgatttcggacagcagcgcctgcggcgtcggtgcattaatctgtaaatactcaaactcgcctttcggacttaaacaagcattagccacctgacactcaatactggtgggcgtcacgttcaggcacagcgtccagtcaccttcctgcgcaatcagccatgtaccgctactatgcccgcgcgtctggctttcatcgtcgatattcaccacccgtttttcgctttccagttcctgcaaaatattactgactgccggaatcgaaatttgcgccagccgggccagcgttgatttattggcgcgcttttgccggtacagcagttccagaatcacgcatttgttatggtggcgaatctgttgattgttaatgcaggctctcatcttcactaaaccttgtttagttaattgcgtgattattacgcgaaaacattgccatattgttcaatatactgccacaaatcttttaattcagtatgtcttgttaatattgagggcaccatgactccagtaaaagtgtggcaagagcgcgttgagatcccgacctatgaaaccgggccgcaggatatacatcccatgttcctcgaaaatcgcgtttatcagggatcgtccggcgcggtttatccctacggcgtgaccgatacgctgagcgagcagaaaaccctgaaatcctggcaggcggtgtggctggaaaacgactacatcaaagtgatgatcctgccggaactgggcggtcgtgtgcatcgcgcatgggataaagtgaaacaacgcgattttgtctatcacaatgaagtcattaaacctgcgctggtggggctgctgggaccgtggatctctggcgggattgagtttaactggccgcaacaccatcgcccgaccacctttatgcccgttgatttcaccctcgaagcccatgaagacggcgcacagacggtgtgggtcggcgaaacggagccgatgcacggtttacaggtgatgacaggtttcacactgcgtcctgaacgggcggcgttggaaatcgccagccgcgtctataacggcaacgccacgccgcgtcatttcttgtggtgggccaacccggcagtgaaagggggggaagggcatcagagcgtcttcccgccggatgtaacggcggtgtttgatcacggcaaacgggccgtctccgctttccccatcgccaccggcacttactacaaagtggactactccgccggagtggacatttctcgctataaaaatgtgcccgttccaacctcatatatggctgaaaaatcacagtacgattttgttggcgcgtggtgtcacgatgaagatggcggtttgctacacgttgccaaccaccatatcgcgccaggtaaaaaacagtggagctggggacacagtgaattcggccaggcgtgggacaagagtctgaccgacaataacggcccgtatatcgaactgatgaccggtatttttgccgataaccagcctgattttacctggcttgatgcttacgaagagaagcgttttgagcagtatttcctgccttatcattctttgggcatggtgcaaaatgcctcccgcgatgcggtgataaaactccagcgtagtgagcgggggattgagtgggggctgtatgccatctctccgttgaacggataccgcctggcgatccgcgaaatcggcaaatgcaacgcgttacttgatgatgccgtggcactgatgcctgcgaccgccatccagggcgtgttgcacggtatcaatcctgaaaggctgaccattgagctctccgatgccgacggcaatattgtcctgagttatcaggaacatcagccgcaagagttgccgttgccggacgtcgccaaagcgccactggcagcacaagacattaccagtacagatgaagcctggtttatcggtcagcatctggagcaatatcatcacgccagccgttcaccgttcgattactacctgcgcggcgtggcgctggacccgctggattatcgctgtaacctggcgctggcgatgctggaatataaccgcgcagatttcccgcaagcggtggcgtatgccactcaggctctgaaacgcgcacatgcgctgaacaaaaatccgcagtgcggacaggcgagtttgattcgcgccagtgcttacgaacgtcagggacaatatcaacaagccgaagaggatttctggcgtgcggtctggagcggcaacagcaaagccggtggctattatggcctggcacgactggcggcgcgtaatggtaacttcgacgctggtctggatttttgccaacaaagtcttcgcgcctgcccaaccaatcaggaagtgctttgcctgcataatctgctgctggtgttaagtggtcgtcaggacaacgcgcgtgtgcagcgcgagaaactgctgcgcgattatccgctgaacgccactctgtggtggctgaactggttcgatggtcgtagcgaatcagctctcgcgcagtggcgcggtctgtgtcagggacgcgacgttaacgccctgatgaccgccgggcaactgattaactggggaatgcccaccctggcggcagagatgctgaacgcactggactgccagcgcacgctgccgctttacctgcaagccagcttgctgccgaaagccgaacgtggcgaactggtcgcaaaagccattgatgtcttcccgcagtttgtccgtttcccgaatacgctggaagaagtggcggcgctggagagtattgaagagtgctggtttgcccgtcatttactggcctgcttctactacaacaagcgtagctacaacaaagccattaccttatggcaacgttgcgtagagatgtcgccggagtttgccgacggctggcgcgggttagcgatccatgcgtggaataagcaacacgattatgagctggccgcgcgttatcttgataatgcttatcagcttgcgccgcaggatgcacgtctgcttttcgaacgggatttgcttgataagttaagcggagccacaccggagaaacgactggcgcgtctggaaaataatctggaaattgcgctgaaacgcgacgacatgacagcagagttgctcaatttgtggcatctcacgggtcaggcagacaaagcggcggacattctcgccacgcgcaaattccacccgtgggaaggcggggaagggaaggtcaccagtcagtttatcctcaaccagttattacgcgcctggcagcaccttgatgccagacagccgcagcaggccagcgaactgcttcatgccgcgctgcattatccggagaatttaagcgaaggccgtttaccggggcaaactgataacgacatctggttctggcaggcgatatgcgccaacgcgcagggcgatgaaactgaagcgatgcgttgtttacgtctggcggcgaccggcgatcgcaccattaacatccacagttattacaacgatcagccggttgattatctcttctggcaaggaatggcgctgcgactgctgggcgaacaacacaccgcacagcaactgtttagtgaaatgaaacagtgggcgcaagagatggcgaaaaccagtattgaggcggatttctttgctgtttcacaacctgatctgttgtcgctgtatggcgatttacaacagcagcataaagaaaaatgcctgatggtggcgatgctggcgtccgcgggactcggggaggttgcgcaatatgagtctgctcgcgctgaattgacggcgattaatccggcctggccgaaagcggcattattcaccactgtgatgccttttatttttaactacgttcactaaaccctattaactgtaatatttgagcggcacgcgctgccgctcatcacaaaataattagaataagccgttgttaataaaaaccctacaggaggctctatgcctaaaaaaatgagaacaacccgtaatctattattaatggctacgctattaggtagcgctttatttgccagggctgcggaaaaagaaatgaccattggcgcaatataccttgatactcagggatattacgctggagtgcgtcaaggcgttcaggatgcggcaaaagattcttcagtacaggtacagttaattgaaactaacgcccagggtgatatttcgaaagaaagtacctttgttgataccctcgtggcgcgtaatgtcgatgccattattttatcggcagtgtctgaaaatggcagtagccgtaccgttcgtcgcgccagtgaagcgggtattccggtgatttgctacaacacctgtattaatcaaaagggtgtcgataaatatgtctcggcgtatctggtcggcgatccgctggaatttggtaaaaaactgggtaatgctgccgccgattattttattgccaataaaattgaccagccgaaaattgccgtcatcaattgcgaagcctttgaagtttgtgtgcagcgacgtaaaggatttgaagaagtattaaaatcccacgttcccggcgcgcaaattgtcgctaatcaggaagggactgttttagataaagcgatttccgttggtgaaaaactaattatctccacgccggatctcaacgccattatgggtgaatcgggcggagcgacactcggcgcggtaaaagcggtacgtaatcaaaatcaggccggaaaaattgctgttttcggttcggatatgaccactgaaattgctcaggagctggaaaacaatcaggtgctgaaagcggtagtggatatttccggtaagaaaatgggcaatgctgttctcgcgcaaacattgaaggttatcaataaacaagccgacggtgaaaaagtgattcaggtgccaatcgatctctataccaaaacggaagatggtaaacagtggctggcaacgcacgttgatggtctgccctaatcgctgattcgcagaggtccctatgttcacggcaacagaggcagtcccggtagcaaaagtggtggcaggaaataagcgttaccccggcgtcgttgcgctggataacgttaacttcacgctcaataaaggcgaagttcgtgcgctgttaggtaaaaacggcgcgggcaaatcgactctcattcgaatgcttaccggcagtgaacgcccggatagcggtgatatctggattggcgagacgcgactggaaggtgacgaagctacgttgactcgccgtgccgctgaactgggggttcgtgcggtttatcaggagttaagtctggtggaagggctgacggtggcggaaaacctctgcctcggtcagtggccccgccgcaacggcatgattgattacctgcaaatggcgcaggatgcccaacgttgcttacaggcgctgggcgttgacgttagtcctgaacaacttgtttcaacgctaagcccggcgcaaaagcaactggtggaaattgcacgggtgatgaagggcgagccgcgcgtggtcattcttgatgaacctacgagttcgcttgccagtgcggaagttgaactggtgatcagcgcggtgaaaaagatgtcggcactgggcgtggcggtgatttatgtcagccaccggatggaagaaattcgccgcattgcctcctgtgccaccgttatgcgcgatggtcaggtggcgggcgatgtgatgctcgaaaacacctccacgcatcatattgtgtcgctaatgctagggcgcgatcacgttgatattgcgccggtagcccctcaggaaattgtcgatcaggccgtgctggaagtccgtgcattacgccataagcccaagctggaggatatcagctttacgttacgtcgcggcgaagtgcttggcattgctggcctgctgggggcagggcgcagtgaattgctgaaggcgattgttgggctggaggagtatgaacagggcgaaattgttatcaacggcgagaaaatcacgcgccccgattacggcgacatgctgaaacgcggcattggctatacgccagaaaaccgcaaagaagcggggatcattccctggttgggcgttgacgaaaatacagtgctgaccaatcggcaaaaaatcagcgccaacggcgtactgcaatggtccaccatccgccgcctgaccgaagaggtgatgcagcggatgacggtcaaggccgccagtagcgaaacgcccatcggcacgctttctggcggcaatcagcaaaaagtggtgatcggtcgttgggtctatgccgccagccagattttgttgctcgacgagccaacgcgcggcgtcgatatcgaagccaaacagcagatttaccgtattgtccgtgagctggctgccgaaggaaaaagcgtggtgtttatctccagtgaagtggaggagttgccgctggtgtgcgaccgcatcctgttgttacagcacggtacgttctcgcaggagtttcactcgccggtcaatgtggatgagctgatgtccgccattctgtctgtgcactgatgaattttaccgaggaacctgaagatgtctgcttcgtcattaccattgccgcagggcaagagcgtctcgctcaaacaatttgtcagtcgccatattaatgagatcggtttgctggtggtgattgccattctttatctggtcttctccctgaacgcgcctggctttatctcattgaataaccagatgaacgtgctgcgcgatgccgccaccattgggattgccgcctgggcgatgacgctgattattatctccggtgagattgatgtcagcgttgggccgatggtggcttttgtctcggtgtgcctggcatttttgctgcaatttgaagttccgttggcgattgcttgtctgctggtgttgctgttaggcgcgctgatgggaacgctcgccggggtgctgcgcggcgtgtttaacgtaccaagtttcgttgccacactggggctgtggagcgccctgcgcggaatggggctgtttatgacgaacgcactgccagtgccgattgacgaaaacgaggtgctggactggctgggcggacaatttctcggtgtgccggtatccgcgctgatcatgattgtgttgtttgcgctgtttgtgttcatcagccgcaaaaccgccttcgggcgctcggtttttgccgttggcggtaatgctcaggcggcgcagttgtgcggcatcaacgttcgtcgggtgcgcattcttatctttaccctttcgggattattagcggcggtgaccggcattttgttggcggcgcgcctcggttctggtaacgcaggtgccgcaaacggtctggagtttgacgtcatcgccgcggtcgtggtcggcggtacggcactttccggcggtcgcggttccctgttcggtacattgcttggtgtgctggtgattacgctaatcggtaacggtctggtgctgctcggtattaactcctttttccagcaggtggtacgcggcgtcatcatcgtggtggcggtgctggcgaatatcttgctgacccagcgaagcagtaaagcgaaacgctaaaccttaacgcccctggcgcgggtgcggcagggatgaaaattaatcgtattgttaatgagggatttatgaaaacgatgctggcagcttatttaccaggaaattcgaccgtcgatctacgggaagttgcggtgccgacaccagggattaaccaggtactgatcaaaatgaaatcttccggaatttgcggaagcgatgtccactatatctaccaccagcaccgcgctacggcagcggcacccgacaaaccgttataccagggatttatcaacggtcatgaaccgtgcgggcagattgtggcgatggggcaaggctgccgccattttaaagagggcgaccgcgtgctggtgtatcacatttctggctgtggtttttgcccgaactgccgccgcggctttcctatctcttgtactggcaaaggaaaagcggcttacggctggcagcgtgacggcggtcatgccgaatatctgctggcggaagaaaaagatctgatcctcctgccggatgcgctgagctacgaagatggtgcgtttatcagttgcggcgttggcacggcctatgaagggattttgcgcggcgaagtttccggcagcgataacgtgctggtggtcggtctggggccggtcggcatgatggcgatgatgctggcgaaaggtcgcggtgcaaaacggatcatcggcgttgatatgctgccggaacgtctggcgatggcaaaacagttaggggtgatggatcacggctatttagcaaccaccgaaggtctgccgcagattatcgccgaactcacccacggtggcgcggatgttgcgctcgattgttccggtaatgccgcaggtcgcttgctggcactgcaatccaccgctgactggggacgggtggtttacattggtgaaaccggaaaagtggaattcgaggtcagcgccgatctgatgcaccatcaacggcggattatcggctcctgggtgaccagtctgttccatatggaaaaatgcgcccatgatctgacggactggaagctgtggccgcgtaacgccattacccatcgcttctcgctggaacaggcaggtgatgcctatgcgctgatggcgagcggcaaatgcgggaaagttgtgattaacttcccggattaaggagttagcggatgaccatctataccttatcccacgggtcgctaaagctggacgtttctgaccagggcggcgtaatcgaaggcttctggcgcgatacgacgccgctcttacgtcctggtaaaaaaagcggtgtggcaaccgatgcctcatgttttccgctggtgccatttgcaaaccgggtgagcggcaatcgttttgtctggcaggggcgtgagtatcaactgcaaccgaatgttgagtgggatgcgcactatctacacggcgatggctggctgggcgagtggcaatgtgtctcgcacagcgatgatagtttgtgtctggtgtatgaacatcgcagcggtgtctatcactatcgggtaagtcaggcgtttcatttaacggcggatacgctgacggtgacgctctctgtcaccaatcaaggggcagagacgctgccatttggtaccggctggcatccttattttccgttgtcgccgcaaacgcggattcaggcacaggcgagcggttactggctggagcgggagcagtggctggcgggtgagttttgcgagcagctaccgcaggaactggattttaaccagcccgcgccgttgccgcgccagtgggtgaacaatggttttgccggatggaatggtcaggcccgcatcgagcagccgcaggaaggttatgccatcatcatggaaacgacgccacctgcaccgtgttatttcatctttgtttccgaccctgcgtttgataaaggatatgcgtttgatttcttctgtctggaaccgatgagccatgcgccggatgatcatcatcgcccggaagggggtgatctcattgcgctagcaccaggggaatcaacaacttcagagatgtcgttgcgggtagagtggctgtaatttattaaatgccggataaggcgttcacgccgcatccggcatctttcctaacgccgatcgagagaaattgcccccggcccggtaattgccagcagcaggactgcgccagcgatactgacattcttccagaaattaatcatatttggcccaaccgcatcgccggtcatatcccagtaatggtgaccaatcaccgccgtacccagcgtgtagaaaataaacagcaccgccagcggacgggtgaaaaagccaagcacgattaatatcgcggcgggcacttccataactaccgcaataatcgctgccagcatcggcatcggcgcgcccaacgaggccatatattggaccgtaccgtcaaagcccatcattttgggaaaaccaaaaataatgaaaattaagaccacggcgatacgggcaattaataacaaaacggggcgggcagctccaaaatcaaaataacgtagtgtgttcataaccaatccctttgcaagataatgtgatttaaacgtaatacacactcttgcacctcgccacgccccaggcattgagatattcgctaattatcctggttacagtgatttaagcgcgatgttctcatctatcagcagtttcgcatcaaacgttttgccgctctggatccatttgcgaattgggcgaatctcacgcccctgattcagcgtgaccgcaccgataagcacgccgttttgcagattaaaccaaatcgccttctgagtttccgggttgccacgacaaagccagtcatcgccacgcatatcgccaataaactgtaagttatcactgtactgatcgctccagaaccacggcggcggcagtagcggtagcggtagccctaacattgcggcagcggcaatttgcgcctggttattggcgttttcccagctttcgcagcggtgtagtgcaccattatcaagacgagtgattgccacatcgccaccggcaaagatcgcgggatcgcaggtgcggcaagcctcatcaatgacaatgccattggcagtatcaaggttggcctcgcgagccagttgctcgttggcgctgataccaataccgtaaatcaccacatcagcctgaagcgtttccccactttgcagcgtcagttctactttttcaccatcgaccacatgttcaatggcattattgagcagaatgcgcacaccagcctgctggtggcgctgtaaaagatagcgttgcacgggcggtggtgcattacggcccatgacggttgccgccagttcaatcactgtcaccttacatctgcgctgcgtggcgctggcagccagttccagaccaatagttccggcaccgacaatcacgactgaccgttcgggctgcagaacttctcgcagtctggcggcatcaccggcatggcgtagggtaaagcagcgttctcccagtgcatcaagcaacggcagcggtcgagctgccgcgccggttgctataaaaagctgatcccagtgccagctttcgccgttggttaacactaactctcgtgtgtcgcgacccagcgttttgatggttacaccggaatgcagatgaacattgttttcctgccaccagttagcgggtaacacctgctgtaactgcggggaatcttccagcaacatggatttcgagagtggaggtcgttcataaggaagatgtcgctcatcggaaaacagatgcagctcaccggtgaacccttgctggcgtagcgaggccgcagccattgccgccgcttgcccgccaccgacaataatgatggttttttctttcatcgtgcttccttaaagatccagcccagccgctacgtggcgaatgccgcgaatcgctaaacccgcatcagcgttgatcatcacaccgcttaatgcgcgattattgcgccgcgatgccaacatcacatacggacccgtaaaatccgccggttgcgggaaaaattgcagcggtaaaatggcggcaattttctccggcgtcagagactgcattatcgaggtttcactttgcccgagcgcctgtgggccgcgcaggtcgctggccataccacacgggccgacgccattcacccgcactttcggtgccagttcataagccagttggcgaataagtccggttgcggcatgtttactggcggtgtacagcgggccaccgccgccaggataccaggcggcatttgacagtgtgaaaatcatgctgccttcactggcgattaacgccggagcgcaggcttttgcgcccagcaggtaaccgagaacattgacgttaaacagctcgtggaagccggtttcgagcgtctctgcgggagtattaaccagtgaggcattgtgatcccagatgcctgcattgccgataaaacaatccagcttgccggaacgagtcaggatctgatcgaccgcgcgttgataatcggcataacaggtcacgttaccttccaccgccagaatatgttcgccaaatcgctgacgcagactggcgacttttgccgccgacagttccagcgtggcaacctgcgcgccttcttcgataaatcgctcgaccagcgccagccctaatcccgatccgccgccggtaataaaaatggactcgttatgcagatcgctcatggctgcgcctccggtaagtcgatgaaaatgtcaccaccttcaacgtgtactggataagtggtgagcggatcggtggcgggcaggcataacgctttccccgttttcaggcaaaaactggcggcgtgtagcgggcactccaccgtggcgtcatcttccagatacccttctgacattgacgcattaccatggctgcaacgatcgttaatggcataaaactcgccgccaacgttgaacagggcgatgacgggcgaggtatcgatccggagagcctcaccctccggcacatccgcaacgggacacgcataaattcgattcatcagaacagtacactcaggttatgggaagtgattaccgcttgatccaggacgatatcccgttccagcaagcgccagttgtcatcttccagacggcgaactttgtcaaaacgagtcccgacatagaacgtttcatcgcgctctttttgtgcccgataaagcagataattcacccgaacagcaaatacgtttgggatgtcggtttcgcttatctggcagttgctgattaagtggcgggtgcgtgacggcggctcttctgcccatgccatgcccgtttccagacgggcgattcgccgctgcagctggtctttggtgtcattaaaattccaggttgtcggtggctggacgcctttgcggcggtcgcgtgtttgcgcgttaactgtggtgcgcatggtgtaacgaatctcttcgtcgagctgcgccagccagtcacgaaatttccagtcgtccagtaagctggcttcgtgaaagagaaactggctaatgcggtgatgtaactctagtgaaacttgcgcactcatttcatcacctcctgctggtaagcggcggttttatcgagcacttcctgccagctttcgctactcagaagatcggcccagcgttggtacattccacgagcggccgtttctgagaagatatagttagtaatgcctggaatgccgtcgtcgcgacgcttttcctgaccaagccccatttccagacacagtttgctgttgcgggcgcggtgacctttcagcaatttctggatttcacaccagttctccgagtcatcctgctcgagaaaaccagcaggaccaaaagcacgagtggcgctgttttcaaaagcggctttaacttcatcggaggcggctttgtcagtaatacagaacgcccacacttcaacttgatcagggccgcgcggatgccagacgcggagtgtggcagtgccgtttagccatgaaagcgtggggaatatattgttatgacccgccaggcgcagggcgcgaacttcacctaaacgttgttctgcttcggcataggtttcgcggtaatagcttgaaactgcgccatcgacccagacattagcatccggtttttcagtaaagaagaaaccgctaccgtgaccgtcctgaccaaattgcagcgcatctttggcggtttcccacaccgggcgggcggtttgtccatcaccgaggcgcttatcgctgccatcatctttcgcccctaatacctgaacggcagaagcatggctgaacagagcatgatactggtcactggcgaactgctctgccgggaatttccagttacagttgatcacccacttttgtacgccgccgacaatttcggtgccgccttcgcgacgatccagcatgccatccagataccaggcaatgtcacccaggtaatcacgcaggcccggtgcgctggtatcccagttgccaaaaatcagccctttataactctccacacaaggaacttcgtttagtccccagtgggatttacacaacccttgtgggtaggcgcgaggttccagcggtacatcgatcaactcgccgttaatgccataagaccagccgtgatacgggcaggtaaaggcgcgagtgttgccgcaatctgcataactcacacgcatggcccggtggcggcattggttgagaaacgccttgatgctgccgtctttctgacgcactacgacaaccgcatcttctcccatgtaggtgttaaagaaatcaccgggttttgggatctggctttcgtgggcgagaaatagccagcaacgaccgaaaatacgctcaagctccagttggtaaatatccgggtcggtataaatacgcggagtgacccgaccattttgggtgtcaatcagttggtaaatgttcaaatctgagggtgtggtcatattttttaatcctgaaagataagatgtattgaccttctatttttgtgccataaggatgttgctggttggttgctaatatgtgaaatagttaatttctaccagctgagacgttttttcgataacaaggggaaggtgatggaactacggcatttacgctatttcgtcgcagtggcgcaggcactgaactttacccgtgcggcggaaaaactgcatacctcacagccttcgttaagcagccagatccgcgatcttgaaaactgtgtcggtgttccgttactggtgagggataagcgcaaagtcgcgttgacggcggcgggagaatgttttctccaggacgcgctggcaatcctcgaacaagcggaaaatgccaaattacgggcgcggaaaattgttcaggaagacagacaattaaccattggctttgtgccatcggcggaagtgaatttactgccaaaagtattaccgatgtttcgtctcagacagccagacaccttgattgagctggtgagtttaatcaccacgcaacaggaggaaaaaattcgccgtggtgaactcgacgtcggcttaatgcgccatcctgtttatagcccggagattgattatctggagctttttgacgaaccattagtggttgtgttaccggttgatcaccctttagcacatgaaaaagagatcaccgccgcgcaactggatggcgtgaatttcgtcagtaccgatccggtgtattccggttcgcttgcgccgatcgttaaagcgtggtttgcgcaagaaaacagccagccaaatatcgtccaggtggcaacgaatattctggtgaccatgaatctggtgggcatggggctgggcgtcactttgatacccggttatatgaataattttaataccggacaggttgtttttcgtcccattgccggaaatgtgccttccattgctttactgatggcgtggaagaaaggggagatgaagccggcattacgcgatttcatcgccattgtgcaggaacgtttggcaagcgtaacggcataattacgcattatttttgcaacatgcgtcgcggatctcagttttttagtgcttgtgaactggcgttacagacatcgggaagcaggctcgaatattcttatttttcaacttgcaccaacattcgattaaccccagactaacgcctcctgacgggagggactcatggttttgcaatccacgcgctggttggcgctcggctatttcacatacttttttagttacggcatttttctacctttctggagcgtctggcttaaagggattggtttaacgccagaaaccatcggcctgttattgggggcaggtctggttgcccgtttcctcgggagtttgctcatcgcgccccgcgtcagcgatccttcccgcctgatttccgccttgcgcgtgctggcactgctgacacttctctttgctgtcgccttctgggcgggggcgcacgtagcgtggctgatgctggtgatgattggctttaacctctttttctcaccactggtaccgttgaccgatgcactggcgaatacgtggcaaaagcagttcccgcttgattacggcaaagtgcgactgtggggctcggtggcgtttgtcattggctcggcgctgacgggcaaactggtcactatgtttgattatcgggtgatcctcgcgctgttgacgttgggcgtggcatccatgctgctcggctttctcatccgtccgacgattcagccacaaggggcaagtcgccagcaggagagcaccggttggtctgcgtggttggcgctggttcgccagaactggcgctttctggcctgcgtttgtttattgcagggggcacatgcggcctattacggttttagcgccatttactggcaggcagctggctactcggcctcggcggtggggtatttgtggtcgctgggcgtggtggcggaagtcattatctttgcgctgagtaataaacttttccgccgttgtagtgcacgcgatatgctgttgatctcggcgatttgcggcgtagtgcgctggggcattatgggagcaactacggcgttgccgtggttgatagtggtgcaaattctgcattgcggcaccttcacggtctgccacctggccgccatgcgttatattgctgctcgccagggtagcgaagtcatccgtttacaggcggtttactctgccgtcgcgatgggcggcagtatcgctatcatgaccgttttcgccggtttcctgtatcaatatctgggccacggcgtgttctgggtaatggcgctggtggcgctgccggcaatgtttttgcgcccgaaagttgttccctcatgctgattcgagcattttgcggatctgctcctgttgatgtgttgtcagcgtcaggtccgtatagatcagcggtggtgaaaagagcggtaatggcatggtataaggcgcaataatcagtgccgcgccacgcggagcgcctgtctgcaaaaatgcctttaccgacatatgcttaatgttgagcggcagtaacgttagttcgcgtaactgctgctcaatctgcgcttctcgctcgctatcattcccggtcagtagcataatctgtttttcatgcagttcgttttcctgcattagccaggcaccgaaaatcaccgcgaccagaccactttcctcatcagaaagatggacgccgtattcactttcaaatccggccagcgccgcgcgggtggtgcgcaccaggcgtgggtacagtctggcgaactcttccggcagggtattatcaataccgatggcaaacaaactgcgatttaacgcctgggcgaggtgggtataaagctgatcacataacccctgttcatcataaaaacgaacatttcccagctcacgaaaatggtttaccagacgtttgatagactgacgcaattgtctgtctcgctgatgcgcatcccgcagtggatcgggaacccgcaacatggaaaaaagtagtgccataaacagtggctcatcaggcggtacaggctggagcgcccgacgctgccagtggcgtccaatttcctgcgctacctgaaattcaaggcaggattccgcccagcgacgttggagcggattaaactgaggcgtaattccagcgtggtgctgcagcaaacaatattgcagatacagacacaggaaatgaatatcgcgcgattcaaagcgtttttgcagccgtcgggagcagagattcactaacgcttgtagattggtatcgtcgtaaaagttacgcgcaattccgcgccgcttcagttcactcttcagggcgggggtgaattggctggtaataaatgacggacacagacggaaaccacgtcgtagccagtgaaataaacacaaacgttggttaagcactgtaccttcaacccggtagctaccgtcataaccagtcgtcagtgtgagttgatgatagcgcaggatctcccgtcctgtttcgctgatatcaagactggcaatatcatcatccacaccattaagctcgctgaaggttgccatggtggcggtcaaccccggctgaaagagcgtcagcaagatctggcagcggcgctggggagccgaaaggacagatggtggagcaagcgtaggcatcatctgtagatctcccataagcataattgataagaatagctaaagtttgctcagggaaatggcgaagggaatgctaatcatcagaaatgttggcaagcgtcacagaatttttctcatcttaaactgttctgaccagtggattagcatgtcttaaggtggttttgtgaatgattatcgtgctagcgatcatgggttagttctgcggattcaacgcgctaaggataaagtccaccatctgttcgcgataaacatcgccgtggcgatcggaaaaagcatcaatgtgttcgccatccgggattaggatcaaccgttttggctcttttgccaggctatacaacttttcgctgtgctgccatgggataacgtgatcagctttaccgtgaatgagtaaaagcgggatcgggnnnnnnnnnntataattttcgccgctgtaactctcatcaagtaagtagccactgccggggatcatctggttggcgatggttgcataagaggcaaatgtggagtcgaggatcaccgcacgtatgccttcacgatcaccctgaccaataacagcaagaatattcgccccgccaatactctgcccgaacagcaccagccgttgtgggtttacatcactgcgatggcgcaccacattgatggcgctttgcgtatcgtccagcaatccggcctgggacggcgtgccttttgatttaccaaacccgcgataatcaaacataaaaacgttgaaattacgctcgggtaaccaactgaccagcggccagtgggcggacatatttccggcattgccgtgagcatgaatgatggttgcgatggcgttgtcagcagggcccgtcgaagaaggaataaaccagccttgcagacgagtaccgtccttagccgtaaattcgacggattccgccgaccaggggtcgggaccgtaaattttatcgtcaggataatagaagaagttgatggcaacgcgcggcactaaataaacgcagaaggcaacaacaaagagaataaacagaattttgggaacgcgtttgttcactggcagtgccataacctttccttgcgacttctttatcatccattaatcggggaaagatggtgggagagtgacgaaagaaagtaaagcggtgaggaagtatttcagaatagcgcctgaaaggcgagggcgggtgagtgacatcacccgcctgagtcattaacgcttcagagcgtcgcttaactcgtcacgcatgttcgccagcatggctttcacaacacgtgggttaccagcaacgatgttaccggtcagcatatagttatgaccaccggtgaagtcgctgacgatgccgcccgcttcacgaaccagcagctcgcctgccgcgaaatcccacggacgcagaccgatttcaaagaaaccgtcaacacgacccgcagcgacgtaagccagatccagcgccgcagaaccggtacgacggaagtctgcacattcgttgaacagtttgccgacgatgttgatgtaggtagtggcgtactgttttgctttgaacgggaagccggtcgccagaatggtaccgtcgagatcgcgagcggtgctaccgcgcagacggtagccgttcagctgtgcgccctgaccgcgagtggcggtgaacagttcgttacgcataggatcgtataccacagcaacttcggtgcggcctttgatacgaacggcgatagataccgcgaagtgcggcagacgtttgataaagttggtagtaccatccagtggatcgataacccattgaacatcctgatcagtaccttcaagttcaccgctttcttcggtgatgatggtgtgctgtgggtaagatttacgaatcgtgtcgataatcaccgcttcggcagctttatctacgttggtcacgaaatcgttactgcctttctggctcgcttctacagcgtccggggtttcatagtttttggcaattaaattacccgccttgcgcgctgcgcgcacggcgatgttcagcatcggatgcatcggtctctctcactggatgttaaagaacgggaaaacggcgcagagtatagcagcgagatcggcatctgtcttcgttttatgataagatgcgtgaataatctttagatgaagaaagacaatgctgcaaaatattcgaattgtgctggtggagacgtcacacaccggcaatatgggttctgttgcccgtgccatgaaaacaatgggattaaccaatctgtggctggttaatccactggtgaaacccgactcccaggcgattgccctggcagcaggggccagcgatgtgattggtaatgctcacatcgtcgatacgctcgacgaagcgttagccggttgtagcctggtggtgggcaccagcgcacgctcccgcacgctgccatggccgatgctcgacccgcgcgaatgcggcctgaaaagcgtcgctgaagcggcaaataccccggtggcgctggtgtttggtcgcgagcgcgtcggcttgaccaatgaagagttgcagaaatgccattatcatgtcgcgattgcggctaacccggaatacagctcgctgaacctggcgatggcggttcaggttattgcctatgaagtgcgcatggcctggctggcaactcaggaaaacggcgagcaggtcgagcatgaagagacgccgtatccgctggtcgatgatctggagcgtttttatggtcatctggaacaaacgctgctggcaaccggttttatccgtgaaaaccatccggggcaggtgatgaataaattgcgccgtctgtttacccgtgcgcgcccggaaagccaggaattgaatatcctgcgcgggattctggcttctattgagcagcagaataaaggtaataaggcctgagggctaagccagataaatgcacggacggtcccctcgccccttcggggagagggttagggtgaggggaagaggccagcgctaatgcgaataattgccctcaacccgcccatggtctggaaggacaacaggtacaaacgccacgataaaaaaatggcactgaaggttaaatacccgactaaatcagtcaagtaaatagttgaccaatttactcgggaatgtcagacttgaccctgctatgcaatacccccacttttacaataaaaaaccccgggcaggggcgagtttgaggtgaagtaagacatgagactgacatctaaagggcgctatgccgtgaccgcaatgcttgacgttgcgctcaactctgaagcgggcccggtaccgttggctgatatttccgaacgtcagggaatttccctttcttatctggaacaactgttttcccgtctgcgtaaaaatggtctggtttccagcgtacgtggaccaggcggtggttatctgttaggcaaagatgccagcagcatcgccgttggcgaagtgattagcgccgttgacgaatctgtagatgccacccgttgtcagggtaaaggcggctgccagggcggcgataaatgcctgacccacgcgctgtggcgtgatttgagcgaccgtctcaccggttttctcaacaacattactttaggcgaactggttaataaccaggaagtgctggatgtgtctggtcgtcagcatactcacgacgcgccacgcacccgcacacaagacgcgatcgacgttaagttacgcgcttaataaaaagaattcagaatcaggccggagtgctaaatactccgtaaacacggtcgtacatccagccggtagcctggttccttgcattgagtgatgtacggagtttatagagcaatgaaattaccgatttatctcgactactccgcaaccacgccggtggacccgcgtgttgccgagaaaatgatgcagttcatgacgatggacggaacctttggtaacccggcctctcgttctcaccgtttcggctggcaggctgaagaagcggtagatatcgcccgtaatcagattgccgatctggtcggcgctgatccgcgtgaaatcgtctttacctctggtgcaaccgaatctgacaacctggcgatcaaaggtgcagccaacttttatcagaaaaaaggcaagcacatcatcaccagcaaaaccgaacacaaagcggtactggatacctgccgtcagctggagcgcgaaggttttgaagtcacctacctggcaccgcagcgtaacggcattatcgacctgaaagaacttgaagcagcgatgcgtgacgacaccatccttgtttccatcatgcacgtaaataacgaaatcggcgtggtgcaggatatcgcggctatcggcgaaatgtgccgtgctcgtggcattatctatcacgttgatgcaacccagagcgtgggcaaactgccaatcgacctgagccagttgaaagttgacctgatgtctttctccggtcacaaaatctatggcccgaaaggtatcggtgcgctgtatgtgcgtcgtaaaccgcgtgtacgcatcgaagcgcaaatgcacggcggcggtcacgagcgcggtatgcgttccggcactctgcctgttcaccagatcgtcggaatgggcgaagcctatcgcatcgcaaaagaagagatggcgaccgagatggaacgtctgcgcggcctgcgtaaccgtctgtggaacggcatcaaagatatcgaagaagtttacctgaacggtgacctggaacacggtgcgccgaacattctcaacgtcagcttcaactacgttgaaggtgagtcgctgattatggcgctgaaagacctcgcggtttcttccggctccgcctgtacgtcagcaagcctcgaaccgtcctacgtgctgcgcgcgctggggctgaacgacgagctggcacatagctctatccgtttctctttaggtcgttttactactgaagaagagatcgactacaccatcgagttagttcgtaaatccatcggtcgtctgcgtgacctttctccgctgtgggaaatgtacaagcagggcgtggatctgaatagcatcgaatgggctcatcattaatcggtatcggaatcaggagaatttataatggcttacagcgaaaaagttatcgaccattacgagaatccgcgtaacgtgggttcctttgacaacaacgacgagaacgtgggaagcggcatggttggcgcgccggcctgcggcgacgtcatgaagttgcagattaaagtcaacgatgaaggtatcattgaagacgcgcgtttcaaaacttacggctgcggttctgctatcgcttccagctccctggtcaccgaatgggtgaaagggaagtctctcgacgaagcgcaggcgatcaaaaacaccgatattgctgaagaacttgaactgccgccggtgaaaattcactgttctattctggcagaagacgcgatcaaagccgccattgcggactataaaagcaaacgtgaagcaaaataagagttgaggtttggttatgtcgattacactgagcgacagtgcagcagcgcgagtaaatacctttctggctaaccgcggcaaagggtttggcctgcgtctgggcgtgagaacctccggatgttcaggtatggcttatgtactggaatttgttgacgaaccgacgccggaagacatcgtgtttgaagacaaaggcgtgaaagtcgtggtcgatggcaaaagcctgcaatttctggacggtacgcaactggacttcgtaaaagaaggcctgaacgaagggtttaaattcaccaacccgaacgtcaaagatgagtgtggttgcggcgaaagcttccacgtttgatgcgcataccgataaccccaccgtggtcgcctgcgcgtggggtttgttttacctgattcgccgttatcgcggcggatcgcagccctgagaatgttatggattacttcaccctctttggcttgcctgcccgttatcaactcgatacccaggcactgagcctgcgttttcaggatctacaacgtcagtatcatcctgataaattcgccagcggaagccaggcggaacaactcgccgccgtacagcaatctgcaaccattaaccaggcctggcaaacgctgcgtcatccgttaatgcgcgcggaatatttgctttctttgcacggttttgatctcgccagcgagcagcatactgtgcgcgacaccgcgttcctgatggaacagctggagctgcgcgaagaactggacgagatcgaacaggcgaaagatgaagcgcggctggaaagctttatcaaacgtgtgaaaaagatgtttgatacccgccatcagttgatggttgaacagttagacaacgagacgtgggacgcggcggcggataccgtgcgtaagctgcgttttctcgataaactgcgaagcagtgccgaacaactcgaagaaaaactgctcgatttttaatttctggaagctaaacatggccttattacaaattagtgaacctggtttgagtgctgcgccgcatcagcgtcgtctggcggctggtattgacctgggcacaaccaactcgctggtggcgacagtgcgcagcggtcaggccgaaacgttagccgaccatgaaggccgtcacctgctgccatctgttgttcactatcaacagcaagggcattcggtgggttatgacgcgcgtactaacgcagcgcttgacaccgccaacaccattagttctgttaaacgcctgatggggcgctcgctggctgatatccagcaacgctatccgcatctgccttatcaattccaggccagcgaaaacggcctgccgatgattgaaacggcggcggggctgctgaacccggtgcgcgtttctgcggacatcctcaaagcactggcggcgcgggcaactgaagccctggcaggcgagctggatggtgtagttatcaccgttccggcgtactttgacgatgcccagcgtcagggcaccaaagacgcggcacgtctggcggggttgcatgttctgcgcttacttaacgaaccgaccgctgcggctatcgcctacgggctggattccggtcaggaaggcgtgatcgctgtttatgacctcggtggcgggacgtttgatatttccattctgcgcttaagtcgcggcgtgtttgaagtgctggcaaccggcggtgattccgcgctcggcggcgatgatttcgaccatctgctggcggattacattcgcgagcaggcgggcattcctgatcgtagcgataaccgcgttcagcgtgaactgctggatgccgccattgcagccaaaatcgcgctgagcgatgcggactccgtgaccgttaacgttnnnnnnnnnnctggcagggcgaaatcagccgtgaacaattcaatgaactgatcgcgccactggtaaaacgaaccttactggcttgtcgtcgcgcgctgaaagacgcgggtgtagaagctgatgaagtgctggaagtggtgatggtgggcggttctactcgcgtgccgctggtgcgtgaacgggtaggcgaatttttcggtcgtccaccgctgacttccatcgacccggataaagtcgtcgctattggcgcggcgattcaggcggatattctggtgggtaacaagccagacagcgaaatgctgctgcttgatgtgatcccactgtcgctgggcctcgaaacgatgggcggcctggtggagaaagtgattccgcgtaataccactattccggtggcccgcgctcaggatttcaccacctttaaagatggtcagacggcgatgtctatccatgtaatgcagggtgagcgcgaactggtgcaggactgccgctcactggcgcgttttgcgctgcgtggtattccggcgctaccggctggtggtgcgcatattcgcgtgacgttccaggtcgatgccgacggtcttttgagcgtgacggcgatggagaaatccaccggcgttgaggcgtctattcaggtcaaaccgtcttacggtctgaccgatagcgaaatcgcttcgatgatcaaagactcaatgagctatgccgagcaggacgtaaaagcccgaatgctggcagaacaaaaagtagaagcggcgcgtgtgctggaaagtctgcacggcgcgctggctgctgatgccgcgctgttaagcgccgcagaacgtcaggtcattgacgatgctgccgctcacctgagtgaagtggcgcagggcgatgacgttgacgccatcgaacaagcgattaaaaacgtagacaaacaaacccaggatttcgccgctcgccgcatggaccagtcggttcgtcgtgcgctgaaaggccattccgtggacgaggtttaatatgccaaagattgttattttgcctcatcaggatctctgccctgatggcgctgttctggaagctaatagcggtgaaaccattctcgacgcagctctgcgtaacggtatcgagattgaacacgcctgtgaaaaatcctgtgcttgcaccacctgccactgcatcgttcgtgaaggttttgactcgctgccggaaagctcagagcaggaagacgacatgctggacaaagcctggggactggagccggaaagccgtttaagctgccaggcgcgcgtcaccgacgaagatttagtggtcgaaatcccgcgttacactatcaaccatgcgcgtgagcattaacagaggttagtatgggacttaaatggaccgatagccgcgaaattggcgaagcactgtacgatgcgtatcccgatcttgatccgaaaacggttcgattcaccgatatgcatcagtggatttgcgatctggaagatttcgacgacgacccgcaggcatccaacgagaaaatcctcgaagcgattttgttagtctggctggacgaggccgaataatttccgcgtcatgcttcacgccgcagatgcgttggctgcgctcgttcaccccagtcacatagttatctatgctcctggggcttcactcacttgccgccttcctgcaacgcgaatcatttagcggaaaaatcctggggctgccaactggcggcccttttacaaagaaggataactaaaatgacagaagcgatgaagattaccctctctacccaacctgccgacgcgcgctggggagaaaaagcaacttacagcattaataatgacggcattaccctgcatttgaacggggcagacgatctggggctgatccagcgtgcggcgcgcaagattgacggtctgggcatcaagcatgttcagttaagcggtgaaggctgggatgcggatcgctgctgggcattctggcaaggttacaaagccccgaaaggcacgcgtaaagtggagtggccggatctggacgatgcccagcgccaggaactggataaccgcctgatgatcatcgactgggtgcgtgacaccatcaacgcaccggcagaagaattgggaccatcgcaactggcacagcgtgctgttgatctgatcagcaacgtcgcgggcgatcgtgtgacttatcggatcaccaaaggcgaagatctgcgtgagcaaggttatatggggctgcacaccgtcgggcgcggttcagaacgttctccggtattgctggcgctggattacaacccaactggcgataaagaagcaccggtgtacgcgtgcctggtaggtaaaggtatcacttttgactccggcggctacagcatcaaacagactgcgtttatggactcgatgaagtcggacatgggcggcgcggcaacggttaccggggcgctggcatttgccattacgcgcggactgaacaagcgcgtgaagctgttcctctgctgtgcggataacctgattagcggcaatgcgttcaagctgggcgatatcatcacctatcgcaacggtaaaaaagttgaagtgatgaacactgatgccgaagggcgtctggtgcttgccgatggtctgattgatgccagtgcgcagaaaccggaaatgatcattgttgcggctaccctcaccggggcggcgaaaactgcgctgggtaatgattatcacgcgctgttcagttttgacgatgcgcttgccggtcgtttgctggcgagtgcctcacaagagaacgaaccattctggcgtctgccgctggcggaattccaccgcagccagctgccgtctaactttgccgaactgaacaataccggaagcgcggcgtatccggcaggcgcgagcacggcggcgggcttcctgtcgcactttgttgagaactatcagcaaggctggctgcatatcgactgctcggcgacttaccgtaaagcgccggttgaacagtggtctgcgggcgctacgggacttggtgtgcgcacgatagctaatctgttaacggcgtaaactaatatgccggatgcggtgtaaacgccttatccggcctacaaattctgcaaattcaacaaattgcgaatcccttgtaggcctgataagcgtagcgcatcaggcatttgcgccccgaacgttgaatgaattgtggttcatatgtccgaaacaaaaaacgaacttgaagacctgctggaaaaagcagcaaccgaaccggcgcaccgcccggcctttttccgtactctactggaatccaccgtctgggtgcctggtacggcggcgcagggcgaggctgtggttgaagatagtgcgcttgatttacagcactgggaaaaagaagacggcaccagcgtcattccttttttcacctcgttagaagcgcttcaacaggcggttgaagacgaacaggcatttgtcgtaatgcccgttcgcacattgtttgagatgacccttggcgaaatgctcttccttaatgccaaactgccgaccggtaaagaatttatgccgcgtgaaatcagtttgttgattggtggagagggaaatccgctgagcagccaggaaatcctggaaggcggtgaatcgctgatattatcggaagtcgcagagccgccagcacaaatgattgattcactcaccaccttatttaaaaccattaagccggtgaagcgtgcttttatttgttcaattaaagagaacgaagaggcacagcctaatttacttattggcattgaagccgatggtgatatcgaagaaattattcaggcgacgggaagtgtagcgaccgatacattacctagcgatgaaccaatcgatatttgtcaggtgaaaaaaggggaaaaaggaattagccactttattaccgaacatattgcgccattctatgaacgtcgctggggtggttttttgcgtgactttaaacagaaccggataatctaaaatatgccgccctaaagggcggcattcgggcttacttgctgctctgaaggttgttaaccaccagtaaattgtcgccggagagactccggttattatttacttgggaaaacagcgcaccagaaacaataagtacgatacagaagcaccgtatcttcattgtgcggtccatgcgaagaccgcatcacgacagcaccactggcgatattgccgcgatagcaagcgctgagacgcgcttgctctaacggtcgcggaacatcctttccttaagccagcgcccgcttgcgagacggcggaaagggccgcagtggataatacactaacagaacaataataactctctttnnnnnnnnnngagagttactggcgagtattgtctccgctgagacgcgcttgcattactacggtaatacaacctgctggaaaggccgcgaaccagaccagcaataaaaaaccgccaaattcggcggttttttattgcctgtaaaatacttatttcactggctcaaccggtaaatctgcccgcgcgccccattcactccatgcgccgtcgtacagtttcacgtttggcacatccagcgtcgcgagtgctaacaaaaccacggctgccgttacaccagagccgcagctgacgataattggtttgtcgtagctgacgccgcgaccaaaaaatatcgcatccagttcatcggtcgtttttagttcgccttcgcgcaccagttccgtccacggaacattcagtgctccgggaatatgtccgcgacgtaaacctgggcgaggttcatcaacttctgcgttaaaacgtgcagccgggcgggcatcaataatttgcgccgtattttcatggcttgccaataatacatcggttactttcaccacggcttcaggattaaacgcggcgttaaactctccttccggcagctctactgcaccttcttctaacagcagatcatcgcgctgccagcctgcaagtccaccccccagaatcgacactttctctacaccaaaggtgcgcagcatccaccatgctcgtggggctgagaaaagattaccttcgtcatagacaatcaggtgcttatcctggttaacgcctaattcacgcatcgccacggcgaacgtttccgggcgcggcagcatgtgcggaagcggggaagtgtgatcagaaagcgcttcgatatcaaaaaacactgcgccgggaatatgtccattcagatactcctgagcaacgttacgatcctcctgtccaggcgacgccatgcgggcatcgataatctgaatttccgggtcatcaatatgttcggcgagccagtcggctcctacaaaccatgtcgtggacataggcatctccatttttgccggggttaggctaaattgtcggatgtttagtgaaaagcgacaagcaaaagaggctgatttggctgtctgagccacaattctcactaaaattcggattgtatgggcgtgatactgaattacataacgtaaattctcacgcataataattattcgacgttgctaacgggccattgtggcagggatgaaaaatgaaaaagttacgcgtagccgcctgcatgctaatgctggcgctggcagggtgcgacaacaacgataacgcgccaacagcggtgaaaaaagatgcgccttctgaagttactaaagcggcctcttcagaaaacgcgagttcagcaaaactctccgtgccggagagacaaaaactggcccaacagagtgccggtaaggtgctgacattgctggatctctctgaagtccaacttgatggtgcagccacgctggtgctgacgttctccatccctctcgacccggatcaggatttctcacgcgttattcatgtcgtcgataaaaaaagcggcaaagtggatggtgcctgggagctgtcagataatcttaaagagttacgtttacgccacctcgaaccgaaacgtgatttgatcgttactattggcaaggaggtcaaagcactcaacaacgcaaccttcagtaaagattacgaaaaaactataactacccgcgacatccaacccagcgtcggttttgccagccgtggttcgctgctgcctggcaaagtcgttgaagggctgccggtaatggcgctcaacgttaataatgtcgatgttaacttcttccgcgttaagccagaatctctgccagcattcattagccaatgggaataccgcaattcgctggcgaactggcagtcagacaaactgctgcagatggcggatctggtctacaccggacggtttgatctcaatcctgcgcgtaacacccgtgaaaaattattgctgccgctgggcgatatcaaaccgcttcagcaggcgggcgtgtatctggctgtgatgaatcaggctggacgttacgattacagtaatcccgcgacgctgtttacgttaagtgatatcggcgtttcagctcaccgttatcacaatcgtctggatatctttacccaaagtctggaaaacggcgcggcccagcaaggaattgaagtctctttattaaatgagaaagggctgactctgactcaggcaaccagtgacgctcaggggcatgtgcagctggaaaatgataaaaacgcggcattactgttggcgcgtaaagacggtcagacaacgctactcgatttaaaacttccggcgctggacttagcagaatttaacattgctggcgcgccaggctatagcaaacagtttttcatgtttggcccacgcgatctttatcgcccaggtgaaacggtaatcctcaatggtttgctgcgtgatgcagacggtaaagcgttgcccaatcaacccatcaagttagacgtgattaaacccgatgggcaggtactcaggagcgtcgttagtcagccggagaatggcctctaccactttacctggccactcgatagcaatgcggcaaccggtatgtggcatattcgcgctaacacgggcgataaccagtatcggatgtgggatttccacgtcgaagattttatgccagagcgcatggcgctgaatctgaccggtgagaaaaccccgctaacgccgaaagatgaagtgaaattctccgtggtggggtactacctgtatggtgcacctgctaatggtaatactttgcaagggcaacttttcctgcgcccactgcgtgaagctgtgtcagccttacctggttttgaattcggcgatatagctgccgaaaatctttcccgcacgctggatgaagttcagttgacgctggatgataaagggcgcggcgaagtttctacagaaagccagtggaaggaaacgcattccccattacaggttattttccagggtagtttgctggaatcgggcggtcgcccggtgacgcgccgcgctgagcaggctatctggcctgccgatgcattgccggggatccgtccgcagttcgcctcgaaatcggtttacgattatcgcactgacagcacggtgaaacagcccattgttgatgaaggcagtaacgccggttttgacatcgtttatagcgatgcgcaaggcgtgaaaaaagccgtgtcgggcttgcaggtgcgcctgattcgcgaacgccgcgattactactggaactggtcagaagatgaaggctggcagtcacagtttgatcaaaaagatctgatcgaaaatgaacaaactctggatcttcaggcggatgaaaccggtaaggtcagtttcccggtagagtggggcgcttatcgtctggaagtcaaagcgccgaatgaagcggtcagtagcgtgcgtttctgggctggctatagctggcaggacaacagcgacgggagcggtgccgtgcgacccgaccgtgtcacgctgaaactggataaagccagttatcgccctggcgataccattaagttgcatattgccgcgccaacggcgggtaaaggttatgcgatggtcgagtccagtgaagggccgttgtggtggcaagagattgatgttccggctcaagggctggatctgacgattccggtcgataaaacctggaatcgtcatgatctgtatttaagtacgctggtagtacgtcctggcgataaatctcgctccgcgacgccaaaacgcgcagttggggtgttgcatctgccgcttggcgatgaaaaccgtcgcctcgatctggcgctggaaacaccagcaaaaatgcggccgaatcaaccattaaccgtgaaaattaaagccagcactaaaaatggcgagaagcctaaacaggtgaatgtgctggtgtctgccgttgatagtggtgtgctgaatattactgactacgtcacgccagatccgtggcaggcgttctttggtcagaaacgctatggcgcagacatttacgatatttacggtcaggttattgaaggtcaggggcgtctggcagctctgcgtttcggtggcgatggtgatgagctgaaacgtggtggtaaaccgccggtcaatcacgtcaatattgtcgcgcagcaggcgctgccggtaacgctcaacgaacagggcgaaggctcggttacactgccgattggcgattttaacggtgaattacgcgtcatggcgcaagcctggacggcagatgacttcggtagcaacgaaagcaaagtgatagttgccgcaccggtgattgctgaactgaacatgccgcgctttatggcgagtggcgatacctcgcgtctgacgctggatatcactaatcttaccgataaaccgcaaaaactgaacgttgccctgaccgccagtggtttgcttgaactggtcagcgattcacccgcagccgttgaattagcgccaggtgtgcgtactacgctgtttatcccggtgcgagcattgccaggttatggcgatggagaaattcaggccaccattagcgggttagcgttaccggatgaaaccgttgccgatcagcagaagcagtggaaaatcggcgtccgtccggcgttcccggcacaaacggttaattacggtacggcgttacagcctggtgagacatgggcgattccggcggatggattgcaaaacttctcgcctgttacgctggaagggcaattgttgttgagcggcaaaccaccgctgaacattgcacgttatatcaaagagttaaaagcgtatccgtacggctgtcttgagcaaaccgccagcggcctgttcccgtcactttataccaacgcagcccaactgcaggcgttgggcatcaaaggcgacagtgatgagaaacgccgtgcatcggtcgatatcggcatttcccgtttgctgcaaatgcaacgtgataacggcggctttgcgctgtgggataaaaacggtgacgaagagtactggctgacggcttacgtgatggatttcctggtccgcgcaggcgaacagggttacagcgtgccgacagacgccattaaccggggtaatgagcgtctgctgcgctatttacaagatccgggcatgatgtcgatcccgtacgcggataatctcaaagccagtaaattcgccgtacagtcttacgctgcgctggtgttggcccgtcaacaaaaggctccgctgggtgcgctgcgtgaaatctgggagcatcgtgcagatgccgcttctggtttaccgctgctgcaacttggcgttgcgctgaaaaccatgggtgatgcaacgcgtggtgaagaagcgattgtgctggcgctgaaaacgccgagaaatagtgatgagcggatatggctgggtgattacggtagtccactgcgcgacaacgcgttaatgctctccttgctggaagaaaataaactgctacccgatgagcagtacactttgctgaacacactttcgcagcaggcgtttggtgaacgctggctatcgacgcaggaaagtaacgcgttgttcctagctgcccgtacgattcaggatttaccgggtaaatggcaggcgcaaacctctttctcagctgagccgctgacaggcgagaaaacgctaaacagcaatctgaatagcgatcaacttgccaccttgcaggtgagaaacagtggcgatcagccgttatggttgcgtatggatgccagcggttatccgcaatccgcacctttaccggcgaacaatgtgctgcaaatcgagcgtcatattcttggtactgatggtaagagcaaatcgctggactcgttacgtagcggcgatctggtgctggtctggttgcaggtaaaagccagtaacagcgtgccggatgcgttagtcgtggatctgctgcctgcgggtctggaactggaaaatcagaatctggcgaacggtagcgccagcctggagcaaagtggtggcgaagtgcagaacttactgaaccagatgcagcaggcgagtattaagcacattgagttccgtgacgatcgctttgtggcggcggttgccgttgatgaataccaaccggtaacgctggtgtatctggcgcgggcggtgacgccgggaacgtatcaggtaccgcaaccgatggtggaatcaatgtatgttccccaatggcgggcgaccggcgcggctgaagatctgctgattgtccgaccgtaaatgcctcgcttgttaaccaaacgcggctgctggataacgctggcagctgcgccatttctcctttttcttgcagcgtggggagcagataaactctggcctctaccgctgcatgaagtcaatcccgcacgagtggtcgtggcgcaggatggtacgccgctatggcgcttcgccgatgctgacggcatctggcgttatccggtaacaatcgaagatgtttctccacgttaccttgaagcgctgatcaattatgaagatcactggttctggaagcatccgggggtgaatccattctcggtggcgcgcgcagcatggcaagatctcacttcgggacgggttatttccggtggcagcacgctcactatgcaggttgctcgtctgcttgatcctcaccccaaaacatttggcggcaaaattcgccagctctggcgcgcgttgcaactggaatggcatctgtctaagcgtgaaattctgaccttgtatcttaaccgcgctccgtttggcggtacgttgcaggggatcggtgcggcaagttgggcttatctcggaaagtcgcctgcgaatttaagctattccgaggcggcaatgctggcggttttgccgcaagcgcccagccgtcttcgcccggatcgttggccggagcgtgccgaagccgcgcgtaataaagtgctcgaacggatggccgtgcaaggtgtgtggtcccgtgagcaggtaaaagagtcaagggaagaacccatctggctggcaccccgacaaatgccgcaactggcaccgctgttttcgcgcatgatgctcggtaaaagcaaaagcgacaaaatcgttactacgctggatgccggtcttcaacgacgtctggaagaactggcgcaaaactggaaagggcggttgccaccgcgcagctcactggcgatgatcgtggttgatcataccgatatgcgtgttcgcggctgggtgggatcggttgatctcaacgatgattcacgctttggtcatgttgatatggtcaatgcgatccgatcgccaggatcggtgctcaaaccgtttgtttatggtctggcgctggatgaaggcttgatccacccggcatcactgctgcaagacgtcccccggcgcaccggtgattatcgaccaggtaactttgatagcggttttcatggcccgatcagcatgagcgaggcgctggtgcgctcgctgaacttacctgctgtgcaggtgctggaagcctatggaccgaaacggtttgcggcaaagttacgcaatgttggattgccgttatatttgcccaacggtgctgcgccgaatctttcactcattctcggcggcgctggtgcaaaactggaagatatggcggcagcgtataccgcgtttgctcgccacggcaaggcaggcaaattgcgcttacagcctgacgatccgctgcttgaacggcctttaatgtcgtcgggggcggcgtggatcattcgccggattatggctgatgaagcgaaacccttgccggatagtgccttgccgcgcgtcgccccactggcatggaaaacgggcaccagctatggctatcgtgacgcctgggcgattggggttaacgctcgctatgtcattgggatctggactggcagaccggacggcacgcccgttgttggtcagtttggctttgccagtgccgtaccattgttgaatcaggtcaataatatcttactgtcgcgcagtgcgaatctgccggaagacccgcgcccgaactcagtcactcgtggcgttatctgctggccgggcggacagtctttgccggaaggtgacggtaactgtcgccgccgcctggcaacctggctgctggacgggagtcagccgccaactctattactgccggagcaggaaggcattaatggcattcgtttccccatctggctggatgaaaatggcaaacgtgttgccgctgattgcccgcaagcgcgacaagaaatgataaatgtctggccgctaccgctggaaccctggctgcccgcatcagaacgtcgcgctgtgcgcttaccaccggcctcgacaatttgcccgccatacggtcacgatgccaagctccctctgcagctgacaggcgttcgcgatggcgcgattattaaacgtttaccgggcgcagcggaagcgactttgccgttgcaatcaagtggaggggcaggtgaacgctggtggtttctgaatggcgaaccgttaactgaacgcgggcgcaacgtgaccctgcatttgacggataaaggtgattatcaattgctggtgatggatgatgtggggcaaatcgcgacagtgaaatttgtcatgcaatagtctgttttgcccctgattgttgctaaaactcattttattttaaaaaaatgttaccttcatcaatagtcaacggccctgttgctcattataatccgcgccatctcgtacgctggtacagacaacaacagaacaatttacagaggtaaaaatggctattgaacgtactttttccatcatcaaaccgaacgcggtagcaaaaaacgtcattggtaatatctttgcgcgctttgaagctgcagggttcaaaattgtcggcaccaaaatgctgcacctgaccgttgaacaggcacgtggcttttatgctgaacacgatggaaaaccgttctttgatggtctggttgaattcatgacctctggcccgatcgtggtttccgtgctggaaggtgaaaacgccgttcagcgtcaccgcgatctgctgggcgcgaccaatccggcaaacgcactggctggtactctgcgcgctgattacgctgacagcctgaccgaaaacggtacccacggttctgattccgtcgaatctgccgctcgcgaaatcgcttatttctttggcgaaggcgaagtgtgcccgcgcacccgttaataatttcgtaaatgccgcgtgcaaacgtggcatccgtgcgccagaatttgtacaatgcagcgcccccggacgagcagccgctgacgggggagtagcttttttcgaccagccaggggccataacgggtaataacgaggccggaatagcatatgtctgaacaattagtcacacctgaaaacgtcaccacgaaagatggaaaaatcaacctgctggatctcaaccgtcagcagatgcgggagttttttaaagatttaggtgaaaaacccttccgcgccgatcaggtgatgaagtggatgtatcactattgctgcgacaactttgatgagatgaccgacatcaacaaagtgttgcgcggcaaactgaaagaggtggcggagatccgcgcaccggaagtggttgaagaacagcgttcatccgacggcaccattaaatgggcgatcgccgttggcgatcagcgcgtcgaaacggtgtatatcccggaagacgaccgtgccacgctctgcgtctcttcgcaggtggggtgtgcgctggagtgtaaattctgttccaccgcccagcagggctttaaccgcaacctgcgggtatcggaaattattggccaggtgtggcgtgcggcgaaaatcgtcggcgcagcaaaagtcaccggtcagcgcccaatcactaacgtagtgatgatgggcatgggcgagccgctgctcaacctgaacaacgtcgttccggcgatggaaatcatgcttgatgatttcggttttggcctgtctaaacgtcgcgtcacgctttctacttccggtgtagttccggcgctggataaactgggcgatatgatcgacgttgcactggcaatttccctgcacgcgccgaacgacgaaattcgtgacgaaattgtgccgatcaacaaaaagtacaatatcgaaacgttccttgctgcggtgcgccgttatctggagaaatccaacgccaatcagggccgtgtcactattgagtatgtgatgcttgaccacgttaacgacggcactgaacacgcgcaccaactggcggaactgctgaaagatacgccgtgtaagatcaacctgatcccgtggaaccccttcccgggcgcgccgtatggacgcagctcgaacagccgtatcgaccgtttctcaaaagtgctgatgagctacggtttcaccactattgtgcgtaaaacccgtggtgatgatatcgatgctgcctgtggtcagttggcgggcgatgttatcgaccgtacgaaacgtaccctgcgtaaacggatgcagggtgaagccatcgacattaaagcggtctgatagccattacgccacggttactttatgtaccgtggcgtaatcttttatgaatgaagtattaagttgcaattgtctggtcaatattaacggtgcgtttttgctgactttaaggcagtatgtaacgatgcaacagtaagttagccttagtgaatgtgggctttgtcacgagcacacagacggtcttatactgtatgataacggttaacttaacggatgtttcgcggtgtgggtgagcatgatggttcaccggcatctcaattctcatttaaacgtacctgcagcgaatgaatactgaagccacgcacgaccaaaatgaagcacttactaccggcgctcgcctgcgtaatgctcgcgaacaactaggacttagtcagcaggccgttgccgagcgactttgcctgaaggtttccacggtacgcgacattgaagaagataaggcacccgccgatcttgcttcaacattcctgcgcggatatatccgctcttatgcgcgtctggtacatattccagaagaagaactgctgccagggctggaaaagcaggctccactacgggctgcgaaagttgcgccgatgcagagtttttccctcggtaaacgccgcaaaaaacgtgacggctggctgatgaccttcacctggctggtgttgtttgtggttatcggcctgagcggtgcctggtggtggcaagaccacaaagctcagcaggaagagatcaccactatggccgatcaatcttcggcggaactgagcagtaatagcgagcaggggcagagtgttccgttaaatacgtcgacaactacagacccggctacaacgtccacgccgccagcgtctgtggatactaccgcaaccaacacgcaaacacctgccgtaactgcgccagcaccagctgttgatccgcaacagaatgcggttgtttcgccttcgcaggcaaatgttgataccgccgcgaccccggcaccaacggcagcaacaacgccagatggtgctgcgccgttgccaaccgatcaggctggcgtgaccacgccggtggctgatccgaatgcgctggtgatgaactttactgccgattgctggctggaggtcactgatgctaccggtaaaaaattgtttagcggtatgcagcgtaaagacggtaatttgaacttaaccggccaggcaccatacaaactgaaaattggtgcgccagccgcagtacagatccagtatcaagggaaacctgtcgatctgagtcgttttatcagaactaaccaggttgcgcgtctgaccctcaatgccgaacaatcaccggcgcagtaacagacgggtaacgcgggagatttttcatgcataaccaggctccaattcaacgtagaaaatcaacacgtatttacgttgggaatgtgccgattggcgatggtgctcccatcgccgtacagtccatgaccaatacgcgtacgacagacgtcgaagcaacggtcaatcaaatcaaggcgctggaacgcgttggcgctgatatcgtccgtgtctccgtaccgacgatggacgcggcagaagcgttcaaactcatcaaacagcaggttaacgtgccgctggtggctgacatccacttcgactatcgcattgcactgaaagtagcggaatacggcgtcgattgtctgcgtattaaccctggcaatatcggtaatgaagagcgtattcacatggtggttgactgtgcgcgcgataaaaacattccgatccgtattggcgttaacgccggatcgctggaaaaagatctgcaagaaaagtatggcgaaccgacgccgcaggcgttgctggaatccgccatgcgccatgttgatcatctcgatcgcctgaacttcgatcagttcaaagtcagcgtgaaagcgtctgacgtcttcctcgctgttgagtcttatcgtttgctggcaaaacagatcgatcagccgctgcatctggggatcaccgaagccggtggtgcacgcagcggggcagtaaaatccgccattggtttaggtctgctgctgtctgaaggcatcggcgacacgctgcgcgtatcactggcggccgatccggtcgaagagatcaaagtcggtttcgatattttgaaatcgctgcgtatccgttcgcgcgggatcaacttcatcgcctgcccgacctgttcgcgtcaggaatttgatgttatcggtacggttaacgcgctggagcaacgcctggaagatatcatcactccgatggacgtttcgattatcggctgcgtggtgaatggcccaggtgaggcgctggtttctacactcggcgtcaccggcggcaacaagaaaagcggcctctatgaagatggcgtgcgcaaagaccgtctggacaacaacgatatgattgaccagctggaagcacgcattcgtgcgaaagccagtcagctggacgaagcgcgtcgaattgacgttcagcaggttgaaaaataataacgtgatgggaagcgcctcgcttcccgtgtatgattgaacccgcatagctcccgaaacattgagggaagcgttgagggttcatttttatattcagaaagagaataaacgtggcaaaaaacattcaagccattcgcggcatgaacgattacctgcctggcgaaacggccatctggcagcgcattgaaggcacactgaaaaacgtgctcggcagctacggttacagtgaaatccgcttgccgattgtagagcagaccccgctattcaaacgtgcgattggtgaagtcaccgacgtggttgaaaaagagatgtacacctttgaggatcgcaatggcgacagcctgactctgcgccctgaagggacggcgggctgtgtacgcgccggcatcgagcatggtcttctgtacaatcaggaacagcgtctgtggtatatcgggccgatgttccgtcacgagcgtccgcagaaagggcgttatcgtcagttccatcagttgggctgcgaagttttcggtctgcaaggtccggatatcgacgctgaactgattatgctcaccgcccgctggtggcgcgcgctgggtatttccgaacacgtaactcttgagctgaattctatcggttcgctggaagcacgcgccaattaccgcgatgcgctggtggcattccttgagcagcataaagaaaagctggacgaagactgcaaacgccgcatgtacactaacccgctgcgcgtgctggattcaaaaaatccggaagtgcaggcgcttctcaacgacgctccggcattaggtgattatctggacgaggaatctcgtgagcattttgccggtctgtgcaaactgcttgagagcgcggggatcgcttacaccgtaaaccagcgtctggtgcgtggtctggattactataaccgtaccgttttcgagtgggtgactaacagtctcggctcccagggcaccgtgtgtgcaggcggtcgttatgacggtcttgtggaacaactgggcggtcgtgcaacaccggctgtcggttttgcgatgggcctcgaacgtcttgtattgttagtacaggccgttaatccggaatttaaagccgatcctgttgtcgatatatacctggtggcttcaggtgctgatacacaatctgcggctatggcattagctgagcgtctgcgtgatgaattaccgggcgtgaaattgatgaccaaccacggcggcggcaactttaagaaacagtttgcccgtgctgataaatggggtgcccgcgttgctgtggtgctgggtgagtctgaagtggctaacggcacagcagtagtgaaggatttgcgctctggtgagcaaacggcagttgcgcaggatagcgtagccgcgcatttgcgcacgttactgggttaaggaaggagaaggacagcgtggaaatttacgagaacgaaaacgaccaggtagaagcggttaaacgcttttttgctgaaaatggcaaagcactggctgttggggtgattttgggcgttggcgcactgattggctggcgctactggaacagccatcaggttgattctgcacgctccgcttctcttgcctatcaaaatgcggttaccgcagtgagcgaaggcaaaccggatagcatcccggcggcggaaaaatttgctgctgaaaataaaaatacttatggtgcgctggcttctttggaacttgcgcagcaatttgttgacaaaaatgaactagagaaagctgccgcccagttacaacaggggctggcagacacgagcgatgaaaatctcaaagccgtgataaatctgcgtcttgctcgcgttcaggtacagctcaagcaggctgatgccgcgctgaaaacccttgataccatcaaaggtgaagggtgggctgccattgttgccgacctgcgtggtgaagcattgctgagcaaaggtgataagcaaggtgcgcgtagtgcatgggaagcaggcgtgaaaagcgatgttactccggcactgagcgaaatgatgcagatgaaaattaataatttgtccatctgagagggacccgatgcaattgcgtaaattactgctgccaggactgctttccgttacccttttaagcggctgttcgctgtttaacagcgaagaagatgtggtaaagatgtccccattgccaaccgttgaaaaccagtttacgccgaccacggcgtggagtacttccgttggtagcggcattggcaacttctattccaatcttcatccggcactggcggacaacgttgtctatgcagcggaccgcgctggtttggtaaaagcgctgaatgcggatgatggcaaagaaatctggtctgtcagcctggccgagaaagatggctggttctctaaagagcctgcattactttctggcggtgtgaccgtgtctggtgggcatgtctacattggcagcgaaaaggcgcaggtttacgcgctgaataccagcgatggtactgtggcatggcaaactaaagtcgcgggtgaagcactttcgcgcccggtggtcagcgacggtctggtgttaatccacaccagtaacggtcagttacaagcgctgaacgaagctgacggcgctgtcaaatggacagttaacctcgatatgccttcgctctctttgcgtggcgagtctgcgccggcaacggcttttggtgcggccgtcgtggggggcgataatggtcgcgtcagcgcagtgctgatggaacagggccagatgatttggcagcagcgtatttcccaggcgaccggttctaccgaaattgaccgtctgagcgatgttgacacgactcccgtcgttgttaacggcgttgttttcgcgctggcctataatggtaacctgacggcgcttgatctgcgcagtggtcagattatgtggaaacgcgaactgggttcggtgaatgatttcatcgtcgacggcaatcgcatctatctggtcgatcaaaatgaccgggtgatggcgttgaccattgatggcggcgttacgctgtgggcacaaagcgatctgctgcatcgcctgctgacttctccggtgctgtataatggcaacctggtggtcggtgacagtgaaggttatctgcactggattaacgtcgaagatggtcgtttcgttgcccagcaaaaagttgatagttccggtttccagactgaaccggttgccgctgacggcaaactgctgatccaggcaaaagacggaaccgtgtactctattacacgttaatcgtctctgtcgttcactttgaaaacggctcctggacaggggccgttttcctgtttttaacaacgacgcgaatatagcgtgcgttgtctgatgatttataaaaatgaggctttaaacatggtacctgtggtcgcgcttgtcgggcgccctaacgtaggaaaatccacgttatttaaccgtctaactcgcacccgagatgcgctggttgcggatttcccgggtctgactcgtgaccgtaagtacggtcgtgcggaaattgaaggccgtgagtttatctgtattgataccggcgggattgatggcacagaagacggtgtagaaacccgcatggcggaacagtcgctgctggcgattgaagaagcggacgtcgtactgtttatggtggatgcgcgcgcgggcctgatgccggcagatgaagcgattgccaaacatctgcgctcccgtgaaaaaccgaccttcctggtggcaaacaaaactgacggtctggatcccgatcaggcagtggttgatttctactcgcttggtttaggtgaaatctacccgatcgccgcgtctcacggtcgtggcgtattaagtctgctggagcatgtgctgctgccgtggatggaagatctcgcaccgcaagaggaagtcgacgaagacgctgaatactgggcgcaatttgaagcggaagagaacggcgaagaagaagaggaagacgacttcgacccgcaaagtctgccgatcaaactggcgattgtgggtcgtccgaacgtaggtaagtctacactcactaaccgtattcttggtgaagagcgcgttgttgtttatgacatgcctggcacgacgcgtgacagtatctacattccaatggaacgcgatggacgtgagtatgtgctcattgacaccgctggcgtacgtaaacgcggcaaaatcaccgatgctgtagagaaattctccgtaatcaaaacgttgcaggccattgaagatgccaacgtggtgatgttagtgattgatgcgcgcgaaggtatttccgatcaggatctctcgctgctgggctttattctcaatagtgggcgctcacttgtcattgtggtgaataagtgggatggcctgagccaggaagtgaaagagcaggtgaaagaaacgctggacttccgtctgggctttatcgattttgctcgtgtgcactttatctctgccttgcacggcagtggtgttggtaacttgtttgaatcagtacgtgaagcgtatgacagctccacccgtcgtgtggggcactctatgctgacgcgcatcatgacgatggctgttgaagatcaccaaccgccgctggtacgcggtcgtcgtgtgaagctgaaatatgcccacgctggtggttataacccgccgattgtggtgattcacggtaatcaggtgaaagacctgcctgattcctacaagcgctacttgatgaactacttccgcaaatcgctggacgtaatgggatcgccgattcgtattcagttcaaagaaggggaaaacccgtatgcgaacaagcgtaacaccctgacgccaacccagatgcgtaaacgtaagcgtctgatgaagcacatcaagaaaaataaataattatccgtaagtattttatctgccattccctctatgaatgtagagggatggctaccggaggaattcatatggaactgcattgtccacaatgtcagcatgtgcttgatcaggataacggccatgcgcgttgcccatcctgcggggaaattattgaaatgaaagctctttgtccagactgccatcaaccgttgcaggtgttaaaagcctgcggtgcagtagattacttctgtcagcacgggcatggcttgatatcgaaaaaacgcgttgaattcgtgctggcttaatgcacctttttacgcgatttttttactggctggatgtttttaacttcactttctatccagccgtcttccagacgtgtggttagcatttcacccgctttaacttgcttcacttttttcagtacattgccgtcagtagcagtagtaacgctgtatccacgcgccagcgttgacagtgggcttacggcttcgaggtgcgttactgcattaccgaaacgttcacgcgtggcgctaagctgtacgcgcagggtttctgctaaacgatattccagttgctgaatgcgcgtttgcgcgcgatgaatcttcggctgtggattttgctgattcagccgctgtgttaaccgctgctgctgttgcccggtacgcttaagttgattttccagcgcaaagctcatccgcttttgcaggcgctcaagcatggtttgctggcgtgccagccggagctgcggatgctgttgctgtaatcggtgatggatctgcgtaaagcgacgcgtgcggttggcgagataataatccatcgccatctccagccgttgacgggtcgattgcacctggcgcagtaactcttgctgattacggctcactacttcagcggcggcagacggcgttggcgcacgcagatcggcaacaaaatcggcaatggtcacatccgtctcatgcccgacggcgctgacgaccggaatgcggctggcaaaaatcgcccgcgctacgcgttcgtcgttaaaactccataaatcttccagcgaaccgccgccgcgcccaacgatcaacacgtcgcactcattgcgctgattcgccagttcaatggcgcgaacaatttgccccggtgcgtcatcgccctgaacggcggtggggtagatgatcaccggtagagaaggatcgcgacgttttaacacatgcaaaatatcatgtagcgcagcaccggtttttgaggtgatcacaccaacgcaatgcgcaggggagggaagtggttttttgtattgctgatcgaacaaaccttcagcctgcaacttcgctttgagctgttcgtacttctgttgcagcagcccttcaccggccggctgcatactctcaacgattatctggtagtcaccgcgcggctcgtagagcgtaatattggcgcgaactaaaacttgttgtccatgctgtggacggaaggtcacccggcggttgctgttgcggaacatcgcgcagcgtacctgggcggtgtcgtctttgagtgtaaagtaccagtgaccggaagccggttgtgtgaaattagagatttcgccgctgatccaaacctgtcccatctcatgctcannnnnnnnnncgaaccgtttgattcaggcgactaacggtaaaaattgcaggggattgagaaggtaacatgtgagcgagatcaaattctaaatcagcaggttattcagtcgatagtaacccgcccttcggggatagcaagcattttttgcaaaaaggggtagatgcaatcggttacgctctgtataatgccgcggcaatatttattaaccactctggtcgagatattgcccatgctacgtatcgctaaagaagctctgacgtttgacgacgttctcctcgttcctgctcattctaccgttctgccgaatactgctgacctcagcacccagctgacgaaaactattcgtctgaatatccctatgctttccgcagcaatggataccgtaacggaagcgcgcctggctattgctctggctcaggaaggcggtatcggctttatccacaaaaacatgtccattgaacgccaggcagaagaagttcgccgtgtgaaaaaacacgaatctggtgtggtgactgatccgcagactgttctgccaaccacgacgctgcgcgaagtgaaagaactgactgagcgtaacggttttgcgggctatccggtcgttaccgaagaaaacgaactggtgggtattatcaccggtcgtgacgtgcgttttgttaccgacctgaaccagccggttagcgtttacatgacgccgaaagagcgtctggtcaccgtgcgtgaaggtgaagcccgtgaagtggtgctggcaaaaatgcacgaaaaacgcgttgaaaaagcgctggtggttgatgacgaattccacctgatcggcatgatcaccgtgaaagacttccagaaagcggaacgtaaaccgaacgcctgtaaagacgagcaaggccgtctgcgtgttggtgctgcagttggcgcaggtgcgggtaacgaagagcgtgttgacgcgctggttgccgctggcgttgacgttctgctgatcgactcctcccacggtcactcagaaggcgttttgcagcgtatccgtgaaacccgtgctaaatatccggatctgcaaatcatcggcggcaacgtggcaacagctgcaggtgcacgcgctttggcagaagctggttgcagcgcggttaaagtcggtatcggccctggttctatctgtacgactcgtatcgttactggcgtaggtgttccgcagatcactgccgttgctgacgcagttgaagccctggaaggcaccggtattccggttatcgcagatggtggtattcgcttctccggcgacatcgccaaagctatcgccgctggcgcaagcgcggtgatggtaggttccatgctggcgggtactgaagaatctccgggtgaaatcgaactctaccagggccgttcttacaaatcttaccgtggtatgggttccctgggcgcgatgtccaaaggttcctctgaccgttatttccagagcgannnnnnnnnngccgacaaactggtgccggaaggtatcgaaggtcgcgtagcttataaaggtcgcctgaaagagatcattcaccagcagatgggcggcctgcgctcctgtatgggtctgaccggctgtggtactatcgacgaactgcgtactaaagcggagtttgtacgtatcagcggtgcgggcattcaggaaagccacgttcacgacgtgaccattactaaagagtccccgaactaccgtctgggctcctgattctcttcgcccgacttcatgtcgggcgatttatattatctgtttcacttgcctcggaataagcgtcaatgacggaaaacattcataagcatcgcatcctcattctggacttcggttctcagtacactcaactggttgcgcgccgcgtgcgtgagctgggtgtttactgcgaactgtgggcgtgggatgtgacagaagcacaaattcgtgacttcaatccaagcggcattattctttccggcggcccggaaagcaccaccgaagaaaacagcccgcgtgcgccgcagtatgtctttgaagcaggcgtaccggtattcggcgtttgctatggcatgcagaccatggcaatgcagttgggcggtcacgttgaagcctctaacgaacgtgaatttggctacgcgcaggttgaagtcgtaaacgacagcgcactggttcgcggtatcgaagatgcgctgaccgcagacggtaaaccgctgctcgatgtctggatgagccacggcgataaagttaccgctatcccgtccgacttcgtcaccgtagccagcaccgaaagctgcccgtttgccattatggctaacgaagaaaaacgcttctatggcgtacagttccacccggaagtgactcacacccgccagggtatgcgcatgctggagcgttttgtgcgtgatatctgccagtgtgaagccctgtggacgccagcgaaaattatcgacgatgctgtagctcgcatccgcgagcaggtaggcgacgataaagtcatcctcggcctctctggtggtgtggattcctccgtaaccgcaatgctgctgcaccgcgctatcggtaaaaacctgacttgcgtattcgtcgacaacggcctgctgcgtctcaacgaagcagagcaggttctggatatgtttggcgatcactttggtcttaacattgttcacgtaccggcagaagatcgcttcctgtcagcgctggctggcgaaaacgatccggaagcaaaacgtaaaatcatcgggcgcgttttcgttgaagtattcgatgaagaagcgctgaaactggaagacgtgaagtggctggcgcagggcaccatctaccctgacgttatcgaatctgcggcttctgcaaccggtaaagcacacgtcatcaaatctcaccacaacgtgggcggcctgccgaaagagatgaagatgggcctggttgaaccgctgaaagagctgttcaaagacgaagtgcgtaagattggtctggagctgggcctgccgtacgacatgctgtaccgtcacccgttcccgggaccaggccttggcgttcgtgtgctgggtgaagtgaagaaagagtactgtgacctgctgcgccgtgctgacgccatcttcattgaagaactgcgtaaagcggacctgtacgacaaagtcagccaggcgttcactgtgttcctgccggtacgttccgttggcgtaatgggcgatggtcgtaagtatgactgggttgtctctctgcgtgctgtcgaaaccatcgactttatgaccgcacactgggcgcatctgccgtacgatttcctcggtcgcgtttccaaccgcattatcaatgaagtgaacggtatttcccgcgtggtgtatgacatcagcggcaagccgccagctaccattgagtgggaatgattttgatccctgcactatgaatgaacaaaaccctctgttactacagagggttttttatcttcaagaatcataggcttgaagttactaacatcgattaattaaaccagctgtccgatttgttctcttctgctttgcccacgcttttcatcagatcgcgaccgccttcagtcatatttctgttggcgtcagcttcagattgcaccacatcggtttgcgcagctttgtgcttcagttcctgatcgataaattcgttttctcgcttaacgcgggcttcttctttcgccagcgccagtttttgtttctgaatctctaagctgcgtagctcatcttcataactttgatcgcgttttttgtccgcagaggcttcggcgtccagtttatcctgacgagctttcttatttgctgctgccgttgccgctcttttgttagcggcggcctgggcatttgcgcgacgttgcttctcttgctggatttccctgttgcgctccgcgacccattcgtcatgctgcttttgctcttcatttttaccttgctgttccgcttctgcgacagccgagagttgatcctgcaatgatgaggcgatagccggatagcttaaggaggccaagatggcgcaaagaaaaactttcttcatgactcctcctgattattagctcttttcaggacatttggtatttggctgaatacgcgtttcgttatacgtcgtggtaataacaacggctaaacctgtcgtaaactggcactctttacccacctgggtggaggtatacactttggtgccttccttatacgttaaagaaacaccttccactaaggttttatcattcaccatagaacccgctgccgcgcctacagctccgccgccaactgcccctgccgtcgttccggaattgctgccagaaccgacgttgtggccgataacaccgccagcgactgcgccaataagcgcgccgaaggcttgtgcgttccgtttattttgggagttgtctacggcaacttttgcgggaagaatggaaataatattaacggttttagtttcttgtttggtattcagttgatcggtttgataaacatcggcggcatgatcgtcagcatttgactggcatcctgccagagtgaatgacgctaacattgccacaggcagaagacattttttaaatttcatcactattccttgttatacacattacgaaaaataagacatttaagatcatcaaaagaggaaagtaaatgtattgcgtataaagggatagattaaatttattaaaattcacgc

SEQ ID NO: 172 - DNA, 53236 bp, Escherichia coli
  source 1..53236: mol_type = genomic DNA
caataatattcaccaaatcaatatcaaaaaaaatcgcaaaacatataattcaatacaaatcatcaggataggttttgcaacgcgtgcattttgtcccctttttcctcgttgattagatgcaaaaatttatgctgaaatatgtcaaccgatgaaaagcgtcggtagttaagcagaaattaatatcgcttactttaaccaccgcagcacaattagctaattttacgggtgcagaactcacgctggcgggacgtttttattgcgtcagggttgacatccgtttttgtatccagtaactctaaaagcatatcgcattcatctggagctgatttaatgactcacatcgttcgctttatcggtctactactactaaacgcatcttctttgcgcggtagacgagtgagcggcatccagcattaagccagcacgcagtcaaacaaaaaacccgcgccattgcgcgggtttttttatgcccgaagcgaggcgctctaaaagagacaaggacccaaaccatgagccagcaagtcattattttcgataccacattgcgcgacggtgaacaggcgttacaggcaagcttgagtgtgaaagaaaaactgcaaattgcgctggcccttgagcgtatgggtgttgacgtgatggaagtcggtttccccgtctcttcgccgggcgattttgaatcggtgcaaaccatcgcccgccaggttaaaaacagccgcgtatgtgcgttagctcgctgcgtggaaaaagatatcgacgtggcggccgaatccctgaaagtcgccgaagccttccgtattcatacctttattgctacctccccaatgcacatcgccaccaagctgcgcagcaccctggacgaggtgatcgaacgcgctatctatatggtgaaacgcgcccgtaattacaccgatgatgttgaattttcttgcgaagatgccgggcgtacacccattgccgatctggcgcgagtggtcgaagcggcgattaatgccggtgccaccaccatcaacattccggacaccgtgggctacaccatgccgtttgagttcgccggaatcatcagcggcctgtatgaacgcgtacctaacatcgacaaagccattatttccgtacatacccacgacgatttaggcctggcggtcggcaactcactggcggcggtacatgccggtgcacgccaggtggaaggtgcaatgaacgggatcggcgagcgtgccggtaactgttcgctggaagaagtcatcatggcgattaaagttcgtaaggatattctcaacgtccacaccgccattaatcaccaggagatatggcgcaccagccagttagttagccagatttgtaatatgccgatcccggcaaacaaagccattgttggcagcggcgcattcgctcactcctccggtatccaccaggatggcgtgctgaaaaaccgcgaaaactacgaaatcatgacaccagaatctattggtctgaaccaaatccagctgaatctgacctctcgttcggggcgtgcggcggtgaaacatcgcatggatgagatggggtataaagaaagtgaatataatttagacaatttgtacgatgctttcctgaagctggcggacaaaaaaggtcaggtgtttgattacgatctggaggcgctggccttcatcggtaagcagcaagaagagccggagcatttccgtctggattacttcagcgtgcagtctggctctaacgatatcgccaccgccgccgtcaaactggcctgtggcgaagaagtcaaagcagaagccgccaacggtaacggtccggtcgatgccgtctatcaggcaattaaccgcatcactgactataacgtcgaactggtgaaatacagcctgaccgccaaaggtcacggtaaagatgcgctgggtcaggtggatattgtcgccaactacaacggtcgccgcttccacggcgtcggcctggccaccgatattgtcgagtcctccgccaaagccatggtgcacgtactgaacaatatctggcgtgccgcagaagtcgaaaaagagttgcaacgcaaagctcaacacaacgaaaacaacaaggaaaccgtgtgatgtcgaagaattaccatattgccgtattgccgggggacggtattggtccggaagtgatgacccaggcgctgaaagtgctggatgccgtgcgcaaccgctttgcgatgcgcatcaccaccagccattacgatgtaggcggcgcagccattgataaccacgggcaaccactgccgcctgcgacggttgaaggttgtgagcaagccgatgccgtgctgtttggctcggtaggcggtccgaaatgggaacatttaccaccagaccagcaaccagaacgcggcgcgctgttgcctttgcgtaagcacttcaaattattcagcaacctgcgcccggcaaaactgtatcaggggctggaagcattctgtccgctgcgtgcagacattgccgctaacggcttcgacatcctgtgcgtgcgcgaactgaccggcggcatctatttcggtcagccaaaaggccgcgaaggtagcggacaatatgaaaaagcgtttgataccgaggtgtatcaccgttttgagatcgagcgtattgcccgcatcgcgtttgaatctgctcgtaaacgtcgccacaaagtcacctcaatcgacaaagctaacgtgctgcaatcctctattttatggcgtgaaatcgtcaacgagatcgccacggaatacccggatgtcgaactggcgcatatgtacatcgacaacgccaccatgcagctgattaaagatccatcacagtttgacgttctgctgtgctccaacctgtttggcgacattctgtctgacgagtgcgcaatgatcactggctcgatggggatgttgccttccgccagcctgaacgagcaaggttttggtctgtatgaaccggcaggcggctcagcaccagatatcgcaggcaaaaacatcgccaacccgattgcgcaaattctatcgctggcactgctgctgcgctacagcctggatgccgatgatgcggcttgcgccattgaacgcgccattaaccgcgcattagaagaaggcattcgcaccggggatttagcccgtggcgctgccgccgttagtaccgatgaaatgggcgatatcattgcccgctatgtggcagaaggggtgtaatcatggctaaaacgttatacgaaaaattattcgacgctcacgtagtgtacgaagccgaaaacgaaaccccgctgttatatatcgaccgccacctggtgcatgaagtgacctcaccgcaggcgttcgatggtctgcgcgcccacggtcgcccggtacgtcagccgggcaaaaccttcgccactatggatcacaacgtctctacccagacgaaagacattaatgcctgtggtgaaatggcgcgcatccagatgcaggagctgattaaaaactgcaaagaatttggcgtcgaactgtatgacctgaatcacccgtatcaggggatcgtccacgtaatggggccggaacagggcgtcaccttgccggggatgaccattgtctgcggcgactcgcataccgccacccacggcgcgtttggcgcactggcctttggtatcggcacttccgaagttgaacacgtactggcaacgcaaaccctgaaacagggccgcgcaaaaaccatgaaaattgaagtccagggcaaagccgcgccgggcattaccgcaaaagatatcgtgctggcaattatcggtaaaaccggtagcgcaggcggcaccgggcatgtggtggagttttgcggcgaagcaatccgtgatttaagcatggaaggtcgtatgaccctgtgcaatatggcaatcgaaatgggcgcaaaagccggtctggttgcaccggacgaaaccacctttaactatgtcaaaggccgtttgcatgcgccgaaaggcaaagatttcgacgacgccgttgcctactggaaaaccctgcaaaccgacgaaggcgcaactttcgataccgttgtcactctgcaannnnnnnnnnaagaaatttcaccgcaggtcacctggggcaccaatccaggccaggtgatttccgtgaacgacaatattcccgatccggcttcgtttgccgatccggttgaacgcgcgtcggcagaaaaagcgctgacctatatggggctgaaaccgggcattccgctgaccgaagtggctatcgacaaagtgtttatcggttcctgtaccaactcgcgcattgaagatttacgcgcggcagcggagatcgccaaagggcgaaaagtcgcgccaggcgtgcaggcactggtggttcccggctctggcccggtaaaagcccaggcggaagcggaaggtctggataaaatctttattgaagccggttttgaatggcgcttgcctggctgctcaatgtgtctggcgatgaacaacgaccgtctgaatccgggcgaacgttgtgcatccaccagcaaccgtaactttgaaggccgccaggggcgcggcgggcgcacgcatctggtcagcccggcaatggctgccgctgctgctgtgaccggacatttcgccgacattcgcaacattaaataaggagcacaccatggcagagaaatttatcaaacacacaggcctggtggttccgctggatgccgccaatgtcgataccgatgcaatcatcccgaaacagtttttgcagaaagtgacccgtacgggttttggcgcgcatctgtttaacgactggcgttttctcgatgaaaaaggccaacagccaaacccggacttcgtgctgaacttcccgcagtatcagggcgcttccattttgctggcacgagaaaacttcggctgtggctcctcgcgtgagcacgcaccgtgggcattgaccgactacggttttaaagtggtgattgcgccgagttttgctgacatcttctacggcaatagctttaacaaccagctgctgccggtgaaattaagcgatgcagaagtggacgaactgtttgcgctggtgaaagccaatccggggatccatttcgacgtggatctggaagcgcaagaggtgaaagcgggagagaaaacctatcgctttaccatcgatgccttccgccgccactgcatgatgaacggtctggacagtattgggcttaccttgcagcacgacgacgccattgccgcttatgaagcaaaacaacctgcgtttatgaattaatccccttgcccggtcaaatgaccgggctttccgctatcgtccacgtcatcaaacgtctttaacctttgcggttaaaaataatgcgacaacagaaataaccgcaattacccagtagacagcaaagtgcccccaactttgtgcaattgctccctgaataacgccagccagaattaccccggtagaaatactgttagtaaataaggtggtagctgcccccgctcttccaggcattaaatcctgaaaccatagcatcccaatacccgcaacaatgccgataaatacagcgttaaaaagttgcagcgtcatcaacgccatacggctatgaaagaaaatcaatccggtgtaaaacagtactcctgccgccactgctatgaccatcattcgccgcttaccataacgtttgacatagtagccagccagaatcattgctggtatttccagtccagctgccgtccccatcaggaaacccgccagtttgtctggcaatcctaactcgctactgatccacaacggcatatcaataatgtacatggtgttgcaggtccacattaacgtcgaggcgacaaataacatccgtacgttactatcctgccagccaccttgcattgataaagcattttccgacggcagttctacccgcgccacagacggaagcataaatgcaatcaataccagactgagtgtgaatatcccggcggcaatcgaaaacatcaccgtaaagccgtaattcaacgccagcataaaggccaacggtggaccgataacccatgccagagaaagctgcgcacgcatcaccgagctaaacatcaccacttctcgcgccgagttatccgcatattcccgcgccagagcaaataactgtggcattgccgtattggccagagatgccagaagcacaccacaggtgataagcgtcagataatgacgattaaatgcaaacaatagcgcattgccgatagccatcaaacagcaaaatataatcagttttcgccgatcgccctgactgtcagaacgttttgccaaccagaggcttacgccgatcccagcaatagcattcaccgtataaaagagtccgatccagaaaggttgcgcgccaacctcacgactcagaaataagctcaatgtaggagcctgtagcgccccggccacccccatcataaaagcgaccagcataaatgccgcgtaaacaccgttcatacggcgagccatcgtcattatccagatcatacgttccctttttagcgcggcgagaataaaaaaaaccagcaggtataatctgctggcgggtgattttacaccaatactcagtcacacatgatgcaggcaagtcaactttcagaattgcggtcatcccactgcatcagtccttcaagcatggttaatcgttgtgggacgcttaaccaacgcaaccagcacaacttcgctgtcgcggtaaaatagtgctgataaaactgacgcatggggcacctccttgcttcatcgttaggaattattgacttaatatagggaaaataaaattgctgtcttttgcgcaggagttccccttttatgccatctgctcgtctgcaacaacagttcatccgcctgtggcaatgctgcgagggtaaatcgcaggacacaacgctcaacgaactggcagcgttattgagctgctcgcgtcgtcatatgcgtaccctgctcaacaccatgcaggatcgcggctggctgacgtgggaagcggaagtcgggcgcggtaaacgctcgcgtctgacattcctctataccgggctggcgcttcagcaacagcgggcggaagacctgctggagcaggatcgtatcgaccaactagtgcagttggttggcgacaaagcgactgtgcggcaaatgctggtttctcatctgggccgcagcttccgccaggggcggcacatcctgcgcgtgctctactatcgtccgttgcgtaatctgctacctggcagcgcattgcgccgttccgaaacccatattgcccggcaaatcttcagttcgctaacgcgcataaatgaggaaaatggggaactggaagcagacatcgcccaccactggcagcaaatatcaccgcttcactggcgtttctttttgcgtccaggagtccattttcatcatggtcgtgaactggaaatggacgacgtgatcgcctctttaaaacgaatcaatacgctgccgctctattcgcatattgcggacattgtgtcgccgacgccctggacgctggatatccatctcacgcaaccggaccgctggttaccgttactgctgggacaagttccggcgatgatcctgccgcgcgaatgggaaaccctcagtaactttgccagccatcccatcggcaccggtccgtatgcggtgatccgcaacaccaccaatcaactgaaaattcaggcattcgatgacttcttcggttaccgggcattaatcgatgaagttaacgtctgggttctgccggaaattgccgacgagccagctggaggtctgatgctaaaaggtccacagggcgaggaaaaagagattgaaagccgcctggaggaaggttgctactatttactgttcgacagccgcacccatcgcggggcgaatcagcaagtcagggactgggtaagctatgtgctttctccaactaatctggtctatttcgctgaggaacagtaccagcaactgtggttcccggcttatggactgctcccccgttggcaccatgcccgcaccataaagagcgaaaaaccggctggcctggaaagcctcaccctgaccttttatcaggatcacagtgagcatcgggtgattgccgggatcatgcagcagattctggcaagtcaccaggtcacgctggaaatcaaagagatcagctacgatcagtggcatgaaggagagatcgagagcgatatctggcttaatagcgccaactttacgctgccgctggatttttcgctgttcgcgcacttgtgcgaggtgccgctgctccaacactgtattccgatcgactggcaagccgacgccgcccgctggcgcaatggcgaaatgaacctggcgaactggtgccagcaactggtcgccagtaaagcaatggtgccgcttatccaccactggctgatcattcagggacaacgcagtatgcgcggcctgcgtatgaataccctcggctggttcgattttaaatcagcgtggtttgcgccgccggatccatgattgctggtagataacaaaatcactacactaacgccgttctcaacggggtgccacgcaaacgcgtgcgctgagaaaatacccgtcgaacctgatccggataacgccggcgaagggatttgaggctccttctcaagtcctttgccactcttttttgaggtgcaaagtgttaaaaaaatgtcttcccctgctgttgctgtgcacagcgcccgttttcgctaaacccgttctgactgtttatacctacgattccttcgccgccgactgggggcctggtccaaagatcaaaaaagcttttgaagccgactgtaactgcgaactgaaactggtggcgctggaagatggcgtttcgcttctcaaccgtctacggatggaaggcaaaaatagtaaagccgatgtggtgctggggctggataacaatctgttagacgccgccagtaaaaccggactatttgccaaaagcggtgtggcagcggatgccgttaacgttcccggcggctggaataatgacactttcgtcccgtttgattacggctatttcgccttcgtctatgacaagaacaaactgaaaaacccgccgcaaagcctgaaagaattggttgagagcgatcaaaactggcgggtgatttatcaggatccgcgcaccagtacgccggggctgggcctgctgttgtggatgcaaaaagtctatggcgatgacgccccacaagcctggcaaaaactggcgaagaaaaccgtcacggtcaccaaaggctggagcgaagcctacggcctgtttttaaaaggtgaaagcgatctggtactgagttacaccacctctccggcttatcacattctcgaagagaaaaaagataactacgccgccgcgaactttagcgaaggtcactatctgcaggtggaagtcgccgcccgcaccgctgccagcaagcagccggagctggcgcaaaaattcctccagtttatggtttctccggcttttcagaatgcgatcccaaccggtaactggatgtatccggtggcaaatgtcacgctgcctgccgggtttgaacaattgaccaaaccggccaccacgctggcgttcacaccagctgaagtggcggcacaacgtcaggcatggattagcgaatggcaacgcgccgtcagccgttaattcccggctggttaattccaggtgtaagcgccgccacgctggtggtagcggttgcgctcgcggcgtttctcgccctgtggtggaacgcgccgcagggtaactgggtggcagtctggcaggacagctacctgtggcatgtggtgcgcttctccttctggcaggcgtttctctcggcgctactctctgtcgtacccgcgatattcctcgcccgcgccctctatcgcaggcgctttccgggtcggctggcgctgttgcgtctgtgcgcaatgaccttgatcctcccggtgctagttgctgttttcggcattcttagcgtctatggtcgtcagggctggctggcatcgctctgccaatcgctcggtctggagtggaccttttcgccctacggcctgcaaggtattttgctggcgcacgtattttttaatctgccgatggcgagccgcttattactccaggcactggaaaacattcccggcgaacaacgtcagcttgccgcccagcttgggatgcgcggctggcattttttccgcttcgtcgaatggccgtggttacggcgacaaatcccgccggttgctgcacttatctttatgctctgtttcgccagcttcgccaccgtgctatcactgggcggcggtccgcaggcgaccactatcgagctggctatttatcaggcgctgagttacgactacgatcctgcccgcgcggcgatgctggcgctgatccagatggtgtgttgccttgggctggtactgttgagtcagcgattgagtaaggccattgcgccaggcaccacgctgctgcaaggctggcgcgacccggacgatcgtctgcatagccgcatttgcgacacggtgttaattgtgctggcgctgctgctgttgctgccaccgttactggcggtgatcgtcgatggcgtaaatcgccagttgccggaagtgctggcacaaccggtgctgtggcaggcgctgtggacctcgttgcgtattgcgctggcggcaggtgtattgtgcgtagtgctgaccatgatgctgctatggagcagtcgcgaacttcgggcgcggcagaaaatgctggcgggtcaggcgctggagatgagcggcatgttgatcctcgccatgccggggattgtgctggctaccggcttctttttactgctcaacaacaccattggcctgccgcaatctgctgacggcattgtgattttcaccaatgcgttaatggcgatcccttatgcgctgaaagtactggaaaacccgatgcgcgatatcaccgcccgctacagtatgttgtgtcagtcgctgggcattgaaggctggtcgcgcttaaaagtggtcgagctgcgcgccctgaaacgtccactggcgcaggcgctggcttttgcctgcgtgctgtcgattggtgattttggcgtagtggcgttgttcggtaacgatgatttccgtaccctgccgttttatctctaccagcaaattggctcctatcgcagccaggacggtgcggtcaccgcgttaattctgctactactctgttttctgctgtttaccgtgattgaaaaactaccggggcgaaatgttaaaactgactgatatcacctggctttatcaccatttgccgatgcgttttagcttaacggtagaacgcggcgagcaggtggcaatcctcgggccaagcggcgcgggtaaaagtaccctgctgaatttgatcgccggttttctgacgccagccagcggttcgctgactatcgacggcgttgatcacaccacgacgccgccgtcacgccgtccggtatcgatgctgtttcaggagaacaacctgttcagccacctgacggtcgcgcagaacatcgggctggggcttaatccgggattgaagctgaacgcggcgcagcaggagaaaatgcacgctatcgcccgccagatggggattgataatttaatggcgcggttaccgggcgagctttccggcggtcagcgacagcgcgtggcgttagcgcgttgtctggtgcgcgaacagccgattttattgctcgatgaaccgttctctgcgctcgatccggcgttacgtcaggagatgctgacgctggtgagcacgagctgccagcagcaaaaaatgacgctattgatggtgtcgcacagtgtggaagatgcggcgcggatcgccacacgctcggtggtggtcgccgacgggcgcatcgcctggcagggtaagaccaatgagttgttgagcggtaaggcgagtgcttcggcactattggggattacgggttagtatgcactgtcggatgcggcgtgaacgccttatccgacctacgggtagtgcgttttgtaggcctgataagacgcggtcagcgtcgcatcaggcaacccgcacaagactatctcctaacccccaaccactttacgcaaaatatcgatatacaccggcatcaacgggtggcgaattaacaccaccagcgccaccacgccgatggcagaaattaacggcgtcagccacaacaaacggccgcgcgacaaataatgactcaaacggtcagtcgctttaccactgcgccataaccgccagcacagccagccaccaacccacaaaaacaccgctgttgccagcagcaaccatttaaactcaccgctctgcattccggctggaatatcgatcgccgcgcccgccagaatccctggcaggaagtaaaacggtggccacagcaggcagccgataatattcggcgtaatgaattttgccaccggcagatccagcattcccgccaccattggcaccagcggacgcgtcgggccaacaaaacgaccgaccagaatggtgaacatgctgtgttgatgcaacgcatgttcagttttatcgagtaatgctttgtttttcttcagaaatgaccagcgatgcaacggctttttaaaacgccagcccagccagaaggagatccagtcgcccagcaggcaaccgacgatccctgccagccaggcgtgccagaaacttaactcgccgctgccaatcagcgctcccagccccgccatcagcaccgtaccgggtagaatcaaaccgaccagcgccagcgactccagaaaggccaccaacaccaccgccatcaatgaatacacggtagattgggtaataaagtgttccagcaatgcttgcataatgtgcctgtcaaatggacgaagcagggattctgcaaaccctatgctactccgtcaagccgtcaattgtctgattcgttaccaattatgacaacttgacggctacatcattcactttttcttcacaaccggcacggaactcgctcgggctggccccggtgcattttttaaatactcgcgagaaatagagttgatcgtcaaaaccaacattgcgaccgacggtggcgataggcatccgggtggtgctcaaaagcagcttcgcctggctgatacgttggtcctcgcgccagcttaagacgctaatccctaactgctggcggaaaagatgtgacagacgcgacggtgacaagcaaacatgctgtgcgacgctggcgatatcaaaattgctgtctgccaggtgatcgctgatgtactgacaagcctcgcgtacccgattatccatcggtggatggagcgactcgttaatcgcttccatgcgccgcagtaacaattgctcaagcagatttatcgccagcagctccgaatagcgcccttccccttgcccggcgttaatgatttgcccaaacaggtcgctgaaatgcggctggtgcgcttcatccgggcgaaagaaacccgtattggcaaatattgacggccagttaagccattcatgccagtaggcgcgcggacgaaagtaaacccactggtgataccattcgcgagcctccggatgacgaccgtagtgatgaatctctcctggcgggaacagcaaaatatcacccggtcggcaaacaaattctcgtccctgatttttcaccaccccctgaccgcgaatggtgagattgagaatataacctttcattcccagcggtcggtcgataaaaaaatcgagataaccgttggcctcaatcggcgttaaacccgccaccagatgggcattaaacgagtatcccggcagcaggggatcattttgcgcttcagccatacttttcatactcccgccattcagagaagaaaccaattgtccatattgcatcagacattgccgtcactgcgtcttttactggctcttctcgctaacccaaccggtaaccccgcttattaaaagcattctgtaacaaagcgggaccaaagccatgacaaaaacgcgtaacaaaagtgtctataatcacggcagaaaagtccacattgattatttgcacggcgtcacactttgctatgccatagcatttttatccataagattagcggatcctacctgacgctttttatcgcaactctctactgtttctccatacccgtttttttggatggagtgaaacgatggcgattgcaattggcctcgattttggcagtgattctgtgcgagctttggcggtggactgcgccagcggtgaagagatcgccaccagcgtagagtggtatccccgttggcaaaaagggcaattttgtgatgccccgaataaccagttccgtcatcatccgcgtgactacattgagtcaatggaagcggcactgaaaaccgtgcttgcagagcttagcgtcgaacagcgcgcagctgtggtcgggattggcgttgacacaaccggctcgacgcccgcaccgattgatgccgacggtaacgtgctggcgctgcgcccggagtttgccgaaaacccgaacgcgatgttcgtattgtggaaagaccacactgcggttgaagaagcggaagagattacccgtttgtgccacgcgccgggcaacgttgactactcccgctatattggcggtatttattccagcgaatggttctgggcaaaaatcctgcatgtgactcgccaggacagcgccgtggcgcaatctgccgcatcgtggattgagctgtgcgactgggtgccagctctgctttccggtaccacccgcccgcaggatattcgtcgcggacgttgcagcgccgggcataaatctctgtggcacgaaagctggggcggcctgccgccagccagtttctttgatgagctggacccgatcctcaatcgccatttgccttccccgctgttcactgacacctggactgccgatattccggtgggcaccttatgcccggaatgggcgcagcgtctcggcctgcctgaaagcgtggtgatttccggcggcgcgtttgactgccatatgggcgcagttggcgcaggcgcacagcctaacgcactggtaaaagttatcggtacttccacctgcgacattctgattgccgacaaacagagcgttggcgagcgggcagtgaaaggtatttgcggtcaggttgatggcagcgtggtgcctggatttatcggtctggaagcaggccaatcggcgtttggtgatatctacgcctggtttggtcgcgtactcggctggccgctggaacagcttgccgcccagcatccggaactgaaagcgcaaatcaacgccagccagaaacaactgcttccggcgctgaccgaagcatgggccaaaaatccgtctctggatcacctgccggtggtgctcgactggtttaacggccgccgcacaccgaacgctaaccaacgcctgaaaggggtgattaccgatcttaacctcgctaccgacgcaccgctgctgttcggcggtttgattgctgccaccgcctttggcgcacgcgcaatcatggagtgctttaccgatcaggggatcgccgtcaataacgtgatggcgctgggcggcatcgcgcggaaaaaccaggtcattatgcaggcctgctgcgacgtgctgaatcgcccgctgcaaattgttgcctctgaccagtgctgtgcgctcggtgcggcgatttttgctgccgtcgccgcgaaagtgcacgcagacatcccctcagcccagcaaaaaatggccagtgcggtagagaaaaccctgcaaccgtgcagcgaacaggcacaacgctttgaacagctttatcgccgctatcagcaatgggcgatgagcgccgaacaacactatcttccaacttccgccccggcacaggctgcccaggccgttccgactctataaggacacgataatgacgatttttgataattatgaagtgtggtttgtcattggcagccagcatctgtatggcccggaaaccctgcgtcaggtcacccaacatgccgagcacgtcgttaatgcgctgaatacggaagcgaaactgccctgcaaactggtgttgaaaccgctgggcaccacgccggatgaaatcaccgctatttgccgcgacgcgaattacgacgatcgttgcgctggtctggtggtgtggctgcacaccttctccccggccaaaatgtggatcaacggcctgaccatgctcaacaaaccgttgctgcaattccacacccagtttaacgcggcgctgccgtgggacagtatcgatatggactttatgaacctgaaccagactgctcatggcggtcgcgagttcggcttcattggcgcgcgtatgcgtcagcaacatgccgtcgttaccggtcactggcaggataaacaagcccatgagcgtatcggctcctggatgcgtcaggcggtctctaaacaggatacccgtcatctgaaagtctgccgatttggcgataacatgcgtgaagtggcggtcaccgatggtgataaagttgccgcacagatcaagttcggtttctccgtcaatacctgggcggttggcgatctggtgcaggtggtgaactccatcagcgacggcgatgttaacgcgctggtcgatgagtacgaaagctgctacaccatgacgcctgcaacacaaatccacggcgaaaaacgacagaacgtgctggaagcggcgcgtattgagctggggatgaagcgtttcctggaacaaggtggcttccacgcgttcaccaccacctttgaagatttgcacggtctgaaacagcttccaggtctggccgtacagcgtctgatgcagcagggttacggctttgcgggcgaaggcgactggaaaactgccgccctgcttcgcatcatgaaggtgatgtcaaccggtctgcagggcggtacctcctttatggaggactacacctatcacttcgagaaaggcaatgacctggtgctcggctcccatatgctggaagtctgcccgtcgattgcagtagaagagaaaccgatcctcgacgttcagcatctcggtattggtggtaaggacgatcctgcccgcctgatcttcaatacccaaaccggtccagcgattgttgccagcctgattgatctcggcgatcgttaccgtctgctggttaactgtatcgacacggtgaaaaccccgcactccctgccgaaactgccggtggcgaatgcgctgtggaaagcgcaaccggatctgccaactgcttccgaagcgtggatcctcgctggtggcgcgcaccataccgtcttcagccatgcgctgaacctcaacgatatgcgccagttcgccgagatgcacgacattgaaatcacggtgattgataacgacacccgcctgccagcgtttaaagacgcactgcgctggaacgaagtgtattacggatttcgtcgctaagtagccacatcaggtatgtaacgcctgatgcgacgctgacgcgtcttatctggcctacgcgctgtgtttttgtaggccggataagcaaagcgcatccggcattcaacgcctgatgcgacgctggcgcgtcttatcaggcctacgcgctgcgattttgtagaccggataagcaaagtgcatccggcacgaaggagtcaacatgttagaagatctcaaacgcctggtattagaagccaacctggcgctgccaaaacacaacctggtcacgctcacatggggcaacgtcagcgccgttgatcgcgagcgcggcgtctttgtgatcaaaccttccggcgtcgattacagcgtcatgaccgctgacgatatggtcgtggttagcatcgcaaccggtgaagtggttgaaggtacgaaaaagccctcctctgacacgccaactcaccggctgctctatcaggcattcccgtccattggcggcattgtgcatacgcactcgcgccacgccaccatctgggcgcaggcgggtcagtcgattccagcaaccggcaccacccacgccgactatttctacggcaccattccctgcacccgcaaaatgaccgacgcagaaatcaacggtgaatatgagtgggaaaccggtaacgtcatcgtagaaaccttcgaaaaacagggtatcgatgcagcgcaaatgcccggcgtcctggtccattctcacggcccatttgcatggggcaaaaatgccgaagatgcggtgcataacgccatcgtgctggaagaggtcgcttatatggggatattctgccgtcagttagcgccgcagttaccggatatgcagcaaacgctgctggataaacactatctgcgtaagcatggcgcgaaggcatattacgggcagtaatgactgtataaaaccacagccaatcaaacgaaaccaggctataatcaagcctggttttttattggattttcaacgtggcgcaggcaggttttatcttaacccgacactggcgggataccccgcaagggacagaagtctccttctggctggcgacggacaacgggccgttgcaggttacgcttgcaccgcaagagtccgtggcgtttattcctgccgatcaggttccccgcgctcagcatattttgcagggtgaacaaggctttcgcctgacgccgctggcgttaaaggattttcaccgccagccggtgtatggcctttactgtcgcgcccatcgccagttgatgaattacgaaaagcgcctgcgtgaaggtggcgttaccgtttacgaggccgatgtgcgcccgccagaacgctatctgatggagcgttttatcacctcgccagtgtgggtcgagggtgatatacgcaatggcgctatcgttaatgcccgtctgaaaccgcatcccgactatcgtccgccgctcaagtgggtttctattgatattgaaaccacccgccacggtgagctgtactgcatcggcctggaaggttgcgggcagcgcatcgtttatatgctggggccagagaatggcgacgcctccgcgctcgattttgaactggaatacgtcgccagtcgcccgcagctactggaaaaactcaacgcctggtttgccaactacgatcctgatgtgatcatcggttggaacgtggtgcagtttgatctgcgaatgctgcaaaaacatgccgagcgttatcgtattccgctgcggctggggcgcgataacagtgagctggagtggcgcgagcacggctttaaaaacggtgtgttttttgctcaggctaaaggtcggctaattatcgacggtatcgaggcgctgaaatccgcgttctggaatttctcttcattctcgctggaaactgtcgctcaggagctattaggcgaaggaaaatctatcgataacccgtgggatcgaatggacgaaattgaccgccgtttcgccgaagataaacctgcgctggcgacttataacctgaaagattgcgagctggtgacgcagattttccataaaactgaaatcatgccgtttttgctcgaacgagcaacggtgaacggcctgccggtagaccgccacgggggatcggtggcggcgtttggtcatctctattttccccgtatgcaccgcgctggttatgtcgcgcctaatctcggcgaagtgccgccacacgccagccctggcggctacgtgatggattcacggccagggctttatgattcagtgctggtgctggactataaaagcctgtacccgtcgatcatccgcacctttctgattgatcccgtcgggctggtggaaggcatggcgcagcctgatccagagcacagtaccgaaggttttctcgatgcctggttctcacgagaaaaacattgcctgccggagattgtgactaacatctggcacgggcgcgatgaagccaaacgccagggtaacaaaccgctgtcgcaggcgctgaaaatcatcatgaatgccttttatggcgtgctcggcaccaccgcctgccgcttcttcgatccgcggctggcatcgtcgatcaccatgcgtggtcatcagatcatgcggcaaaccaaagcgttgattgaagcacagggctacgacgttatctacggcgataccgactcaacgtttgtctggctgaaaggcgcacattcggaagaagaagcggcgaaaatcggtcgtgcactggtgcagcacgttaacgcctggtgggcggaaacgctgcaaaaacaacggctgaccagcgcattagaactggagtatgaaacccatttctgccgttttctgatgccaaccattcgcggagccgataccggcagtaaaaagcgttatgccggactgattcaggagggcgacaagcagcggatggtgtttaaagggctggaaaccgtgcgcaccgactggacgccgctggcccagcagtttcagcaggagctatacctgcgtatcttccgtaacgagccatatcaggaatacatccgcgaaaccatcgacaaactgatggcgggtgaactggatgcgcggctggtttaccgtaaacgccttcgccgtccgctgagcgaatatcagcgtaatgttccgcctcatgtacgcgccgctcgccttgccgatgaagaaaaccaaaagcgcggtcgccccttgcaatatcagaatcgcggcaccattaagtacgtatggaccaccaacggcccggagccgctggactaccaacgttcaccactggattacgaacactatctgacccgccagctacaacccgtggcggagggaatactcccttttattgaggataattttgctacacttatgaccgggcaacttgggctattttgagcaaaaaaaagagttcgccagataccattttgatgcgtgacgaatgctttgccatccagtaccatagcgccctttccattcctggacctgaataacgccactacctcataagcacggtagcgggtggttattgcctgcaattaaagatatagagccgaacacatatgccttttacacttggtcaacgctggatcagcgatacagaaagcgaattgggacttggaaccgttgtcgcggtggatgcgcgaactgtcactttacttttcccatctactggtgaaaaccgtctgtacgcacgcagtgattcccccgtgacccgcgtgatgttcaaccctggtgataccattaccagccatgacggctggcagatgcaagtcgaagaagtaaaagaagaaaatggcttgctgacctatatcggtactcgcctggatactgaagagtccggcgtagccctgcgtgaagttttccttgatagcaaactggtgttcagcaaaccgcaggaccgtctgtttgccgggcagattgaccgtatggaccgctttgcgctgcgttatcgcgcgcgtaagtattccagcgaacagttccgtatgccgtacagcggcctgcgcggtcagcgtaccagcctgattccgcatcagctcaacatcgctcatgatgttggtcgccgccacgcgccgcgcgtcctgctggctgacgaagtgggtttagggaaaaccattgaagccgggatgatcctgcatcagcaactgctctctggcgctgctgaacgtgtgctgattatcgtcccggaaaccttacagcatcagtggctggtagaaatgctgcgccgtttcaacctgcgctttgcgctatttgatgatgagcgttatgccgaagctcagcacgatgcttacaacccgtttgacaccgaacagctggtgatttgctcgctggattttgcccgtcgtagcaaacagcgcctggaacatctctgtgaagccgaatgggacctgctggtggtcgatgaagcgcatcacctggtgtggagcgaagatgcgccaagccgtgaatatcaggccattgaacaactggcagagcacgtgccgggcgttctgctgctgaccgcgaccccggaacagctggggatggaaagccacttcgcccgtctgcgtctgctggacccgaaccgtttccacgattttgcgcagttcgttgaagagcagaaaaattatcgtccggttgcggacgccgttgccatgctgctggcaggtaacaaactgagcaatgacgaactgaacatgctcggcgagatgatcggcgagcaggatatcgagccgctgttgcaggcagcaaacagcgacagcgaagatgcccagagcgcccgtcaggagctggtttcgatgctgatggatcgccacggcaccagccgcgtgctgttccgtaacacgcgtaacggtgtgaaaggattcccgaaacgcgagctgcacaccattaaactgccgctaccgacgcagtatcagacggctattaaagtctccggcattatgggcgcacgtaaaagtgcggaagatcgtgctcgcgatatgctctacccggagcgtatttatcaggaatttgaaggtgataacgccacctggtggaacttcgatccgcgcgttgagtggctgatgggctacctgaccagccatcgctctcagaaagtgctggtgatctgcgccaaagctgccactgcgctgcaactggagcaggtactgcgcgaacgtgaaggtattcgcgctgcggtgttccacgaaggtatgtcgattatcgaacgtgaccgcgctgccgcctggtttgccgaagaagacaccggcgcacaggtactgctgtgctcagaaatcggttctgaaggacgtaacttccagttcgccagccacatggtgatgtttgacctgccattcaacccggatctactggagcagcgtattggtcgtctggatcgtatcggccaggcgcacgatattcagatccatgtgccttatctggagaaaaccgctcagtcggtgctggtgcgctggtatcacgaaggtctggatgcatttgagcacacctgcccgaccggacgcactatttacgatagcgtatacaacgatctgattaactatctggcttcaccggatcaaaccgaaggctttgacgatctgatcaaaaactgccgcgagcaacatgaagcgctgaaagcacagctggaacagggtcgtgaccgcctgctggaaatccactccaacggtggcgaaaaagcccaggcactggcagaaagcattgaagagcaggatgacgataccaacctgatcgccttcgccatgaacctgttcgatattatcggtatcaatcaggacgatcgcggcgacaacatgatcgtgctgacgccgtccgatcatatgctggtgccggacttccctggcctgtcggaagatggcatcaccatcacctttgatcgtgaagtggcgctggcgcgtgaagatgcacagtttattacctgggagcatccgctgatccgcaacggtctggatctgattctttctggcgataccggtagcagcacgatttcactgttaaaaaacaaagcgttgccggtaggtacgctgttggtggaactgatttatgtggttgaagcccaggctccgaagcagttgcagctcaaccgcttcctgccaccgacgccggtacgtatgctgctggataaaaacggcaacaacctggcggcgcaggtagagtttgaaacctttaaccgccagcttaacgcggttaaccgtcacaccggcagcaaactggttaacgccgtgcagcaggatgttcacgctatccttcaactgggtgaagcgcagatcgagaaatctgcccgtgcattgattgatgcagcgcgtaacgaagccgacgaaaaactgtctgccgagctgtctcgtctggaagctctgcgtgcagtgaacccgaacattcgtgacgacgaactgaccgccattgagagcaaccgtcagcaggtaatggaaagcctggatcaggcaggttggcgtctggatgccctgcgtttgatcgttgtaacgcatcagtaacggagccgaaaatggggatggaaaactacaatccaccgcaggaaccctggttggttatcctgtatcaggatgaccatattatggtggtcaacaagccgagcggtttgttgtcagtgccgggtcgtctggaagagcacaaagacagcgtgatgacgcgcattcagcgtgattatccgcaggcagaatcggtgcatcgtctggatatggctaccagcggcgtgattgtagtggcgctgaccaaagccgcggagcgggagttaaaacgccagttccgcgagcgcgagccgaaaaagcagtatgtggcccgcgtctgggggcatccatcccccgcagaaggtctggtggatctgccgctgatttgcgactggccaaaccgcccgaaacagaaagtctgttacgaaacgggtaaacctgcgcagacggaatatgaagtggtggagtatgcggcggataacacggcaagagtggtgttaaaaccgattaccgggcgttcgcatcaattgcgtgtgcatatgctggcgctggggcatccgattctcggcgatcgtttttatgcatcaccagaagcgagagcgatggcaccgcgtttgttgctacatgcagagatgttgacgattacccatccggcgtatggcaatagtatgacgtttaaagcgccagcggatttttaatcgtcacgctggcgcagttcggtaggcggataaggcgttcacgccgcatccggcaattgtgcgccgattgcctgatgcgacgcgggccgcgtcttatcaggcctacagtttaaaacttatttaaaccctttctgctgctttatcagctcatatgcctgctgaatttcctgcgctttctgcttcgccatctccatcatctcaggcggcaaacctttcgccaccagcttatcgggatggtgttcactcatcagcttacggtaggcacgtttgatggtggtcgcatcatccgtcggcttcacgcccagcacattacaggcatcttccagcgttgggccacgctgcgcttgctgccagttaccaccgccagtttgctgctgataaccgccgccaaactgtgcaccgccctgcatcatgcgcaaaaactggtcaaactgagcgcgggagatccctaattcttctgcaatgacatacagcaccgcccgttcattcgggtgcagtgaaccatcagcaaacgccgcctgaatctggatctccagaaacatacgaattaagtcaaaacgaccaaagcagacactgcgaaactggcgcatcttttcgcgcagcgggtaattgtctgattttcccacccggaacgcattttgcgccgcagtacgggaagcgccatgaagattcattcggtccatcaactggctggcgatatgaatatcagcctccgtgacgcgacctttggatttggttaaatgccccatcacttcaaaagtggtggcaaaaaacagcgcctgacgctcacgctggttggcgaaccacgccattttacggctacgggctttatcaaacatatggccaattaacaggcctaacactacgccccaaaagccgccgcccatcagtaaggccacggccacgccaatgatttttccccaatactgcatatattccccaaatcgacacacggatatcagggctatctcccacaatataaaggtgcttttaccgttttccggctgcggtcaattgtgggacatcgcctataatttgcattatcatacctgtcattcaatgccgtgcctaacaccactgacgctattcggacaggattaacactagcgtagagatgacgagtacgttagtctctgaccgtttgtcacgcgcaacgttaccgatgatggaacaataaaatcaacgtatgaaaaaacgtatccccactctcctggccaccatgattgccaccgccctttatagtcaacagggactggcagccgacctcgcctcacagtgcatgttgggcgtgccaagctatgaccgtcctctggtacagggcgataccaatgacttacccgtgactatcaatgctgaccacgcgaaaggggactacccggatgacgccgtgtttactggcagcgtggatatcatgcagggtaacagccgtctgcaggccgacgaagtgcagctccatcaaaaagaggcaccaggacaaccggagccggtacgtaccgttgatgcgctcggtaatgtccattacgacgataaccaggtgctcctcaaagggccgaaaggctgggcgaatctgaacaccaaagataccaacgtctgggaaggtgattaccagatggtgggtcgccagggtcgcggtaaagcggacctgatgaaacaacgtggcgaaaaccgctataccattctggataacggtagctttacctcctgtctgccgggttctgacacctggagcgtggtaggtagcgaaattattcatgaccgcgaagaacaagttgcggagatctggaacgcccgctttaaggtgggtccggtaccgatcttttatagcccctatttgcagttgccggtgggtgacaaacgtcgctctggtttcttgatcccgaacgccaagtacaccaccaccaactactttgagttctacctgccatattactggaacatcgcgccaaatatggatgccaccatcacgccgcattatatgcatcgtcgtggcaacatcatgtgggagaacgaattccgctacctctcccaggcgggcgctggcttgatggaactggactatctgccttcagataaagtctatgaagatgaacacccgaacgatgacagttcacgtcgttggttattctactggaaccactccggggtcatggatcaggtgtggcgtttcaacgtcgactacaccaaggtcagcgatcctagctacttcaatgatttcgataacaagtacggttccagtactgacggctacgcaacgcaaaaattcagcgttggctatgcggtgcaaaacttcaatgccaccgtttcaaccaagcagttccaggttttcagcgaacagaacaccagtagctactcggcagagccgcagttagacgttaattactaccagaatgatgttggtccgtttgatacgcgtatttacggccaggcagtgcactttgttaacaccagagacgacatgcctgaagcaacccgtgttcacctggaaccgaccatcaatttgccgctctctaataactggggcagcatcaataccgaagcgaagttgctggcaacccattatcagcaaactaatcttgactggtataactccagaaacacgaccaagctggacgaatccgttaaccgcgtaatgccgcaattcaaagttgacggcaaaatggtctttgaacgcgatatggaaatgctggctccgggttatacccaaacgctggaaccgcgcgcgcagtatttgtacgtgccgtatcgcgatcagagcgacatctataactacgactcatctctgctgcaatctgactactctggcctgttccgggaccggacttacggcggtcttgaccgtattgcctccgctaaccaggtgacgaccggtgtcacatctcgcatatatgatgatgctgccgttgaacgttttaatatttccgttggtcaaatctactatttcacggagtctcgcactggcgatgacaacataacatgggagaatgacgacaaaacgggctcactggtgtgggcaggcgatacttactggcgtatctccgagcgttggggattgcgtggcgggattcagtacgatacacgtctggataacgtagcgaccagtaactccagcattgaataccgtcgggatgaagaccgtctggtacagctgaattaccgttacgccagcccggaatatattcaggctacgctgcctaagtactattccactgctgagcaatataagaatggtatttcgcaggtaggtgctgtcgccagctggccaattgccgatcgttggtccattgttggggcctactactacgacaccaatgcgaacaagcaagctgactctatgttaggtgtgcaatacagctcctgctgctatgcaattcgcgtcggttacgagcggaagctgaacggttgggataacgataaacaacatgcggtatatgacaacgcaatcggctttaacatcgaacttcgcggcctgagctccaactacggtctgggtacgcaagagatgctgcgttcgaacattctgccgtatcaaaactctttgtgatttgttgatttaccacgtaatccgcagtgcggttaattgaaatggaaaaagtatgaagaactggaaaacgctgcttctcggtatcgccatgatcgcgaataccagtttcgctgccccccaggtagtcgataaagtcgcagccgtcgtcaataacggcgtcgtgctggaaagcgacgttgatggattaatgcagtcggtaaaactgaacgctgctcaggcaaggcagcaacttcctgatgacgcgacgctgcgccaccaaataatggaacgtttgatcatggatcaaatcatcctgcagatggggcagaaaatgggagtgaaaatctccgatgagcagctggatcaggcgattgctaacatcgcgaaacagaacaacatgacgctggatcagatgcgcagccgtctggcttacgatggtctgaactacaacacctatcgtaaccagatccgcaaagagatgattatctctgaagtgcgtaacaacgaggtgcgtcgtcgcatcaccatcctgccgcaggaagtcgaatccctggcgcagcaggtgggtaaccaaaacgacgccagcactgagctgaacctgagccacatcctgatcccgctgccggaaaacccgacctctgatcaggtgaacgaagcggaaagccaggcgcgcgccattgtcgatcaggcgcgtaacggcgctgatttcggtaagctggcgattgctcattctgccgaccagcaggcgctgaacggcggccagatgggctggggccgtattcaggagttgcccgggatcttcgcccaggcattaagcaccgcgaagaaaggcgacattgtgggtccgattcgttccggcgttggcttccatattctgaaagttaacgacctgcgcggcgaaagcaaaaatatctcggtgaccgaagttcatgctcgccatattctgctgaaaccgtcgccgatcatgactgacgaacaggcccgcgtgaaactggaacagattgctgctgatatcaagagtggtaaaacgacttttgctgccgcagcgaaagagttctcgcaggatccaggttctgctaaccagggcggcgatctcggttgggcaacagcggacatttttgatccggctttccgtgacgccctgacccgcctgaacaaaggtcaaatgagtgcaccggttcactcttcattcggctggcatttaatcgaactgctggatacccgtaatgtcgataaaaccgacgctgcgcagaaagatcgtgcataccgcatgctgatgaaccgtaagttctcggaagaagcagcaagctggatgcaggaacaacgtgccagcgcctacgttaaaatcctgagcaactaatggttaaaacccaacgtgttgtgatcactcccggcgagcccgccgggattggcccggacttagttgtccagcttgcacagcgtgagtggccggtcgaactggttgtttgtgccgatgccactctccttaccgaccgggcagcgatgctcggtttgccgctcaccctccgcacttattcccccaactctcctgcacaaccgcaaactgcgggcacattaacgctacttcctgtcgcgctacgtgaatctgtcactgcggggcagttagcggttgaaaatgggcattatgtggtggaaacgctggcgcgagcgtgcgatggctgtctgaacggtgaatttgctgcgctgatcacaggccccgtgcataaaggcgtcattaacgacgcaggcattccgtttaccggtcataccgagtttttcgaagagcgttcgcaggcgaaaaaagtggtgatgatgctggcgaccgaagaacttcgcgtggcgctggcaacgacgcatttaccgctgcgcgatatcgcagatgctatcacccctgcgcttttgcacgaagtgattgctattttgcatcacgatttgcggaccaaatttggtattgccgaaccgcgcattctggtctgcgggctgaatccacacgcgggcgaaggcggtcatatgggtacggaagagatagacaccattattccgctgctcgacgagttgcgggcgcaggggatgaaacttaacgggccgctgcctgccgataccctgtttcagccgaaatatctcgataacgccgacgccgtgctggcgatgtaccacgatcagggtcttcccgtgctaaaataccagggcttcgggcgcggtgtgaacattacgctgggcctgccctttattcgcacatcagtggaccacggcaccgcgcttgaactggcgggacgtggcgaagccgatgtcggcagttttattacggcgcttaatctcgccatcaaaatgattgttaacacccaatgaataatcgagtccaccagggccacttagcccgtaaacgcttcgggcaaaactttctcaacgatcagttcgtgatcgacagcattgtttctgccattaacccgcaaaagggccaggcaatggtcgaaatcggccccggtctggcggcattgaccgagccggtcggcgaacgtctggaccagctgacggtcatcgaacttgaccgcgatctggcggcacgtctgcaaacgcatccattcttaggcccgaaactgacgatttatcagcaggatgcgatgacctttaactttggcgaactggccgagaaaatgggtcagccgctgcgtgttttcggcaacctgccttataacatctccacgccgttgatgttccatctgtttagctatactgatgccattgccgacatgcactttatgttgcaaaaagaggtggtgaatcgtctggttgcaggaccgaacagcaaagcgtatggtcgattaagcgtcatggcgcaatactattgcaacgtgatcccagtgctggaagtaccgccgtcagcctttacaccaccacccaaagtggattccgccgtcgtgcgcctggttcctcatgcaacgatgcctcacccggttaaagatgttcgtgtgttgagccgcatcaccaccgaagcctttaaccagcgtcgtaaaaccattcgtaacagcctcggcaacctgtttagcgtcgaggtgttaacgggaatggggatcgacccggcgatgcgagcggaaaatatctctgtcgcgcaatattgccagatggcgaactatctggcggagaacgcgcctttgcaggagagttaacgatgatcaattcgccccgagtgtgtattcaggttcaaagcgtctacattgaggcacaatcttcacctgataatgaacgttacgtttttgcttataccgtaaccatacgcaatctggggcgagcgccagtgcagttgttggggcgttactggctgatcaccaatggcaatggccgtgaaaccgaagtccagggcgaaggagtggttggcgtccagccacttatcgcgcctggcgaagagtaccagtacaccagcggtgcaatcattgaaaccccgctgggcaccatgcagggtcactacgaaatgatcgatgaaaatggcgtccctttcagcatcgacattcccgtattccgactcgccgttcccacactcattcattaaaagaatatggcgacataccttattggcgacgttcatggttgttacgatgaactgatcgcattgctgcataaagtagaatttacccctgggaaagataccctctggctaacgggcgatctggtcgcgcgcgggccgggttcgctggatgttctgcgctatgtgaaatccttaggcgacagcgtacgtctggtgctgggcaatcacgatctgcatctgctggcggtatttgccgggatcagccgcaataaaccgaaagatcgcctgacaccgctgctggaagcgccggatgccgacgagctgcttaactggctgcgtcgccagcctttgctgcaaatcgacgaagagaaaaagttggtgatggcccacgcagggatcacgccgcagtgggatctacagaccgccaaagagtgcgcgcgcgatgtagaagcggtgctatcgagtgactcctatcccttctttctcgacgctatgtacggcgatatgccaaataactggtcaccggaattgcgggggctgggaagactgcgttttatcaccaacgcttttacccgtatgcgtttttgcttcccgaacggtcaactggatatgtacagcaaagaatcgccggaagaggcccctgccccactgaaaccgtggtttgcgattcctggccctgtcgctgaagaatacagcatcgcctttggtcactgggcatcgctggagggcaaaggtacgccggaaggtatatacgcgctggataccggctgctgctggggtggtacattaacctgcctgcgctgggaagataaacagtattttgtccagccgtcgaaccggcataaggatttgggcgaagcggcggcgtcttaaacacagcctgatataggaaggccggataagacgcgaccggcgtcgcatccggcactagccgtaaattctatacaaaattaccgccgctccagaatctcaaagcaatagctgtgagagttctgcgcatcagcatcgtggaattcgctgaataccgattcccagtcatccggctcgtaatccgggaaatgggtgtcgccttccacttctgcgtcgatatgcgtcagatacagtttttgcgcttttggcaagaactgttcataaacgcgaccgccgccaatcaccatgatttctggtacgtcaccacacgccgcgatggcttcatccaccgacttcacccacgttacgcgatcgtccgtacccggttgactgctgaggataatatttttgcgtcctggcaacggacgaccgattgattcccaggtatggcggcccataatcacgggtttatttaaggtgttgcgtttaaaccaggcgagatcggcaggcaggttccacggcatggcgttttccatgccgataacgcgatctaccgctaacgccgcaatcagactgatcattgagatttcccgataaaaaaaattgtcgccactatacgtaaagcgtaaaccgtcgtcgactggtgcgaggatgatgttgaggaaaattttatattctgctggcgagtccacgctctctccgtggactcgccgcattacaatgaaacaaaaacaaacagttagctgtaaagtgtgatttacgtcactctttattaggatgagggtttcgtttccggttcatccgccatgttgccggtatgtttaccttcttcggttccctgccagccatgtcgttgaattaatgacagatgttcgcggtcctcggtaatgatctcacttaacatcgcgctggtgcgtttatagaccgccgcgcgggctttggtgtcgttctcaaccattgccatctcttccaccatctgaatattaaagcggcggaacacatcggcacgttctcgcgcttcatacggccccagacctaaactttccagtgccagacgcccggttttcagcgcaccttcgaaggtttcacgctccggcttttcaacgcctgcctgacgcaaacgaatgtagtggtcgacatcgcgggcgcgggcaataatctgcaaatgcgggaaatgttctttcaccatctctgtcagttgcaggttggtttgcggatcgtcgatggcgttaatcagcacttccgctttcgccgctccggcagattccagtaaatccatccgcgtggcatcgccataaaacactttcataccaaatttacgcaaggtttcgatatggtccggatcgtgatcgagtaccaccattttcaccccgctggagagcagtaaacgtccggtaatctgcccaaaacgaccgaatccggcgataatcacgcgcggctgttcttcgtcgatctcatcggcttcacgcgcttcctcagtagaagattgctcaaggcgattgaggatcaccagcagaatcggcgttgctgccatcgacagcgccaccgccagggtcagcgatttcgcccactccggctccagcacattcgccatctgcgccgcgccaaataccacaaaggcaaactcactgccctgccctaacaacaccgcaaaccaacgacgctgtttatttggcacttgcaacggtcgggcaatcagccacagcatggcgattttgatgatgaggaaaccgagcagcaaaatgacaatgcgcaatgggttttcaagcagcgtgccaaagtctatcgacatgccaacaccgatgaaaaacagccccaacagcaaacctttaaatggttcgatatcgctctccagcgcatgacggtattccgagcttgccagcagtacgcccgccagaaacgcgcccatcgccatcgacaagccgacctcttccagcagcaaaccaaagccaaacacgaggaataacgccacggcactaaacacttcccgcaagccagagcgggctacaaaacgcagcgccggacgcgtgacatagcgccccagcaataccaccagcaccagcgcacccgccacttttaacgccgagagagcaaatgcgcccatcgtcgtcgaggcactgctcgttgccagtagcggaatcatcgccaccagcgggatcgccgcgatatcctggaacagcagcaccgcaaaggcactgcgacccatttgcgtcaccatcagattgcgttcattcatcgcctgcatggcaatcgccgtagaggagagcgccagcgtcatgccgatcaattccgcgacctgccagcgcagcccaagtaacatgcagaacagccccagcaggccaccgcaaatcaccatctgcaatgcgccaccgccgaacactgccgcacgcagcttccacagcctttgtggatcgagttcgaggccgataataaacagcatcagcaccacgccaatctcggcaaagtgcagaatagattcggcatcggtcaccagtcgcagcccccacgggccaataatgcagccggcgatcaggtagccaagtaccgatcccagaccaagacgtaccgcaatgggtacaatcagcgctgccgaaccgagataaatcagcgcctgaatcagcgtatggctatccatgatgggcctcctgccattccagcagacgttgcttatagtgacgcgcctgcccttcgagggtttcgtcgtcacaaataaaggtgcagtgcatggcaaacggtggcagccagttcagcccgcagtagattgccgtcgcctgtagcggctgcgacagcacatcaaagcccggatgcgcaccaatttcaaaatggctttccccgccgccggtcgtcaccgcccacagcaaatgtttgccatgcagcgccgtgccgccgtgaccgtaagcccagccgtgcgagaaaactttatcgatccaaagtttgaggagcggtggaatgctgtaccactgcatcgggtgctgccagacgatcagatcggcgcgagacagcgcctcctgctcggcggcaatatcgatattgaagtcaggatagagttgataaagagagcgaatttcgacgccttccagcgtccttgcctgttcaagcatccgtttattcgcatgggaatgatgcggatacggatgcgcataaattataagaatcataggtagcccgcgtgattacgcctttgttttcccacaaagtgtagtcatatattcacgcggcttatagtcaataatattgattcagaaaagagagaaatctgaacaaattaccccattctctgcccgcggatcgtcatattgctggtctgcgccagtgacatccctcgagtctccggggcaaacgctacggaaatcaacaagccaaacagcgagatacccgcccccattagcatcgtgttactgataccgtaattattgataaagatcggcagtgcccaggtcgaaacaatggtgccaatacggcttaaggacataatcacgcccacggcagaggcgcggatatctgtcgggaagagttcattaggatagagccactgcaaattacccggcccgccagagaaaaaggcatacaccgcaaaggccatcactaccagccagatccccatatccgggatcagccccaaaaccgccagcgccagcgtcatcatggcaaagctgccaatcaacaatggacgccgtccggcagtgtttaaccacagcatcggcggaatacagccgagcataaagaacaggctaatcaccacgttccccagtgccgcgtttttgccaacccccaatcccaacaaaccaacgatttgcgggccaaaggtgtaaatggcgaacattgggatcacctggcaggtccagatggcggcaacaaacagaacaaaaggaaaatggcggcgattaaacagatcgcgaaaacgggtttgctgcggctgctcttcatcgaaagccaccggttcgccaaacagttttatcatcatctcttcgcactcttttactcgccctttgcgtaataaccagcggggagattcaggcagttcgaatcgaccaatcaaaatcaacaaacaggggatcgccgcgctacccagcatccagcgccagccgccttccacatcataaagccagtagccgaccagatcggcgcaggtcgcgccgacataccacatggcggcgataaagctgatggaaaacgcccgctgacgggtactggagaactcggtgatcattgaggtggcgatgggataatctgcaccgatgacaatgccgataagtacccgcatcaccaacagttcgacaggggatgagacaaacatcgtcgccaccgatatcacgccgatggcgatgatatcaatgaggaacattttgcgccgtccgactttatcggagatatagccaaacagcgatgtgccaacgaacagcccggcgagcgttcccgcacccagcaagccaatccagtcagcgtccagtttcagcgccggagtcagttgctccagcgccacgccaatcattaccagtacataaccatccagaaacggaccaccgcttccccacagcaaaatgcggcggtgaatagaggagaatttgagatcgtcaaagtttctggacggttgcatgggttattcctgttttttgcaatgagagtcagtgcggcgttacgtatcaaaccaacatcagccgtaacggaactccacaccaaaggtgccgcgcgggtattcccactgttccagcgccgaccccagccccagaatgcgacaggtgccgcactccagacatccggcgtaatcgaagcgcacactgccgtcatcctgcttcttgtacagacctgcggggcacgctttcaccagcagctccagcacctgtttatcagcatcggccttcacaacaatgtgcggatgctcttcatcgacattgaatttattgacgcccagtttgacgtccacattgacgggagaagtcataaaacggtcactcctttcatgccatccttgattagattgatgaagcccactttcttaccgtggcggaggattttcttgcgcatcagttctggcgcactgccgtcaatggtgaacaggtcacgcgccacgcccaccgccagctccgggtagccgctgaacatgcgtgggttatcaaggaacgccggtagtttctggtacatgcgcatatcgcgcagcgggccactctcaagatgctgacgatattccgccagtttttgcttactgaaatcgtcgcttttcatcgctgaaagcacggtttttgctgcagcttccccggcggcaatcgccagatccataccgcgaatggtaaaaccgaggttcatacacattccggcggcatcgccggcaatcaatacgccgtcaccgaccagctccggcagcatgttgatgcctgcttccggcactacgtgagcggaatattccaccagcttgccacccgcgatcagcggtgcaacggccggatgttgtttgaaatcttccagcatttgcggcaccgatttttttgcgtcatgcagatgatgcagaccacaaaccagccccagcgacagggtattttcattggtataaaggaagccgccgcccatcaggccatcggtgggtgatcccgcaaacagacaagccgcgccctgattaccctgcaactgaaaacggtcttcgattaccgacttcggtaactcgatcagttccttcacgccaaccgccacatccgtcggtttaacgcgttttgccatccccagcttttcggcaaggatggagttcactccatcagcaaggatcaccgttttcgcttcaatcacatcgccatcggcttctacaccgacgactttgccatcgcgctgtacgaggttatcgacgcggatcccggtaattaactgcgcgcccgcttcttcggcctgctccatcagccaggcatcaaatttactgcgcaaaacggagtaagaacgctgggatggcgaggtttcgtcaccattgcagtagtccatagtcatcgctgacttttccgtcataaacgcgagtttttcatgggtgatcaggcgttctacgggggcggagtcggcgaaaccaggaataatgtgttctaggctgtgggcatagagacgcccgccggtgacgttcttggcacctgcggaattgccacgctcgataactaacacttgcgccccttcgcgggcgagcaccagtgcggcaaccgaaccggcaagcccagcaccgacgatgatggcgtcaaagatatcttcggacataagagctccctgtcagcggcagggccaaaatgcagccctgccagagtggatcaacgcgctaaagctgcggtcagcgccggaaggatcttcacggcgtcaccaacaatgccgtaatccgcgtactggaagatcggcgcatttttatctttattgatggcgaaaatggtttgcgatgcattagcgccaaccatgtgctggatctgcccggagatccccaccgccaggtacagttcaggtttcagcatcaggttggagataccgacatagcgttcgtgctccatccatttttcgttttccgccaccggacgagaacaggccaactccgcacctatcgccttgcaaagctgttctgccagcgcaatgttctctttgctgccaataccgcgaccgacgctgaccaccagacgggctttgtcgagatcgacgctgttgctctggcgcgcctgggttgccgtgcgggtaatcgccacagccggagcctgccactccacggtgtgcgtttcgccagtgcgtgacgcgtctggctgagccgcatcgaacgtgccgctgctgatggtcagtaccgcatacggcgtggcaatgcgttcttcgccaatcgccagaccaccgtaaaccatgtgtttcactgtcgctttaccgtcctgtacgctgacggtgctggcatcgttagacaccgccgctttaaggcgataacccagttttgccgccagtaatttgccgcgacgggtgtttggcagcagcaccaggccgtctgcgccgtgctggcgaatagtgtcagccatgacaccggcgtaatcttcgatcatccgatcgtccggtttgccgtttaatttccagacatgattagcgccgagctggattgcctgtgcgccgtcggcatcattgaggacaaaggtgttgatttgattagctaaagcctgcgcaccgttcatcagttccggcagacgagaaggggtatcgctgaatacccagacttgagaaaacgtgttcatagcatcccctgtaattaaatgactttgcgaagattttcagcaaatgcggcgatctgttcttcgccgtcgccttcaatcacgatgcgctgacgttcgcgctgtttcggcgcggcaacctgttgttctgaccaggctgcctctgcgttaaaaccaatatccgccgccgaccatacctggacgggctttttcgccgcgccgagaatggctttcatcgaaggaatttgtggggaattgatatcagtggaaacagcaacaaccgcaggcagcggaatgcttaaggtttcggtttcatcttccagttcgcgctcaacggtgagggtatctgcagtcagggagataattttgctgacgccgttaactgccggaatattgaggatttcgcccaccagcagaccaacctgctgggcataaaggtcggaagaaccatcgccacagaggatcaaatcaaagcctgctttctgggcggctgcagccagtgcgctcgccgtttgttgcggcagtgcctgctcgaactggtcatcaatcaccacaatcagttcatccgggccgcgcgatagcacatctttacgccctttggcgttggtcagggctttaccgcccacacttaaggccgtcacctgcgcctctgctgcctgttgctttagctggcaagccgcttcaatagcgttcagatcgtattggcttattttggcatcggctttgctgaagtctaatgaaccatcagcattattgaccgcaatatcctgttcatcaggcacgcacttatagcaagtaataatcttcattgcatctccagaaatcatgaaggaaacgtcgttcatatcggtggtgttaattacagatatcacgccctttaatttggaaataaaactttaatcaccaatattgaaaatgtcacacgcagataaatccaactttcaatattgttaagttcctcaccaatattgaaaacatggcgtagcaaaaagaaattttcaatattgctttatggatcaccaatattgaaagtcagatgctatttttttactcacaacacaacataacaaactgattaataatcaaaattaacgagaaaagcgccctctattcacccgaaacaaaaatgtgataacaatcacagaatgcagcttattgaatacccattatgagttagccattaacgcgtccacgaggttaataataattatattaaatgttaacaaaaataaaacaaacgggaacgcaaaataaatattcgttttcacagtggaattaactcatgaagaatgaaaagagaaaaacgggaatagaaccgaaggttttctttccgccgttaataatcgtcggcatactttgttggcttacagtcagagatctggatgcagcgaatgtcgttattaatgctgtattcagttacgtcaccaatgtatggggatgggcatttgaatggtatatggtggtgatgcttttcggttggttctggctggtgtttggcccgtatgccaaaaagcgtttaggtaacgaaccacctgaatttagtaccgccagttggatctttatgatgttcgcctcctgtacgtctgctgccgtactgttctggggatcgattgagatctactactacatctccaccccgccgtttggcttagaaccgaactcgacaggagcgaaagagttggggctggcttacagcttgttccactggggacctctgccgtgggccacttacagcttcctttcagtcgccttcgcttacttcttctttgtccgcaaaatggaagtgattcgccccagctcgacactggtgccgctggtaggtgaaaaacacgccaaagggttgttcggcactatcgtcgacaacttctatctcgtcgccttgatcttcgcgatgggtaccagtctgggccttgccacgccgctggtgaccgagtgtatgcaatggttgtttggcattccgcataccctgcaactggacgctatcatcattacctgctggattatcctcaacgccatttgcgtcgcttgcggtctgcaaaaaggggtacgtatcgccagtgacgtgcgtagttacctgagcttcctgatgctgggttgggtgttcattgtcagcggtgccagcttcatcatgaactacttcaccgattcggtggggatgttgctgatgtatctgccgcgcatgttgttctataccgatcccatcgctaaaggcggcttcccgcagggctggaccgtgttctactgggcatggtgggtgatttatgctatccagatgagtatcttcctcgcccgcatctcccgtggtcgtactgtgcgtgaactgtgcttcggcatggtgctggggctgacagcgtcaacctggatcctgtggactgtactcggtagtaacactctgctgttgatagataaaaacatcatcaacattccaaatctgatcgaacagtacggtgtggcgcgcgccatcattgaaacctgggccgctctgccactcagcaccgccaccatgtggggcttcttcatcctctgctttattgccaccgttacgctggttaacgcctgctcttataccctggcgatgtccacttgccgcgaagtacgcgatggtgaagaaccacctctgctggtgcgtatcggttggtcaattctggttggcattatcggtattgttctgctggcgctcggcggcctgaaaccgattcaaaccgccattatcgccggaggatgcccgctgttcttcgtcaacattatggtgacgctctcctttattaaagacgcgaaacagaactggaaagattaattaacccccaaaatatcaagaggttgaaagatggattttaatttaaatgatgagcaggaactgtttgtcgccggtatccgcgaactgatggccagcgaaaactgggaggcctattttgccgagtgcgaccgtgacagcgtctacccggaacgttttgtcaaagcactggcggatatgggtatcgacagtctgctgatccctgaagagcacggtggtctggacgcggggtttgttactctcgccgccgtgtggatggagctgggacgtctgggggcaccaacctatgtgctgtaccagttgccgggcgggttcaacaccttcctgcgcgaaggcacacaagagcagatcgacaagattatggctttccgcggcaccggtaagcagatgtggaactcagcgattaccgaaccgggcgcgggctccgacgtgggtagcctgaaaacgacttatacccgtagaaatggtaagatttatcttaatggtagtaagtgttttattaccagcagcgcctacaccccgtacatcgtggtgatggcgcgcgacggggcttctccggacaaacctgtctacaccgaatggtttgttgatatgagcaaaccgggcatcaaagtgaccaaacttgaaaagctcggtctgcgtatggatagctgctgtgaaatcacctttgacgacgtggaactggacgagaaagacatgttcggtcgggaaggtaacggctttaaccgcgtcaaagaagagttcgatcatgaacgtttcctggtagctctcaccaactacggtacggcgatgtgcgcctttgaagatgcggcgcgctacgccaaccagcgcgtgcagtttggcgaggctattggccgtttccagttgattcaggaaaaattcgcccacatggcgatcaaattaaactccatgaaaaacatgctgtatgaagcagcgtggaaagcagacaacggcaccatcacctctggcgatgcagcgatgtgcaaatacttctgcgccaatgcggcatttgaagtggtggatagcgcaatgcaggtgctgggcggtgtcgggattgcgggcaaccaccgcatcagccgcttctggcgtgacctgcgtgtagaccgcgtctccgggggatctgacgaaatgcagatcctgacgctgggtcgcgcggtgctgaagcaataccgctaagtccgtgcgctgcctgatgcgacgctaatgcgtcttatcaggcctacgggagcacgaatgtaggccggataaagcgtttacgccgcatccggcagtcatgcgctacataaatttttcaggagctaataatggatcatctacccatgccgaaattcgggccgttggccggattgcgcgttgtcttctccggtatcgaaatcgccgggccgttcgccgggcaaatgttcgcagaatggggtgcggaagttatctggatcgagaacgtcgcctgggccgacaccattcgcgttcaaccgaactacccgcagctctcccgccgcaatttgcacgcgctgtcgttaaatattttcaaagatgaaggccgcgaagcgtttctgaaattaatggaannnnnnnnnntcatcgaagccagcaaaggtccggcctttgcccgtcgtggcattaccgatgaagtactgtggcagcacaacccgaaactggttatcgctcacctgtccggttttggtcagtacggcaccgaggagtacaccaatcttccggcctataacaccatcgcccaggccttcagtggttacctgattcagaacggtgatgttgaccagccaatgcctgccttcccgtataccgccgattacttttctggcctgaccgccaccacggcggcgctggcagcactgcataaagcgcgtgaaaccggtaaaggcgaaagtatcgacatcgccatgtatgaagtgatgctgcgtatgggccagtacttcatgatggattacttcaacggcggcgaaatgtgcccgcgcatgagcaaaggtaaagatccctactacgccggttgcggtctgtataaatgtgccgacggctacatcgtgatggaactggtgggcattacccaaattgaagagtgctttaaagatattggcctcgcacatctactcagtacgccggaaatcccggaaggcactcagcttatccaccgtatcgaatgcccttacggcccactggtagaagaaaagctcgatgcctggctggcggcacataccatcgcagaagttaaagaacgctttgccgaactgaatatcgcctgtgccaaagtactgaccgtaccggaactggaaagcaatccacagtatgttgcccgtgaatcaatcactcagtggcaaacgatggatggtcgcacctgcaaagggccgaacatcatgccgaaattcaaaaataaccccggacaaatctggcgcggaatgccctcacatggcatggacacggctgccattttgaaaaatatcggctacagcgaaaacgacattcaggagttggtcagcaaaggtctggccaaagttgaggactaaacgcgtggcgtcagtcggcttgcctgactagcgcccgcccaataacaaacgaacaaaaatggatagaggtgcaatggatatcattggcggacaacatctacgtcaaatgtgggacgatctggcggacgtttacggtcataaaacggcgctgatttgtgaatccagcggcggagtcgttaaccggtatagttatcttgagttaaatcaggagattaaccgcacggcaaacctgttttatacgctggggattcgcaaaggcgacaaggttgcactacatctcgacaactgcccggaatttatcttttgctggttcgggctggcaaaaattggcgcgattatggtgccgattaacgcccgcctgttacgcgaggaaagcgcgtggatcctgcaaaatagccaggcgtgcctgctggtgaccagtgcgcaattctatcctatgtttcaacatatccagcaggaagatgccactcaattgcggcacatttgcctgacagatgtggcacttcccgctgatgatggcgtgagttcgtttactcaactgaaaaatcaacaacctgccaccttgtgctatgcaccgccgctattgactgacgatacggcggaaattctcttcacctccggcaccacctcccgaccgaaaggtgtggtgattacccattacaacctgcgcttcgctggatattactccgcctggcagtgtgcactgcgtgacgatgacgtctacctgacggtaatgcctgcgtttcatatcgattgccagtgtactgcggcgatggcggcgttttctgccggggccacctttgtgctggtcgagaaatacagcgcccgcgccttctggggacaggtgcagaagtaccgcgccaccattaccgaatgtattccgatgatgatccgtacgttgatggtgcagccgccttcagcgaacgatcggcaacaccgcctgcgggaagtgatgttttatctcaacttgtcggagcaggaaaaagatgcgttttgtgaacgcttcggcgttcgcttgctgacgtcttatgggatgacggaaaccattgtgggcattatcggcgatcgccctggcgataaacgacgctggccgtcgattggtcgggcggggttttgctacgaagcggagatccgcgacgatcacaatcgcccgctcccggcaggtgagatcggtgaaatctgtattaaaggcgtaccagggaaaaccatcttcaaagagtattttctcaacccgaaagccactgcgaaagtgctggaagccgacggctggctacataccggcgataccggatactgcgacgaagagggctttttttatttcgtcgatcgccgctgcaatatgatcaaacgcggtggcgagaatgtctcctgcgtggagctggaaaatatcatcgccacccatccaaaaattcaggatatcgtggttgtgggtattaaagattcgattcgcgatgaagccatcaaagcatttgtggtgctgaatgaaggtgaaacattgagcgaagaggaatttttccgcttctgcgaacaaaatatggcgaaatttaaagtgccctcttatctggagatcagaaaagatctgccacgtaattgctcggggaaaataattagaaagaatctgaaataaatgaaacagcagggaactaccctgccagctaataatcacgctataaaacaatatgcattttttgcagggatgttgtcgtccctgaaaaagcaaaaatggagaaaaggaatgagtgaatcattacatctgacccgcaatggatcaattctggaaattacccttgatcgtccaaaagcgaatgctattgatgcaaaaaccagctttgaaatgggcgaagtatttctaaatttccgtgacgatccgcaattacgtgtcgccattattaccggtgccggagagaagttcttttccgcgggctgggatttaaaagcggcagcagaaggcgaagcaccggatgctgactttggcccgggtggatttgcgggattaaccgaaattttcaatctcgacaaaccggttatcgcagctgtgaacggctatgcctttggcggcggtttcgaactggcgctggcggcagattttattgtttgtgccgataacgccagcttcgccctgccggaagccaagctgggcatcgttcctgacagcggcggcgtgctgcgtctaccgaagatcctgccgcctgccatcgtcaatgaaatggtgatgaccggcagacgaatgggcacagaagaggcgctgcgttgggggatagtcaaccgcgtggttagccaggcggaactgatggataacgcccgcgaactggcgcagcagctggttaacagcgccccgctggcgattgcggcgctgaaagagatctaccgcaccaccagcgaaatgccggtagaagaagcgtatcgctatattcgcagcggcgtgttgaaacactatccgtcggttctgcattcggaagatgccgttgaagggccgctggcgtttgccgagaagcgcgatccggtgtggaaaggacgttaacaaccgtgagctattacgcctttgaggggttaattccggtggttcacccgacggcgtttgtccatcccagtgccgtcttgattggcgatgtgattgtgggagccggtgtctacatcggcccactcgcctcactgcgtggtgactacgggcggttgatcgtgcaagcgggagccaatattcaggatggctgcattatgcatggctactgcgacactgacaccatcgttggggaaaacggccatatcgggcacggagcgatcctgcatggttgtgtgattggtcgcgatgcattggtcgggatgaacagcgtgattatggatggcgcggtcattggcgaagagagcattgttgccgccatgagctttgtcaaagcaggctttcacggcgagaaacgccagttgttgatgggtacgccagcccgcgctgtacgcagtgttagtgacgacgagttacactggaaacggttgaataccaaagagtatcaggatcttgtcgggcgctgtcatgcatcgttacatgaaacacagccactgaggcaaatggaggaaaatcgcccccgtttgcaggggacgacggatgtgacgcctaaacggtgatcttgccggatgcgacctggttgctggataagatgctacaacatcgcatctggcaagcaggacgcccggtatcaacgagataaaattaacgacgcatactctttgacaacatcatctgccacttctgctcgcggttaagttccgtgagcggaacggcaggaatacgcggcgtctttcttacgccgactaatttatcccggctgttattgcgcaggcgcgcgtaaatttgctcatcgatatcgaccacttttaccagtcgctggcactggcatccccgtccttccagcttattagggatcatcttaacttcgcagcttatttctgcgacttccgacagaatataagtcagggtattaaccgccttgctgtgttcaatatcgaaatgaatagagatctctcttgctatcacccaccgattttcagccatcatccattcggcgattaacaagtagagtggtttttcaacatatccttcacacatacgaactccagtttcacaaattaaaagtctggctatgactcgttttgaagcaattaaacaaggccatattaaaattgtggatatatcgatagtatgcaacttcaccgtcgataagtgtgagctaaatcctgcttatgtcatcaaaaatatcgattccccaaaagatttacttaatgggcaaaaaaaacggtcctcatcagagaaccgtattacttattcgatcaaattagcggatgaaaaatatccgccatgacacgctattatttgatctgcgcgtgcatttcctgcaccgaaattactttttcggtcgcgtcggcattcagcgccatcgcggtagcgaaaccaccgttcagggtggtgtcataatgcactttatattgcagcgcactgcgacggatcacgcgggagtcttcaatcgcgcgacggcctgaagtggtgttgatgatgtaggtatattcgccattcttgatgcggtcctgaatgtgcggacggccttcatgcaccttgttcaccagacgcggattaatgcccgcttcgcccagcacaatcgccgtgccgtgggtcgcatccagctcgaagccctgtttcagcagttttgccgccaggtccaccacgcgttctttatcgccttcgcgcacggaaagcaacgcacgaccgtgtttcttcatggtggagttgctgcccagctgcgctttggcaaacgcttcagcgaaggtgcggcccacgcccatcacttccccggtggagcgcatttctggccctaacagcgggtcaacacccgggaatttattgaacggcagcaccacttctttcaccgagtagtacggcgggataacttctttggttacgccctgctcagccagcgatttgccagccatcacacgcgccgccacttttgccagcggtacgccggtggctttggagacgaacggaacggtacgcgccgcacgcgggttaacttcaatcaggtagacttcgttgtttttcaccgcaaactgcacgttcatcagaccgcgcacctgcaattcgaaggccagtttctgcacctgctggcgcatcacatcctgaatttcctgacttaaggtgtaggctggcagagaacatgcggagtcaccggagtgcacgcccgcctgctcgatgtgctccatgatgccgccaatcagcaccatttcgccgtcgcagatggcatccacgtcaacttctaccgcgtcatcaaggaagtgatccagcaacactggcgcatcgttagacacgctgaccgccgtctggaagtagcgacgcaggtcagcttcgtcatagacgatttccatcgcccgaccgccgagaacgtaagacggacgtaccaccagcgggtagccaatctctttcgccttctctaccgccatttcaatagcggtaacggtggcgttcgccggttgtttcagtttcagacgctcaaccgcatgctggaagcgttcacggtcttctgcacggtcgatagcatccgggctggtgccgataaccggtacgccagcagcttccagcgcgcgcgccagtttcagcggggtctgaccgccgtactgaacgataacgcctttcggcttctcaatacgcacgatttctagcacatcttccagagttaccggctcgaagtagaggcgatcggaagtgtcgtagtcggtggagacggtttccgggttacagttaaccataatggtttcgtaaccgtcttcgcgcagcgccagcgaggcgtgtacacagcagtagtcgaattcgataccctgaccgatacggttcgggccgccgccgagaaccatgattttttcacggtcggtagacggattcgcttcgcactcttcttcataagtggagtacatgtaagcggtgtcggtggcgaactctgccgcacaggtatccacgcgcttataaaccgggtgcaggtcatactggtcgcgcagcttgcggatttccgcttcgcgcacgcccgccagttttgccagacgcgcatcggcaaagcctttgcgtttcagctggcgcaggaattcagcgttcaggccagtgatgcccacttccgctactttctcttccagacgcaccagttcttcaatctgtaccaggaaccagcggtcaatattggtcaggttgaacacgccgtccacagacaggcccgcacggaaggcatcggcgatgtaccagatacgctctgcgccagcatctttcagttcgcgacggattttggttaacgcttccgggtcatcgaggctcactttcgggtcgaatccagtcgcaccgacttccaggccgcgcagcgctttttgcagggattnnnnnnnnnngctgcgtgcgaccaatcgccatcacttcgccaaccgatttcatctgagtggtcagacggtcgttagcaccagcgaatttttcgaagttgaagcgaggaattttagtaaccacatagtcgatggacggctcgaaggaggccggagtacgtccgccagtgatgtcgttcatcagttcgtcgagggtgtaacccaccgccagtttcgccgccactttagcaatcgggaaaccggtcgctttcgacgccagcgccgaagaacgggacacgcgtgggttcatttcgataacaatcaggcgaccgtttttcgggttcaccgcaaactggacattggaaccaccggtttcaacgccgatttcacgcagcaccgccatcgaggcgttacgcatgatttgatattctttgtcggtcagcgtttgggctggcgcgacagtgatggagtcaccggtatggatgcccatcgcatcaaagttttcgatagagcagacgatgatgcagttgtcgtttttatcacgcaccacttccatctcgtactctttccagccgatcagcgactcatcaatcagcagctctttggttggggagagatccagaccgcgggcgcaaatttcttcaaactcttcgcggttataagcgataccgccgccgctaccgcccatggtaaaggatgggcgaataatgcacgggaagcccacgtcagcggcaaccgccagcgcttcttccatcgtgtgtgcgataccggaacgcgcggtttccagaccaattttcttcatcgctacgtcgaaacgacggcggtcgtctgctttatcaatcgcatcggcggtcgcaccaatcatagtcacgccgaactcttccaacacgccctgacgctccagctccagcgcgcagttcagcgccgtctgaccgcccatcgttggcagcaccgcgtccgggcgctctttttcaataatcttgcgtactacttcccagtgaatcggctcgatgtaggtcgcatcggccatttccgggtcggtcatgatggtcgccgggttggagttcaccagaatgacgcggtaaccctcttcgcgcagggctttacatgcttgcgcgccagagtagtcaaactcacacgcctgaccgataacaatcgggcccgcacccagaatcaggatactttttatatctgtacgttttggcatggctcttttactcctgattacttagcggttttacggtactgctcaattaactcgataaagtggtcgaacaacggcgctgcgtcgtgtggcccagggctggcttccgggtgaccctggaagctgaacgccggtttatcagtgcgatgaatgccctgtaacgtaccgtcgaacagggatttatgcgtgacacgcaggtttgcaggtaatgttgcttcatccaccgcaaaaccgtggttctgggcggtgatcatcaccacgtttttctccacatctttaaccggatggttgccgccgtggtgaccaaatttcattttgacagtcttcgcaccgctcgccagcgccagcagctgatgaccgaggcagatgccgaataccggaatatcggtttcgaggaatttctggatggcggtaatggcgtaatcgcacggggccgggtcgccaggaccgttggagaggaagatgccgtctggattcattttcagcacatcttccgcagaagtttgcgccggaacgatggtcaggcgacagcctctatccaccagcatccgcaggatgttgcgcttggcaccaaaatcataagccacgacgtggaacggcagctcgtcttcttttttcgcttctggcaggccgccggtcaacgtccagctcccttgtgtccagctataggcttctgcggtggtcacttcttttgccagatccatgccattcagacctgggaacgcgcgggctttttctaacgccaacgccgcatccgggttatcgcctgcgataatgcagccattctgtgcgcctttctcgcgcagtaaacgcgtcagcttacgggtatcgatatcggcaatcgccacgatgttatggcgcttcaggtaagaagaaaggtcttcggtattacggaagttgctggcaatcagcggcagatcgcgaatcaccagaccttgtgcatgtacctgagaagattcttcatcggcgtcattagtgccgacattgccaatatggggataagtaagagtaacgatttgacgagaataggaaggatcagtgaggatttcttgataaccggtcattgaagtattgaaaacgacttccccaaccgccgaacctgttgcccctatggcccgaccgtgaaactgggttccgtcttccagaaccaatagcgctgacttaatcaaaacaccctccagagaatattcactcactttatttgcatattaattcacaatgatgacgtaaatcaatgcaaatctgcttaccgacgaatttctggcaaacggcggcattctggagatatgggcgctaaaagtcaacttaatggcgggattttttatattattttgtggctcatgcatgttttacaggcattaagcgacaaaaagatcatataacctgttctggaaaacgcttgcgcagcaagaagattgcatgaaataaaagcgagcagggaaaagtggaccaaatggtcaaaatttacattaaaacaacaa

SEQ ID NO: 173 - DNA, 52977 bp, Escherichia coli
  source 1..52977: mol_type = genomic DNA
ctggcgcgtgaaattggcacagcaaaacccgcttatatctgccagggctgggggccgcaacgccaggcaaacggcgaactgactgcacgcgctattgctatgttacctattttgacgggcaatgtcggcatcagcggcggaaatagtggcgcgcgtgaatcgacctataccattaccatagaacgcctgccggtgctggataatccggtcaaaacgtcaatctcctgcttcagctggacagatgctatcgatcatggtccgcaaatgacggcaatccgcgacggcgtccgcggcaaagataaactggatgtgcccattaagttcatctggaactacgcgggaaataccctcgttaatcagcattctgacatcaacaaaacgcatgaaattctgcaagacgaatcgaaatgcgaaatgattgtggtcatcgaaaactttatgacctcatcggcaaaatatgccgacattctgctgccagacctgatgaccgttgagcaggaagatattattcctaacgactacgccggtaacatgggatatctcattttcctccagccagtcaccagcgaaaaattcgaacgtaaaccgatttactggatcctgagtgaagtcgcgaaacgtcttggacctgacgtctatcaaaagttcactgaaggtcgcacgcaggaacaatggttacaacatctgtacgccaaaatgcttgccaaagatccggcgttaccgtcttacgacgaactgaaaaaaatgggtatctataagcgtaaagatcccaatggtcattttgtcgcctacaaagcatttcgtgacgcccccgaggcaaatccacttaaaacaccttccggtaagattgaaatttattccagcaagctggcggaaattgcccgtacctgggaactggaaaaagatgaagtgataagcccactgccagtttatgcctctacctttgaaggctgggactcccctgaacgtagaaccttcccacttcaactgtttggtttccattacaaatcccgtactcactcgacctacggcaatattgatctcctgaaggctgcctgccgtcaggaggtgtggatcaaccctatagatgcgcagaaacgtgggattgccaacggcgatatggtgcgggtgtttaaccatcgtggcgaagttcggctaccagccaaagtgacaccacgcattctccctggggttagcgctatgggccagggagcctggcacgaggccaatatgtctggcgataaaatcgaccatggcggctgtgtgaatacgctaaccactctgcgcccttcaccactggcgaagggaaacccgcagcacactaatctggtcgagatcgaaaaaatataacccacgacaaccataaattctggcatgacattttgtttgaaaagcaataagtgagtaatgatgaaaatccataccacagaggcgctcatgaaggctgaaatcagccgtagaagtctgatgaaaacctccgcacttggcagtcttgcgctggcaagcagtgctttcactctgccattttctcaaatggtccgggcggcagaggctccggtagaagagaaagcggtctggagttcctgcaccgttaactgcgggagccgctgtctgttacgtttgcatgtgaaagatgacaccgtgtactgggtggagtctgatacgacaggtgacgacgtctacggtaatcatcaggttcgcgcgtgtttacgcgggcgctctatccgccgacggatgaatcatcctgataggttgaaatatcccatgaagcgcgtcggcaagcgcggtgaaggtaaatttgaacggataagttgggacgaagccctggataccatcagtgataatcttcggcggatcctaaaagattacggcaatgaggctgtacatgtcctgtacggaacaggcgtagatggcggaaacatcaccaactcaaacgtcccgtaccgtctgatgaactcttgcggtggttttctcagtcgctatggcagctacagtaccgcacagatcagtgccgcaatgagttatatgttcggtgccaatgatggcaacagcccggatgatatcgccaatacgaaactggtcgttatgttcggaaataacccggcagaaacgcggatgagcggcggtggtgtcacttactacgtcgagcaagcccgcgaacgttcaaacgcacgcatgatcgtcatcgatccacgttataacgacacagctgccgggcgtgaagatgaatggctgcccattcgcccaggcaccgatggcgcactggcctgtgcgattgcctgggtactgattactgaaaacatggtcgatcagccatttctcgacaaatattgtgttggttacgatgaaaaaactctgcccgccaacgcaccacgtaacgcgcattataaagcctatattctgggcgaagggcctgacggcatagctaaaacgccggaatgggcagcaaaaatcaccagcatcccggcagaaaaaattatccagttggcacgagagatcggtnnnnnnnnnnaaacctgcttatatttgtcagggttgggggccacaacgacattccaacggcgagcaaacgtcccgcgctattgccatgctttccgttctcaccggtaacgtcggcataaacggcggcaactcaggtgtacgcgaaggtagctgggatctgggggtagaatggttcccgatgcttgagaaccctgttaaaacgcagatttccgtctttacatggacagatgccatcgaccatggtaaggaaatgaccgcgacccgtgatggtgttcgtggaaaagaaaaactggatgtccccatcaagtttttatggtgctacgccagtaacacattgatcaatcaacatggcgacatcaatcacacccatgaggtgcttcaggatgacagcaagtgcgagatgattgttggcattgaccacttcatgacggcctcggctaagtattgcgatatcctgttgcccgacctgatgccaacagagcaagaagaccttatctctcatgaatctgcagggaatatgggctatgtgatcctcgcccaacccgcaacctctgcaaaatttgaacgcaaacccatctactggatgctgagtgaagtcgccaaacgcttaggaccagacgtttatcaaacctttactgaaggtcgcagtcagcatgaatggatcaaatatctccatgcgaaaacgaaggaacgtaaccctgagatgcccgactacgaggagatgaaaacgaccgggatctttaagaaaaaatgcccggaagaacactacgtcgctttccgcgcattccgtgaagatccccaggcaaacccgttgaaaacaccttcggggaaaatcgaaatttattctgaacgactggcgaagattgcggatacctgggaattgaaaaaagatgaaattattcatccccttccagcttatacgccaggttttgatggctgggacgatcccctgcggaaaacctatccactgcagttaacgggcttccactacaaggcgcgtacccactccagctacggcaatattgatgtgttacagcaggcctgcccacaagaggtgtggatcaaccccattgatgctcaggctcgcggtatccgtcatggcgataccgtgcgggtatttaacaataatggagaaatgctgattgccgcaaaagtgactccgcgtattctgcctggcgttaccgccatcgggcaaggtgcgtggcttaaagcggatatgtttggtgaccgggtcgatcacggcggcagtatcaatattctgacctctcaccgcccttcaccgctggcaaagggaaacccgtcgcacagcaatcttgtccagatcgaaaaggtttaaagagtagcccatgaccacacaatatggattttttatcgattccagccgctgtactggctgtaaaacctgcgaactggcgtgcaaagattttaaagatcttggcccggaagtcagtttccgccgtatttatgaatatgctggcggcgactggcaggaagataatggcgtctggcaccagaacgtgttcgcttattatctctccatctcctgtaaccattgcgatgacccagcatgtacaaaagtctgccccagcggcgcaatgcataagcgtgaagatggctttgtggtggttgatgaagatgtttgtatcggctgccgctactgccacatggcttgtccgtacggcgcaccacagtacaatgctgaaaaagggcacatgacgaagtgcgatggttgttattcgcgcgtcgccgaggggaaacaacccatatgcgtcgaatcctgcccgctgcgtgcacttgagttcggtccaattgaagagctgcgccagaagcacggcactctggctgccgtcgcgccactgccgcgcgcgcatttcacaaaacccaatatcgttatcaaacctaacgccaacagccgcccgaccggcgataccactggttatctggctaatccggaggaagtgtaaaatgggaaatggatggcatgaatggccactggttatctttaccgtattgggtcaatgcgtagtaggcgcgctgattgttagcggaattggctggttcgccgccaaaaatgacgcagaccgtcagcgtattgtccgtggcatgtttttcctctggctgttgatgggcatcgggtttattgcctctgtcatgcacctgggatcgccactgcgagcgtttaactcgctgaatcgaatcggagcttctggtctgagtaacgagattgctgccggttccatattttttgccgttggcggactatggtggctggtggcggtcatcggtaaaatgccgcaagcgttggggaaactctggttacttgtcagcatggcgctcggcgtcattttcgtctggatgatgacctgcgtgtatcaaatcgacaccgtgccaacctggcataacggttacactacgctggctttcttcctgacggtattgttgagcggtccaatacttgctgccgcaattctgcgggcagctcgcgttacatttaataccacaccatttgccatcattagcgttctggcgctgatcgcttgtgccggggtgattgtgctgcaaggtttgtctctggcgtgtattcactcatccgtacaacaagccagcgcactggtaccagattacgcctccttacaggtctggcgtgtggtattgttatgcgcaggtctaggatgctgggtttgtccgctcattcgtcgccgtgaacctcacgttgccggacttattctggggttaatcctcattcttggcggtgagatgatcgggcgtgtgcccttttatggcctgcacatgacggtaggaatggctattgcaggttaacaaattggtgcggggcaacccgcacatttcaggatgttaggaatgacccatttttcacagcaagataatttttctgtcgcggcgcgcgtgttgggcgcgctgttttattacgctccagagagtgcggaagccgcacctctggttgcggtactcaccagtgacggctgggaaactcagtggcctctaccagaagcgtcattagcgccgctggtgacggcttttcagacacagtgtgaagagactcacgcccaggcctggcagcgtttgtttgtcggcccgtgggcactgccgtctccgccgtgggggtcggtctggctggatcgcgaatctgtgctgtttggcgattcaacattggcacttcgtcagtggatgcgcgagaaaggcattcagtttgaaatgaagcaaaacgaaccggaagatcattttggttcactgctgttgatggctgcgtggttggcggagaatggtcgccagacagaatgcgaagaattgctggcatggcacctttttccgtggtcaacacgttttcttgatgtttttatcgaaaaagcagaacaccctttctaccgtgcactgggtgaactggctcgcttaacgctggcgcaatggcaatcacaactgttgattcctgtcgcggttaaaccgctgtttcgataggatcaccgtaatattgccggatggtgacgattacgcgcaatccggcaataataggttacagtgtcacgtttttttatctcttaaagcacgcactgcttttgcggctggcctcttttgtcgcaaaatagtcgcccgtgtttcattgcccatttctgctcatgcatcatctacacatctatccggatctgcgcactatgttccgccgtctgcttatcgcaacagtcgtcggtattctcgcggcctttgccgttgccgggtttcatcatgcgatgctgctactggagtggttgttcctcaataatgactccggcagtctggtcaatgcagcgacaaacctttccccctggcgacggctgctaactccggcgctcggcggactggcggcgggtttgttgctgatgggctggcagaaatttacccaacaacgccctcatgcgccgaccgattacatggaagcgttgcaaaccgatggacagttcgattacgcagcaagcctggttaaatcgcttgcctcgctgctggtagtaaccagcggcagtgcaattggtcgcgaaggtgcgatgattcttttagctgcccttgccgcctcctgttttgcccaacgttttacgccacgccaggagtggaaattatggatcgcctgtggggccgcggcgggaatggctgcggcctatcgtgccccgcttgctggcagtttatttatagccgaagtgctgtttggcactatgatgttggcctctctcggcccggtgattatttccgccgtcgtggcattgctggttagcaatctgattaatcatagcgacgcgttactctacaacgtacaactctcagtgacggttcaggctcgtgactatgagctgattatcagtacaggtgtgctggcaggtctgtgcggaccactgttgttaacgttaatgaacgcctgtcatcgtggatttgtgggtctcaaacttgcgccgccctggcaactggcactaggcgggttgatcgtgggtctgctttccctgttcacacctgcagtgtggggcaacggctatagcaccgtacaatcctttttaaccgccccgccactgttaatgatcattgccgggatcttcctttgtaaactgtgtgccgtgctggcgagtagcggttccggcgcacccggtggtgtctttacaccgacgctatttatcggtcttgccattggcatgttgtatggtcgtagcctgggattatggttccctgatggcgaagaaattacgcttttactcggattgaccgggatggcgacactgttggcggcaaccacgcacgcgccgattatgtcgacgttgatgatatgtgaaatgaccggggagtatcagctactccccggtttattgattgcctgcgtaattgcgtcggtaatctcgcggacgttacaccgtgactctatctaccgccagcacactgcgcagcatagctaagcggatgtattgccccagttcacgctgttcggcgcgcggcagataaggcagttcaccaatgagcggtgccggaagttttttaccgagcacatcaatgatttccgcataatgcgccagtcctgggttgattcggttagccacccagccaatgagcggcagcccgtcgttggcaatcgcctgagctgttagcagtgcatggttaatgcaaccttcctgaataccgacaaccatcaacaccggcagttgttcctgcaccacccattcagagagtggacgcaaatcattcatcagactgcgccagccgccagtcccttctaccacgacatgatcgactttttcggtcaggtttgccaggccgtttgaaatgagggtgtaattgattgggcaactgtgcgccacgctactttcttcttcgcttaacgcgataggattaactgcttcataaggcagttcgatggttgaaacactctgcaacaccagggcatctttattacgcagcccttcgggtgtctctttgctccccttcgctacgggtttatatcccgcaaccgtttttccctgggaggctaacgcttgtagcaatgcgcgggaaaccaccgttttccctacagaagtgtctgtaccggtaataaagaaacgcttcagcatcactaactccaccgttatgcttcacaaatataaaccaggaaaataattaaccttgaaagtctaagttatgctttcctggcccaaattgagatagcgcaaattttggtagaacagttaaaaaatgttaaccctgcaacagacgaatcaacaaagaaccgttatacatcgcgtcttttaccagcgcagcgcctgccatcgtgccctggttagaaaactgagtactctcaacgctaatgtgctgactatacgcaggaagggcctgctgacggatgctgtctgagatgaccgggaagaggatatctgccgctttacttaacggtgagccaatcagtattttttgtgggttaaataaattcaccatgatggcaagaatgcgccccacatgcgcgcccaccccggtaatgatgtcttttgccagcagatcgccgcgcaatgccgcctgacacaatgagtccacggttaacggttgcccatgtaacatcgagctcatggattgattgagacgcagctgtgccagctcaagtatactgtccacactggcgatggtttcgaggcagccgtgattcccgcaataacaacgtttcccatacgggtcgacctgtgtgtggcctatttccacgaggctactgctgcctgcgtgtagcagatgaccatcggtaatgacgcccgcccccacgttgtgatcgataaccacctgaatcacatcgcgcgccccgcgtgaggcaccaaacaaggcctctgccatcgtccatgcgctgatatcatgctgaatataaaccggaacgccggtatgctgctccagagcctcgccgagcggcatctcttttacatcctcgtagaacggcatgcgatgtacaatgccattttccgtatcaataattcccggcagggttatggcaatcgaagttagacgctcaagttttttctggtggcggataaaaaactgatcgatatgggaaatgatacgatccagcaatggcgagtcatcttttaacgccagttcctgcgactcttccaccaccagtttgctgctcagatcgcgcagagcaaggaaaatctccccgcgactaatgcgcagagaaagatagtgccaggcttcagtttcaaccaccagccccaccgccggacggccacggttccccgcttctttgatttccagctcttgcaccaggtgtgcttcgagcatctcacggacaattttagtgatactggcaggagccagttgcgccagacgggaaagatcgatacgcgagactggaccaagctgatcaatcaggcgataaaccgcgcccgcgttggtctgctttatttgatcaatgtgcccaggctggttttcagcaaccaccgcatactccctatattttcgcgctccgaaataatctgtaggctatggtgaagcacttcaatacgtgtcgtcaaatttttacttaggcatgtgattaacagcacatttttcgggctttttcgctgaaatttccctcacctgagagcattcagcagatgaatacgaaagttacgcgcagctggactttgttcatgatgtttcggccagaccaaccacatttcagaaaccgcatcctcttctgcaatcggcacccagcgcatttcgttgagctgaacacgtttaaatgaagcaggcaaaattgaaacacccagaccggcggaaaccagaccgatgatggtcattgcctcgcccacctcctgagtgatgacgggcgtcaaatggtaacgtcgcatcagcccgagaatatcgtcatacagccctgtcccgacgtgcggatcaaaaaagacgaagggttctttcgccagttcagccagcgttacattcgggttatttgccaggggatgatcgtgcgggatcatcgccataagcggttcatggacgatgactgcgtgttcaagcgtctccggtaacgctgtgttacgcagcaatcccatatccagcgttccttcaatgagcggagcgatttgctcacgagtgttcatttcgcgggtttgtaaatggacatcgggataatcacggcgaaacagcgataacgtatcggacaccgcccgaataaaaggagcggacgaagtaaaaccaatgcgcaactcccccgcttccccctgatgcagtctttcagcgcgagcggcagcgtcatctaccatagacaggatttgccgactatctgcaagaaactgttttcctgctgccgtcagcaatacactgcgattagttcgtgccagcagtcgggcaccaatttgttgctccagtgcctgaatctgctgacttagcggtggttgcgaaatattcaggcgggcagcggcgcgcccgaaatgcagctcttccgcaacagcaacaaagtaacgcagatgacgaagttcaatattcatatttaaaacatcttatttgagattattaatatattagacagaacaattcgattttcctaacctatgtataagcctgatccacaggcatatttagcaaggatttcaagtgagccgtactacaactgttgatggcgctccggcaagcgacactgacaagcaaagcatttctcagccaaatcaatttattaaacgcggtacgccgcaatttatgcgcgtcaccctggcgctgttctctgccggactggcaacatttgcacttctctattgtgtgcagcctatccttccggtgctttcgcaggagtttggcttaacgcccgcgaacagtagtatttcactgtccatttccacggcgatgttggctattggtttgctgtttactggccccctatccgatgccattggtcgcaaaccagtgatggccacggcgctactgttggcctccatttgtacgttactttcgacaatgatgaccagctggcacggcattttgattatgcgcgccttgattgggctttcgttaagtggcgtggcagctgttggcatgacttatcttagcgaggaaatccaccccagtttcgtggccttttcgatggggttgtatatcagcggcaactcaattggcggcatgagcggacgcttaattagtggtgtcttcacggactttttcaactggcgaattgctctggcggcaatcggttgtttcgcgctggcctcggcgttgatgttctggaaaatccttccggaatcacgccattttcgcccgacttcgctgcgccctaagacgttatttatcaactttcgtctgcactggcgtgaccggggattaccgttattgttcgcagaaggctttttgctgatggggtcgttcgtcacgctgtttaattacatcggctatcggttgatgctttccccctggcatgtcagtcaggccgtggttggcttattatcgctggcttatttgaccggtacatggagctcacctaaagccggaaccatgaccacccgctacgggcgcggtccggtgatgttgttttcgacgggggttatgctgtttggtttactgatgaccttattcagctcgctgtggctgatctttgccggaatgttactcttctcagcaggattcttcgcagcccactcagttgccagcagctggattggcccccgcgcaaaacgcgctaaaggccaggcctcctcgctgtatctgttcagttactatctggggtcgagtattgccgggacgctgggtggtgttttctggcataactatggctggaacggcgtcggcgcatttattgctctgatgctggtcattgctctgctggtcgggacgcgtttgcatcgtcgtctgcacgcctgaaaaataagcccggactgcggtaactacacgtccggacttattgcttgctcaaaccaacgttaatagccatcctaaaatagacgaagcgccagccaattcccgcagcgcgtctagcgtcatcaggattataagtacccaaataaacggattcattttgctgtgtgtcatttattactgatgcgcagttattctaccgctttgtaagtagtaaaatagttaacccgatcaagactactattattggtagctaaatttcccttaagtcacaatacgttattatcaacgctgtaatttattcagcgtttgtacatatcgttacacgctgaaaccaaccactcacggaagtctgccatttccagggatatagttatttcaacggccccgcagtggggttaaatgaaaaaacaaattgagggtatgacaatgaaaaaagtattagctctggttgttgccgctgctatgggtctgtcttctgccgcctttgctgcagagactgcgaccacacctgctccgactgcgacgaccaccaaagcagcgccggcgaaaacgacacatcataaaaaacagcataaagcagcacctgcccagaaagcgcaggcggctaaaaagcatcataaaaatacgaaagctgaacagaaagcccctgaacaaaaagcgcaggcagcgaagaaacacgccgggaaacacagccatcagcaaccggcaaaacctgctgcacaacccgcagcgtaagttttcaacagtaatgctggcgcgccccctcgcgcctgaaaattacggtgctaagcgggtaacgtttagcaccgcctttagcggagggtagtatggtgggccgttatcgctttgagttcattcttatcatccttattttatgcgcactgattgccgcccgtttttatctttcctgactgtagttatctgattttactcccactttcatcccgtcccgtctatagtatttatgagggtttgcttttaataatcataattacccaccagagtgtgatatgcgtacaaccattgctgtagtgttgggtgcaattagtttgacgtctgcttttgtgtttgcagataaaccagacgttgccaaatcggcaaacgatgaggtcagcaccctgttttttggtcatgatgatcgtgtgccagtgaatgacacgacccaatcaccgtgggatgcggttgggcaactggaaacggccagcggcaatttatgtacggcgacgctgattgcacccaatctggcattaacggcaggacactgtttattgacgccgcctaagggtaaagcggataaggcggtagcgctgcgttttgtgtcaaataaaggtctttggcgctatgacatccacgacatagaaggccgcgttgatccgacactgggaaagcggttaaaagcagatggggatggttggattgttcctcccgcagctgcaccatgggacttcggcttgattgtgctgcgtaatcccccttctggcattacaccgttgccgttatttgagggagataaagccgcgcttactgccgcattaaaatcggctggtcgtaaagtgactcaggcgggatatcctgaagatcatctcgatacgttatacagtcatcaaaactgtgaagtgactggctgggcgcaaacgtcggtgatgtcacatcagtgcgataccttgccgggtgacagcggttcgcctctgatgttgcataccgatgacggctggcaattaattggggtgcaaagttcggctcctgccgcgaaagatcgctggcgcgccgataaccgggccatttctgttaccggttttcgcgacaagctggatcaactgtcgcaaaaataatgttcaaacgctgcccgacagtgcgggcagcgtgttcatcaggcaagtttcaccatgatcattccagccaacagcaagaccaggccaatccagcctttacgatttaaccgttgaccaaacaagatccaacctgcggctaacgtggcggcaataccaaacccgccccacaatgcataagcgacagacaagtcgatcccttttacggcctgagaaagcgcactaaaggcagccagcaccgccgccagggagagcaagccaaatattttgcgacgaaagccgtcagaaaatttcaaaaagacgttagcaacgatttccagcacgattgccaatgccagccaggcggcgtgaacccattcaaactgcgccatggttcacctccagttcaggtttacgcgctttacgggtacctgatttgatcaacacaatcccggcgaccagggtggttaacccgacaattttcatcagcgataaactttcgtcgaataacaaaacgctaaacaaggtaataaataaaataccgataccttcccacagcgcataagctacgcctaaggcgatctttttaacggcgaaagagagaaatatatacgacagagaaatcatcaccagcattaaaataaagccgccatttccctcactgacgctcgcccatttcattgacagcgtaccggtaatttctgtagcaatagccaggcctaataaaatccaataaatatacattgtccttctcctgcaagagaattattttaattttcgcttaattcagcgaaaccaaagtaaagtggtcaagccccgcgcatagggcaagcttaggcagaagaaaggactaaagcgcgttgcgccagtgctgctcacctacgagcaagatagtggatgaggtacgaagatgggtaaatgttgaaaataacgtcctgaacaaattgtccataatattacaattatccgcagtgttgcttctcgtcatcgcggatgataattgtcctcggtagttgaacacgcctgatttgtatcatagcttaagaattaactcaaaatattttcacttctttacctgagcggtttgattttcgttatgatgacggagcgaaaaagacattattattagcaaaggaagaaaaaacggggacaagcatggcaaagccgatcatcacgctcaatggcctaaaaatcgtcattatgttgggaatgctggtcattattctctgcggtatccgttttgccgccgagatcatcgtgccgtttattctcgcattatttattgctgttattcttaacccgctggtgcaacacatggtccgctggcgagtgccgcgtgtactggcggtgtcgattttgatgaccatcatcgtgatggcgatggtgttgctgttagcttatctgggttccgcgctcaacgagttgacgcggacgttaccgcaatatcgcaactctattatgacgccgctgcaagctcttgagccgttgttgcaacgcgtagggattgacgtctcagttgaccaactggcgcattacattgatccgaacgcggcgatgacgttgctcaccaacttattgacgcagttatctaatgccatgtcatcaatatttttattgctgctgacggtgctgtttatgctgctcgaagtgccacaattgcccggaaaatttcagcaaatgatggcgcgtccggttgaagggatggcggcgattcaacgtgcgattgacagtgtttctcattatctggtgctgaaaacagccatcagcatcatcaccggcctggtcgcctgggcgatgctcgccgcactcgatgttcgcttcgcttttgtctggggattgctggcctttgcgcttaattacatccctaatattggttcagttctcgcggcaatcccccctatcgctcaggtactggtgtttaatggcttctacgaagcgttgctggtgctggcgggatatctgctgattaatctggtcttcggcaatattctggagccgcgcatcatgggacgtgggctggggctttcgacattggtggtatttttgtcgttgattttttggggatggttgttaggaccggtgggtatgctgctttccgtgccgttgacaattattgtcaaaattgcgcttgaacaaacagcgggaggtcaaagcatcgccgttctgttaagcgatctcaataaagagtgacggcctccgcagaggccgtcagggttacagagctttcaggattgcatccacgctggctttggcgtcaccaaacagcatgtgggtgttttccttgaagaacagcgggttttgcacaccagcatagccagtgttcatcgaacgtttaaagacaatcacgttctgcgctttccacacttccagcacaggcataccagcaataggactcttcggatcatcctgcgccgccgggttaaccgtatcgttagcaccaatcaccagtacggtatcggtatcagcaaagtcatcgttgatctcgtccatttccagcacgatgtcatacggtacttttgcttcagccagcaatacgttcatatgtccaggcaaacgccccgcaaccgggtggataccgaaacgcacattaataccacgagcgcgcaatttctcagtaatttcagcgacaggatattgcgcctgcgcaactgccatgccgtaccccggagtaatgatcactgaatgggagtttttcagcagttccgctgtctcttctgcagtgatttcgcggtgctcgcccacttcctgatcatcaccagtagaagagccgtcggtgccgaaaccacccgcaataacgctgataaaggaacggttcatcgccttacacataatgtaagaaaggatagcccccgaagaaccgaccagcgcaccggtcacaatcagcaggtcgttgctgagcataaagcccgcagccgcagccgcccagccggagtacgagttcagcatcgacaccaccactggcatatctgcaccaccgatggaggcgactaaatgccagccgaataccagcgcaatggcggtcattatcagcaatgccagcacttgcaggccgacgctatccgtgcgaacaaatacaatcagcagcaggaaggaaacgaccagagccgccaggttcattttgtgacggtttggcagcatcaacggtttagacgaaatcttgccacacagtttgccgaacgccaccaccgaacccgtgaacgttaccgccccgatgaagataccgaggaacacttccgtcaggtgaatattgaccagaatcggtgccattcccgcgtcatgatgcagatagctgttaaagccaaccagcactgccgccagacccacgaagctatgcaggatcgccaccagttctggcatttcggtcatttcaactttcttcgccagacggataccaattgccccaccaatgaccatcgccagcaagatccagccaacattacccgtatccggtccaaaaatggttgcgattaacgcaatcgccatcccggcgataccgaagttgttaccctggcgagacgtttcatgtttcgaaagaccggccagactgaagataaacaggatcgcggcaacaatgtatgcagctgtaactaatcctccagacatatgttaccccttaatttttgcggaacattttcagcatgcgctgagtcacggtgaagccaccgaaaatattaatgctggctataagcaccgcgataaaactaaggaagctaacccagccgccctggccaatctgcaacagtgctccgacaacaataatccctgaaatcgcgttggtgaccgacatcaacggtgtatgcagcgcatgcgatacattccacaccacgtaataaccgacaacgcaggccagcgcgaaaacggtgaagtgcccaagaaactctttcggcgcaacgcttgccagccaaccgaaaaggatgattgccagcgccatcaatgcgtatttacgccacggtgagcaggcacatttttcctcagttttcacttccggtgccgctttttgtgccgcctgcggctgagctgatacctgaatcggcggtgccggccaggtaatttcgcccgcacggatcacggtcacgccgcgaatcaccacatcatcaaaatcaacagtgatattgccgtctttctctttgcacaacagtttcagcagattaacgaggttagtaccgtaaagctgtgaggattgcgtcggcagacggcccggaagatcggtataaccaatcactttgacaccattttccgtagtgaagatttcacccggcacggtgtatgcacagttgccgccgttttgggctgccaggtcgacaatcacactgcccgccttcatggagtcaaccatttcacgggtaattagcttcggcgctggtttgcctggaataagcgcggtggtgacaatgatatcgacctcttttgcctgggcggcaaagagttccatttccgctttgatgaacgcgtccgacatcactttggcatagccatcgccgctgcccgcttcctctttaaaatccagctcgaggaattccgcgcccatactttgaacttgttctttcacttccgggcgggtgtcgaatgcacgcacaatcgcgccgagactgtttgctgcgccaatggcggccagacctgcaacacccgcaccaatcaccatcacttttgccggtggcactttcccggccgcagtaatttgcccggtaaagaagcgcccaaattcatgtgccgcttcaacaatggcgcgataaccggcgatgttcgccatcgagcttagtgcgtccagcgattgtgcgcgtgagatacgcggcacagagtccatcgccatcacggtcacgttacgttccgcaagtttttgcattaattccggattctgcgcaggccagataaaactcaccagcgttgtcccaggattcagtaacgcaatttcatcatctaacggcgcattgaccttcagaatgatctctgactgccagacgctattcccttctacaatttcagcgcccgcttgcacaaacgctttatcgtcaaaacttgccagttgacccgcgccgctctctaccgcgacggtaaaacccagtttcagcagctgttccactgtttttggcgttgctgcaacacgggtttcattggttaaccgttctcttggtatgccaattcgcatgatattcccttccatcggttttattgatgatggtttgcctgtgtcaggagccacacaagccgctcatgtacgagctaaatgttactccgttaaaataaattagtaacaaacgccctataacgtactgaaaattatgcctgtgatctagcgccaaaaatcagtatttcggcgtgaactcgcaaaatattaacgattcagccgtgatagtgggataaacaccttagaacgccggataaagactgataattgtcttcgatggtcgggtaaaacgagacatcgccccggcacgcatcactacttaacattaaattaacttatacaattcagttgcttcagtagtaatgatgctgatacggctgttttttaagcatagacggtcatttgagcaggattaaaattggcttaaggaatgtgatatgaaaaatgacgcagacagttacaccgtttaaatgcaataatcagccacgtttctcgttaataacaataccagtacttggtttgcgcaaggcgaaggattatttttatgaagcttaagaacaccctcctggcgtcggcactgctttctgctacggcattctccgttaacgcagcaacagaactgacaccggagcaagcggcagcggttaaaccttttgaccgtgtagtggttaccggtcgttttaatgctattggcgaagcggtgaaagccgtttctcgtcgcgcagataaagaaggtgccgcctctttttatgttgtcgacacttctgattttggtaacagcggtaactggcgtgtggtcgctgacctctataaagccgatgctgaaaaagcagaagaaacaagtaatcgcgtaattaacggtgttgtcgaactgccgaaagatcaggctgttctgattgaaccgtttgacacggtcaccgtccagggcttctatcgtagccagccagaagtcaatgatgccatcaccaaagcagcaaaagcgaaaggtgcctactctttctacatcgttcgtcaaatcgatgccaaccagggcggcaaccagcgtattactgcattcatctataaaaaagatgctaagaaacgtatcgtccagagcccggatgtgatcccggcagattccgaagcaggacgtgcagctctggctgccggtggcgaagccgcgaagaaagttgagatcccgggtgttgcgactaccgcatcaccaagttctgaagtcggtcgcttctttgaaacccagtcatcaaaaggcgggcgttacaccgtcacgctcccggatggcactaaagtcgaagaactgaacaaagcgaccgcagcgatgatggtcccgttcgacagcatcaaattctctggcaactacggcaacatgaccgaagtctcctatcaggttgcgaaacgtgccgcgaagaaaggtgctaagtattaccacatcacccgccagtggcaggaacgtggtaataacctgaccgtcagcgnnnnnnnnnnataactattcagttactcctataaggcggcttgatgccgcctttcgcatttttagtcacaaatttccccgcgaccattgcatgcagacacatctcttcgtaaaatcccgcgcttcagtggcaaactccatttttatgcgttttgccctaatatttattcttcttatcacgttttaatcactggatatcgatggaaaagaaactgggactgagcgcactcaccgcgctggtattaagctcaatgctgggcgcgggtgttttcagtctgccgcaaaatatggcggcagttgccagcccggcagcactgctcatcggctggggtattactggcgctggcattttattgctggcctttgccatgctgatcctcacgcgcattcgtcccgaacttgacggcggtatctttacctatgcccgcgaagggtttggcgagctaatcggcttttgttccgcatggggatactggctgtgcgcagtcatcgccaacgtctcctatctggtgatcgttttttccgcgttaagcttttttacggacacgccggaattgcgcctgttcggcgatggtaatacctggcaatcgatagtcggtgcatcggctttattgtggattgttcactttttgatcctgcgcggggtgcaaaccgctgccagcattaacctggtggcgacactggcaaaattgttgccgctgggtctgtttgttgtgctggcgatgatgatgttcaaactggataccttcaagctcgacttcaccggacttgcacttggcgtacccgtgtgggaacaagtgaaaaacaccatgctgatcaccctgtgggttttcattggtgtggaaggtgccgtggttgtttctgcgcgtgcgcgtaataaacgtgatgttggcaaagcgacactgctggcggttctctccgctctgggcgtttacttgctggtaacgctgctttcgctgggcgtggtggcacgtcctgaactggctgaaattcgtaacccgtcaatggccggtctgatggtggaaatgatgggaccatggggcgaaatcatcatcgctgccggtttgatcgtttccgtttgcggcgcgtacttaagctggaccatcatggcggcagaagttccgttcctggctgccactcataaagcattcccacgcatttttgcgcgccagaacgcacaagctgcgccatccgcctcgctgtggttgaccaacatctgcgtgcaaatttgtctggtactcatctggctgaccggttccgattacaacacgttgctgaccatcgcctcagaaatgattctggtgccctatttcctggtcggcgcgttcttgctgaaaatcgcaccccgtccactgcataaagcggtaggtgtcggtgcctgcatttatggcttatggttattgtatgcctctggtccaatgcacttgttgttatccgttgttctgtatgcgccggggctgctggttttcctgtatgcgcgtaaaacgcatacacatgataacgtactgaaccgccaggaaatggtgctaattggcatgctgttaattgcctcagttccggcgacctggatgctggtgggataacgttcatcccatcgttggttagcaaaggagataacgatgggtaaagcccagcccttgccaatattaattactggcggtggtcgtcgcatcggcctcgccctcgcatggcatttcattaatcaaaagcaaccggtgattgtcagctatcggacacactatccagccattgatggactgattaatgcaggtgcgcagtgtattcaggctgatttttcgaccaacgacggtgtgatggcgtttgccgatgaagtactaaaaagcacccatggtctgcgtgctattttgcataacgccagtgcgtggatggcggaaaaaccgggtgcgccactggccgacgtactggcttgcatgatgcagatccacgttaataccccatacctgctcaaccatgcgctggaaagattactgcgtgggcacggacacgccgccagcgatatcattcactttaccgattatgtggtggagcgcggtagcgacaaacatgttgcgtatgctgcaagcaaagcggcactggataatatgacccgctcgtttgcccgcaagctggcaccggaagtgaaagtgaattctattgcgccatcgctgatcctgtttaatgaacatgatgatgccgaatatcgacaacaggcgctgaataaatcactgatgaaaaccgcgcctggcgagaaagaagtgatcgacctggtcgattacttacttaccagttgctttgtcaccggacgcagtttcccacttgatggcggtcgtcatctgcgttaatgcagctttatccagcatataatcaacacccatgcgcttatcccccaacacgcaacagaaccaacaaaagcggcgggcaagcgcatcattccggtgaaataccacagcgacaccaggtaaacaaaatagggaataatcgaccacatactaaaaatgatggttgcgcgtaaggcttcaatgccgcgttcgctggcaacaatataatgcgcgataagcgcaaaggtcgggaaaagtggaatcagcccggcgatataataatttttcgtttttgctaaaacaccaatcaacagcactaccagcgcaccgagcgcggctttgattaccagccccatttttttaccttaacacttccataacaagtcatcagtagaatacctgatgaaaacttgtttagaaacgattgatagtaagtaaaaacagcgcggtgtattgtgacgtttttatatctaccgtgaataatatgaacactatcgtatttgtggaagatgatgcggaagtcggttcactgattgccgcgtacctggcaaaacatgatatgcaggttaccgtagagccgcgcggcgaccaggccgaagaaaccattttgcgagaaaatccggatttggtgttactcgacatcatgctaccaggcaaggacggcatgaccatttgtcgtgatttacgcgcaaagtggtctggaccgattgttcttctaacctctctcgatagcgatatgaaccacatcctggcactggaaatgggtgcctgcgactatattctcaaaacgacgccccctgctgttttgctagcgcgtttacgtttgcatttgcgtcagaatgagcaagccacactgaccaaaggtcttcaggaaacgtctctgactccctacaaagccctgcatttcggcacgttgaccatcgatcccatcaaccgcgtagtcaccctggctaacactgaaatctcgctctcgacagctgatttcgaattattgtgggaattagctacccatgccgggcaaatcatggaccgcgatgcattgctgaaaaatttacgcggcgtcagttatgacggactggatcgtagcgtggacgtggctatttcgcggttaagaaaaaaactgctcgataacgccgcagaaccttatcgcattaaaactgtgcgtaacaaaggctatctttttgcgcctcatgcatgggaataagcgatgaaaaaactgtttatccagttttacctgttattgtttgtctgcttccttgtgatgtctctgctggttgggctggtgtacaaatttaccgccgaacgcgcgggcaaacagtcgctggatgatttgatgaacagttcgctgtatctgatgcgtagcgaattgcgtgagatccccccacacgattggggtaagacgctgaaggagatggatttaaatctctctttcgatctgcgtgtcgagccactgagtaaataccatcttgatgatatttccatgcaccgactgcgtggcggcgaaattgtcgccctggacgatcagtacacgtttttgcagcgtatcccgcgcagccactacgtgctggcagttggtcctgttccttatctttattatctccatcagatgcgattgctggatatcgccctgatcgcttttattgctatttccctcgcctttccggtgtttatctggatgcgtccgcactggcaggatatgttaaaactggaagcagcggcgcaacgatttggcgatgggcatctcaatgagcgtatccactttgatgagggttcgagctttgaacgacttggtatcgcatttaaccagatggcggacaatatcaacgccttgattgccagcaaaaaacagcttattgacggtatcgctcacgaactgcgaacaccgttagtgcgcctgcgttatcgactggagatgagcgataacctgagcgccgccgaatcccaggcgttgaatcgtgatatcagtcaacttgaagctttaattgaagagctgctgacttatgcccgactcgatcgcccacaaaacgagcttcatcttagcgaaccagacctgccgttgtggctgtcaacgcatctggcagatattcaggcagtaacgcccgataaaacggtacggataaaaacgctcgtgcaaggccattatgcggcgttggatatgcgcttaatggagcgcgtgctggataatttgctcaataacgccctgcggtactgccattcaacggttgaaaccagcctgctactgtcggggaatagagcgacattaattgttgaggatgatggcccagggattgccccagaaaaccgcgaacatatctttgaaccttttgttcgcctcgatcccagccgggatcgctcaaccggcggctgcgggctggggctggcaattgtccactctatagcactggcaatgggcggtacggttaattgtgacaccagcgaactgggtggtgctcgcttctcgtttagctggccgttatggcataacatcccgcaatttacctctgcctgacactacgcgcacgatggtcaagtcaccaccattgtgctataaattaaggatgttgtaactaaagtggttaatattatggcgcgttacgatctcgtagaccgactcaacactacctttcgccagatggaacaagagctggctgcatttgccgctcatcttgagcaacacaagctattggttgcccgcgtgttctctttgccggaggtaaaaaaagaggatgagcataatccgcttaatcgtattgaggtaaaacaacatctcggcaacgacgcgcagtcgctggcgttgcgtcatttccgccatttatttattcaacaacagtccgaaaatcgcagcagcaaggccgctgtccgtctgcctggcgtgttgtgttaccaggtcgataacctttcgcaagcagcgttggtcagtcatattcagcacatcaataaactcaagaccacgttcgagcatatcgtcacggttgaatcagaactccccaccgcggcacgttttgaatgggtgcatcgtcatttgccggggctgatcacccttaatgcttaccgcacgctcaccgttctgcacgaccccgccactttacgctttggttgggctaataaacatatcattaagaatttgcatcgtgatgaagtcctggcacagctggaaaaaagcctgaaatcaccacgcagtgtcgcaccgtggacgcgcgaggagtggcaaagaaaactggagcgagagtatcaggatatcgctgccctgccacagaacgcgaagttaaaaatcaaacgtccggtgaaggtgcagccgattgcccgcgtctggtacaaaggagatcaaaaacaagtgcaacacgcctgccctacaccgctgattgcactgattaatcgggataatggtgcgggcgtgccagacgttggtgagttgttaaattacgatgccgacaatgtgcagcaccgttataaaccacaggcgcagccgcttcgtttgatcattccacggctgcacctgtatgttgcagattaacgcccggctttcatactgccgaccatctgttctggccgtacccagctgtcaaactcggcttcgctaagataccccagcgcaagggccgcagcttttaaggtcagcccttctttatgcgcttttttggcgatctccgcggctttgtcataaccaatgtgggtgttaagcgcagtcaccagcatcagcgattcattgagtaattgattgattcgctcacgattcggttcaatacccactgcgcagtgtttgttaaaactttccatgccatctgccagcaagcgcaccgattgcaggaaattatggatcaccatcggacggaagacgttcagttcaaagttaccggaagcgccacccatgttgatcgccacgtcgttccccattacctgacagcagagcatggttaatgcttcacactgggttgggttcactttccccggcatgattgagctgcccggctcattttccgggattgagatttcaccaattccgcagcgcgggccagaggccagccagcggacatcattggcgattttcatcagtgacgcagccaaccctttcaacgcgccgtgcgcctgaaccagggcatcacaggtcgcaagcgcttcaaatttgttcggcgcggtaacaaacggtgcacaggtaatgactgccagttcatctgctacgcgacgcgcatactccggatgggtatttagtccagtacccaccgctgtaccgccaagagccagttccgctacgtgaggcaggctgtattcgatatgtttgagattatgctcgagcatcgctacccagccggaaatctcctgccctagtgttagcggcgtggcgtcctgcaagtgggttcgaccgattttgacgatatcggcaaatgcacgcgatttttcactcagtgtctgtgtcagggttttaagctgcggaatgagttgcttgcgcagcgccagcagcgccgcaacgtgcatcgccgtcggaaagacatcgttggaactttggcttttgttcacgtcgtcgttagggtgaactttacgttccatcccgcgcacgccgccgagtaattcactggcccggttagccagcacttcgttcatgttcatgttactttgcgtgccggagccggtctgccagatagccagcgggaattcgtcgtcatgctgtcctgccagtacttcatccgccgcctgccgaatggcgctcgctttctcttcagacaacaagcctaaatcttcattaacttttgccgctgcgcgcttggttagcgccagcgcatgaatcagtgaggtgggcattttctccgtcgaaatgcggaaatgctccagcgagcgttgagtttgtgcgccccacagcttatctgccgggacatcaatcgcccccatcgaatctttttcgctgcgtactgtattcatggcctgctcctcacctgtttaattttttctttctgttttgctttcgttaagcaacttttagctcactcattatttactatttgataacaaatgtttggtctttcgtgccatgtaaaaaaaccgccccgaagggcggctctgtttatttcacacagcgggtgcattgtgtgagttgtatctgctggaagaagtcatttcctttatcatccacaaggataaacgccgggaaatcttccacttcaattttccagatggcttccattcccagttccggatattcaacacattccaggctcttaatacttccctgcgccaatacagcggccggaccaccgatactgccgaggtagaagccgccgtgttttttacaggcatccgtcacctgctggctgcggttgcctttcgccagcatgatcatacttccgccctgcgcttgcagttgatcgacataagaatccatccgtccggcggtcgttgggccaagagaaccggaagcataaccttccggcgttttggccggacccgcgtagtaaatcggatgatctttaatgtactgcggcagcccttcaccattatccatccgctctttcagtttggcgtgagcaatatcacgaccgacgataatcgtgccgttaagcgataagcgtgtagaaacgggatactgcgacaactgtgcgaggatctctttcatcggacggttaaggtcaacgcgcaccgcttcgccttctcccgctttgcgcagctcttccgggatatatttgcctggattatgttccagtttttcgatccagatcccctgacggttgatcttcgctttgatattacggtcagcagagcaggagacgcccataccgaccgggcaggatgcgccgtgacgtggcaggcgaatcacgcggatgtcgtgagcgaagtatttaccaccaaactgcgcacccagaccgagattttgcgcttcgatcagcaattctttttccagttccacatcgcggaatgcctgaccgtgctcattcccttccgttggcagttcgtcatagtatttagcggaagccagtttcactgttttaaggttcgtttctgcagaagttccaccaataacgaacgcaatatgatacggaggacaggccgccgtacccagcgtgcgcatcttctcaaccaggtaatttttcagtttccccggcgttagtaacgctttggtttcctgatagagatacgtcttgtttgccgaaccgccacctttggcgatacagaggaatttgtactcgtcgccatcaacggcataaagatcgatctgcgctggtagattggtgccggtattcacctctttatacatatccagcggcgcgttttgcgagtagcgcagattatcttcgatataagtgttatagacaccgcgtgccagcgccgcttcatcaccgccaccggtccatacacgctgcccttttttaccaacaataatcgcggtgccggtatcctgacaggttggcagaacgcctttcgccgcgatgtcggagttgcgcaggaattgcagcgccacatatttatcattttcgctggcttccgggtcacgcagaatgtcggccacctgttgttggtgagccggacgcagcataaatgacgcatcatgaaacgcctgacgcgccaacagcgttaacgcttcgggtgcgactttcaaaatctcctgcccttcaaattcagatacgctaacgtgttcgctggttagcaggtaatactcagtatcatcttttttgagtgggaaaggagcctgataatgaaagggtttgtttgacattattctctcacttactgcctggtttggttatgctctgggcgggtgttccgttgccctgttaaaagcgagtaacaatatcctacacacttttttaacaaaaactgagactagtacgactttttgcggctccaggttacttcccgtaggattcttgctttaatagcgggattaatttccacattaaaacagggattgatcatgcaaaaactcattaactcagtgcaaaactatgcctggggcagcaaaacggcgttgactgaactttatggtatggaaaatccgtccagccagccgatggccgagctgtggatgggcgcacatccgaaaagcagttcacgagtgcagaatgccgccggagatatcgtttcactgcgtgatgtgattgagagtgataaatcgactctgctcggagaggccgttgccaaacgctttggcgaactgcctttcctgttcaaagtattatgcgcagcacagccgctctccattcaggttcatccaaacaaacacaattctgaaatcggttttgccaaagaaaatgccgcaggtatcccgatggatgccgccgagcgtaactataaagatcctaaccacaagccggagctggtttttgcgctgacgcctttccttgcgatgaacgcgtttcgtgaattttccgagattgtctccctactccagccggtcgcaggtgcacatccggcgattgctcactttttacaacagccaaatgctgaacgtttaagcgaactgttcgccagcctgttgaatatgcagggtgaagaaaaatcccgcgcgctggcgattttaaaatcggccctcgatagccagcagggtgaaccgtggcaaacgattcgtttaatttctgaattttacccggaagacagcggtctgttctccccgctattgctgaatgtggtgaaattgaatcctggcgaagcgatgttcctgttcgctgaaacaccgcacgcttacctgcaaggcgtggcgcttgaagtgatggcgaactccgataacgtgctgcgtgcgggtctgacgcctaaatacattgatattccggaactggttgccaatgtgaagttcgaagccaaaccggctaaccagttgttgacccagccggtgaaacaaggtgcagaactggacttctcgattcctgtggatgattttgccttctcgctgcatgatcttagtgataaagaaaccaccattagccagcaaagtgccgccattttgttctgcgtcgaaggcgatgcaacgctgtgtcaaggttctcagcagttacagcttaaaccgggtgaatcagcgtttattgccgccaacgaatcaccggtgactgtcaaaggccacggccgtttagcgcgtgtttacaacaagctgtaagagcttactgaaaaaattaacatctcttgctaagcttattaaaggcttataacaccttcaggcggccagtccgcctgatttcattttatggataatcattatgaataaatcgctggtagcggtaggcgtcattgttgcgctaggcgtagtctggacaggcggcgcatggtatacaggcaagaagattgaaacccatctcgaagacatggtcgcgcaggcgaacgcgcaactcaaactgacagctcctgaatccaacctggaagtgagttatcaaaactatcatcgcggcgtattcagcagccagttgcaactgttggtgaaacccattgccgggaaagaaaatccgtggattaaaagcggtcagagcgtcatcttcaacgaatcggttgatcatggtcccttcccccttgcccagcttaaaaaactgaacctgatcccgtcgatggcatcaattcaaaccacgctggtcaataacgaagtaagcaaaccactgtttgatatggcaaaaggtgaaacgccttttgagattaactcccgcattggttacagcggtgattccagttccgatatttcgctcaatccactgaattacgagcaaaaggatgaaaaagtcgcctttagcggcggcgagttccagttaaatgctgacagagacggcaaagctatctccctttccggggaagcgcaaagtggtcggatagacgcagttaacgaatacaatcagaaagtgcagttgacctttaataatctgaaaaccgacggttccagcacgctggcaagttttggtgagcgcgtaggaaaccaaaaactgtcactggaaaaaatgaccatttcagtggaaggcaaagaactggcactgctggaaggcatggagatcagcggtaaatcggatctggtcaatgatggtaaaacgatcaatagccaactggattactcgctaaacagcctgaaggtacagaatcaggatctgggcagcggcaagctgactttaaaagtcggccaaattgatggcgaagcctggcatcagtttagccagcaatataacgcgcaaactcaggcgctgctggcacagccagaaattgccaacaatcccgaactttatcaggagaaagtgacggaagccttctttagcgccctgccgctgatgctgaaaggcgatccggtgattactattgcgccgctaagctggaaaaacagtcagggtgaaagtgcgctgaatctgtcgctgttcctgaaagatccggcaacgactaaagaagcgccgcaaacgctggcgcaggaagtagatcgttcggttaaatctctggatgcgaaactgaccattccggtggatatggcaactgagtttatgactcaggtagcgaagctggaaggttatcaggaagatcaagcgaaaaaactggcgaaacagcaagttgaaggtgcatcagcaatggggcagatgttccgtctgaccaccttgcaggacaataccatcaccaccagcctgcagtatgctaacggtcagatcacgttaaacgggcagaaaatgccactggaagattttgttgggatgtttgcgatgccggcattaaacgttccggctgtacccgctattccgcagcagtaattcacagccaaaacgccggaggtttttctctccggcgttatttcttacttcagcataaagtcatactgaatactcattttcacatcccagtaattcaggcgatcgcccagcgcactgccatcgcgcttttcccgccctttatcagcagcaagaaagaaattcatcccttgtaacggcccttcgctgacccgatagttcataccacctaagatacccgtgccttcaatccgcacatctcgtttactggattcatagccgcgagtcacaatcggtgcaaatgtcagtgtaaattgcggcgttaaacgatagttgacgcccaattgccaggactgcattccttcacggttacgatcaagacttaatgaaaagggatagccaatgtcggtatccaccacggcaccattcattgcatggcgcaaataaccaccactgccaaatacgcttccccacggcgcattccaggtcaattgtccactaaccaacgccgtttcattgggctggctggtattacgacttaaaccttcgagctgcgcgtaaaagccgagcaactcccctttcaacgtataattcgggtcgagcggtatgtttttctcgagaatgctttgtatctgattggaaacatctttctgtaccgatgcccccagagaatagcgactggtatcatcatgccaactggcggctaaaaaagaacgtgcgcgatgtttatcgtattttcccgtctggctgttatacaccccttcatcacgaataccggttgttgaatcggtccataaaaatactcgtgaacgccacattccccacagatcaatatttggcgttaacgcccaataacctaatgctccttcagaaactgtcggtaatgtacgttgcgaactgccagccattaacggaatacgataaggtaagctaccgtaactataatccgtcccgaagcgacctaatttaagcaggctattttcactgggttttatttttactgcccccagggcaaagccaaaacttttatcaccatcaagataccaccgggtactcatatcagcacgagcacctaatttataaacataatacgctccgccttcaacgccaataatattggaataataaccactattgaaatcgagcaatcctccctgtacccatgcgtaaatatctcttcccgcgccagcactgggcttatccgccctgcgcaattcgtttttcagtctgatgcgtagtcccgcttcatcgtcagccagttgcgccgcgtaagcagaggtaaggccagaggcagccgtcaggcaaataacggccatggccactatttttctcatagttgcacctttgatgttctgattatttttattgaatattaattagtgatatcgctgattaattgctgctgcatttttttacgattatcaatttcaaccacgatttctttgaattttttatccgtgagcggataaaaccagataataacgaatgccagtagcataaatccgcaaggtactaaggcaattgatgtgcggatgcccataataacttccggcgtttgcacctgattggcgatatatccgcttaatcccaaaataaaggcaggaattgaacctccgattgcctgaccgcatttacgggtaaatgagaatagtgaataggtgagcccttcaattcgcacgccggtcaggtattcaccgtattctacggtatcagcttccagtgcccacatcacagtcatagtaacgccctgaccaattgaagcgatggccaacgcaaccaacgccaccggcagtgaccagacggaaacccagaagaatagcagataaccgcaggttcccagcaaagcgccaatcaggaaggtattctttttaccgatcctcgcgaccatccccggcaccagcggtgccgatgccacagtaccgaccaggttttgcaccagtaccagcacagtaaacagcccggtatcatttaacacatagcgcacgtagaacaacgacgaggcgctaaccgcgaaggtcgaaatcagcacacacagcgcaccgatgcacaacataaacagcgggcgattccgtttcagggtttgcagactgatcttcaatgacggctgcgccacgatacgtaccacattctcacgcgtcgatttgaagcagatgaagtaaagcaccattccggcaatcgccagcacaatcgtccagaaatggtataccgacaccatctcttccgggctggagttcttaatgctcggtcctatcagaaatgccaggcagacaaaggttaatgaagcggcaatcccgcgagccgcgcccagacgggcgcgggattgtggttgttgggtcatcgcggtagcaagtgaaccataaggaatattcaccaggctgtagcaaagcccgaggcccatgtaggtcaaatatgcatacaccactttgctaccatggctccagtcggtcggcacccagaataccagcacgctgaagatcattaacggcgcagtaccgaagagtaaaaacgggcggaattttccccagcgggtattcacactgtccaccactcgtccggcaaagacgtcggcgaaggcatcgaatacccgcaccagtaacagcatggtgcccgccgcagcggcaccgacgccagcgacgtcggtgtagtaactcaacaggaagagcgcccccattgcgaaggcgaagttattggcgacgtcaccgaggctgtagccgacgatggtgcgccaggagagttgttgattcattgtttgcctccctgctgcggtttttcaccaaagttcatgccagtccagcgtttttgcagcagaaaagccgccgacttcggtttgcggtcgcgagtgaagatccctttcttgttacctccaacgcgcaatatgccttgcgaggtcgcaaaatcggcgaaattccatacctgttcaccgacgacggcgctgacgcgatcaaagacgcggtgatacatatccagccatgcacactgatactcttcactccacatgtcggtgtacattgagtgcagcccggctaacgtatccacgccgtattcggtgatgataatcggctgatgcagtttctcctgccaggccagaagttctttttccagtaccttctctgccgtttccaaatcgccgctttggacataccaaccgtaataacggttaaggcacagcacatcaaagagatcgctgatggtatcggtgtgagcgtcgcagaacattacattgacgcaggtgatcggacgcgtcgggtcgagtttacgcgttgcttccgccagtggcgcgaaatattctcgtgcaccttgcggacgggtatccggttcgttggcaatactccacatcaccacgcttgggtggtttttgtcacgcgctatcagctctttaatcgcctgtaagtgcgcctgctgagtttccccgttgactgcctcttcgctgtacagttctttcggcttgttggccgcttcgaaaccaatgcctaaagagaggttaaagccgacagcagcagtttcatcaatcaccacgatgccatgttcatctgcccagtcgagcatctcttcagcgtaagggtaatgcgaggtacggtaggagttggccccaatccagtccattaatgcgtggtcgtgcaccatcagcacgttatcgaatcctttgccacgcaagtcagcatcttcatgacgaccaaagccagtaaagtagaacggtttgtggttaatcaggaactgttcgcccttcactgccactgaccggatgccgacgcgaagcgggtagatatcacactctgtctggcttttggctgtgacgcacagttcatagagataaccttcacccggttgccagaggtgtggattcaccacttgcaaagtcccgctagtgccttgtccagttgcaaccacctgttgatccgcatcacgcagttcaacgctgacatcaccattggccaccacctgccagtcaacagacgcgtggttacagtcttgcgcgacatgcgtcaccacggtgatatcgtccacccaggtgttcggcgtggtgtagagcattacgctgcgatggatcccggcataattaaagaaatcatggaagtaagactgctttttcttgccgttttcgtcggtaatcaccattcccggcgggatagtctgccagttcagttcgttgttcacacaaacggtgatacgcacacttttcccggcaataacatacggcgtgacatcggcttcaaacggtgtatagccgccctgatgctccatcacttcctgattatttacccacactttgccgtaatgagtgaccgcatcgaaacgcagcacgatacgctggcctgcccaacctttcggtataaagacttcgcgctgataccagacgttgcccacataattacgaatatctgcatcggcgaactgatcgttaaaactgcctggcacagcaattgcccggctttcttgtaacgcgctttcccaccaacgctgatcaattccgcagttttcgcgatccagactgaatgcccacaggccgtcgagttttttgatttcacgggttggggtttctacaggacgtaacataagggactcctcattaagataataatactggtcaacctttaatctgattagttaaccaattctgtgttgcacacagttatctgtgagaaacccatggaagagaaatggaaataaaaagaactgacaccgcgatcaaaaaaccaaaaactgcaatacccacagcgtgatatggatcgcattaatctttaaaacagcgttgacagaagccataaaataagcaatcgaacgttcgttcgagtatcttgagaacgataaactctcatgacatatggctacggtgaatattttggggggggaattctccgatcccggggagattgtattttgtacagggaaattaaagtatgaaacgcgggcacagttatcaccagcccgcgaaatgagaggatcaggatgcggttaagataccgccaatcatcgcgcgtaatccctgagcaaacgacgcttcacgcgccagatcttccgcttcgatatcggccagaacaccgtaggtcagatccagcagtaaacgtgaagtcattgccgtgttgatgtctgggcttatctcgcctttttgctgggcatcacgcatccgctgagcaacaaattcagtgatcgtcatatgcttatttttaagcatggcggcgacctgtgggttacgcatcccttccgccataatttcgaccaccagcgcccgttgcccaaaggcttcatgggtgagagagacaatagactcgaccatatagtcaacaaaatgaatcccttcaatcggttcccggaaacgggccagcgccctctcctggtcctgtaagataatcgcctgaatcaaggcttctttggagatgaaatggtgatagagcgtcccgggactaatggcgcaagatttacagatggctttcatcgaggcactgtgaaatccattttctgaaaaaatctctctggcagcattgaggatccgggtccgtgtcggttgtgcttcagtctgcatgttatccatcattaaaccattatagttagcgtgaataactagtttaccgcgttgtcaggtgagcgcctatcattgctgttgaatagtgcgaaggcacactctattcgtatgcttttcatccagctattggttaaccaatagccgtgatttggctgccagttgtttagcagagacgttgatgaattgcacacgctatcccggtaaacaacacgtacggctgtttaccggtccgttagtgtattaattgagctcctgtaccccaccaccggagactgtgagaatttgtccgcttacccagctggctgcaggcgagcaaaggaacagagctgcgttagcaatatcttgcggttggcccagacgtctgatcggcgtgtgctgtaacattttttgttcaatttctggtgtaataacggatttcagggcatcggttaatattgcccccggcgcaatgccatttacccgaatatttttttcacccaggtcaaacgccatatttctgaccagatgactggccgcagctttagatgatgcataggatgtcatgtttatatttttattttctgccgccatagaagtgatggtcagaataacgccaccgccatttttttccatttctggcgcaacaagttgtgacagatggaaaaaagaaaacacattcagttcataagcacggcgaaaatctgccattggcatatcaaacggtttaggaccaccgccaccggcgttgttaaccagaatatcaactttacccagcttactgatagcaaagtctgccagtgcagagagttcctgttcggaagtaatatcacaacggcaggcaaatgcctgaccacccagttgttgaatttcgtctacaacatggttagctgcgtcggcgttaatatcactgaccaccacagatgcgccagctgtcgcgaatgtaatggcgatttctttaccaatacctgcacccgcacctgtgatgatggcgcattttccgtcgagtctcaggttgtcagaattaaacacataaacctcctgtgaacttcagtaaaaataaaaggcaccgcctgtgtgccacattttttatcattaaccttgaggaaaggacactaccaggtatagcagataaagagaggattatttcgccgcaatgagccgggcgggaataataagattgcgtgaatgcgtctcttcatgggtgattttttgcatcatgcgatccgcaagtgtggtaccaagttcccgcgctggcgtgctggcccaggtaacaggtatatcatcaagtgtggttggtgtcgcatcggtaaatgccgccagcgaaacctgttgctcaaagtaacgatcgactccgctttccccgctttgccgccctgctttcagcaaaccaaaccatgcccccatcgcaatagtttcgttatagcaaaccacggcactgatggtcgggttatgacgtaaaagcgccgtgatagcttccgctgcttgcttctggctggaagtgcactccaacacccaatcgctgtgaaacggcaggccaaattttagtagagttgcacaatagccccccacccgttctgcacgggttaatgaggaactttgccctcccagccaggcgatccgctgatgcccattgcgaatgagatgctccgtcaacaactgtgcagcctgcatgttgtccgggcgaaccgtatcaacatcatcaagataactggcacgggaagcgaaaatcaccgggatagctttttcttctgccatccgtcgcaggtcatcgctgcttcctgcagccccggctattaccacaccatcgacaccctgattcagtaacagtgaaaaccgctgtgccagctgctcgccgtctttaccgccgtgaagcaaaaaaaccatccgtccctgcgcttccagagcttccgtcaatccggccgtcaattcggcgtaaaacggcgcagataaatcacggacgatcaaaccaatgacgccgctttgtccgccgcgcagcgccgacgcctggcgattgcgcacaaatcccagctcttcaatggcggcgttaacgcgttctcctgtggcggtagagattcgccctttgccactaagcaccagcgaaacggtacttaccgacacgcccgcagccagcgcaacatcatgaatggttatttttttggcggtagccatgcagatgacctactccctgattatgtgacagataaaacgttttaccttttatttatcttatacccgctattatcgttgcgtaatgtgatttatgcctcactaaaatttgataaaacgttttatcttctcgcgcaatttactgaatccagattgttctctacgaggagtcgttttatgacggcgaaaacagcaccgaaagtcacgctgtgggagttcttccagcagttaggcaaaaccttcatgttacccgtggcattattgtcgttctgcggcattatgctcggcattggcagttcccttagtagccacgatgtcatcaccctaatcccggtcctgggcaaccccgtgttgcaggctatctttacctggatgagtaagattggctcgtttgcttttagtttcctgcctgtcatgttctgtatcgccatcccgctgggcctggcacgcgaaaacaaaggcgtagcggcattcgctggcttcgtcggttatgcggtaatgaacctcgcggtaaacttctggttgaccaataaaggcattctgccaaccacggatgccgcggttctgaaagccaataacatccagagcattcttgggatccagtcgatcgataccgggatcctcggtgcggtgatcgccggtattatcgtctggatgctgcatgagcgtttccataatatccgcctgccggatgcgctggcattcttcggcggtacgcgcttcgtaccaattatctcctcgctggtgatgggccttgtcggcctggtgattccattagtctggccgattttcgccatgggtattagcggcttgggccatatgataaacagcgcgggtgatttcggaccgatgctgtttggtaccggtgaacgtctgctgttgccgtttggtctgcatcacattctggtggcattaattcgctttaccgacgcaggcggcacgcaggaagtctgcggtcaaaccgtcagcggcgcactgaccatcttccaggcgcaattgaattgcccgaccactcacggtttttctgaaagcgccacgcgtttcctttcgcaaggtaaaatgcctgcgtttctcggcggtctgccaggtgcagcgttagctatgtatcactgcgcgcgcccggaaaatcgccataaaattaaaggtctgctgatttctggcctgatcgcctgcgtcgttggcggcactaccgaaccgctggaattcctgttcctgttcgtagcgccagttctgtatgtcatccacgcgctgttaaccggcctcggcttcaccgtcatgtctgtgctcggcgtcaccatcggtaataccgacggcaatatcatcgacttcgtggtgttcggtattttgcatggtctgtcaaccaagtggtacatggtgccagtggtggcggcaatctggtttgtcgtttactacgtcatcttccgtttcgctatcacccgcttcaatctgaaaaccccggggcgcgatagcgaagttgccagctcaatcgaaaaagccgttgccggtgcgccgggtaaatcaggttacaacgttcctgcaatcctcgaagcattaggcggtgccgacaatattgtcagcctcgataactgcattacccgtctgcgtttgtctgtgaaagatatgtcgcttgttaatgtgcaggcactgaaggacaatcgggcaattggcgtagtacaacttaatcaacataacctgcaggttgttatcgggccacaagttcagtcagtaaaagatgaaatggccggtctgatgcatactgtccaggcataaggatacgatatgttcgatttttcaaaggtcgtggatcgtcatggcacatggtgcacgcagtgggattatgtcgctgaccgtttcggcactgctgacctgttaccgttcacgatttcagacatggattttgccactgccccctgcattatcgaggcgctgaatcagcgcctgatgcacggcgtatttggctacagccgctggaaaaacgatgagtttctcgcggctattgcccactggttttccacccagcattacaccgcaattgatacgcagacggtggtgtatggcccttctgtcatctatatggtttcagaactgattcgtcagtggtctgaaacaggtgaaggcgtggtgatccacacgcccgcctatgacgcattttacaaggccattgaaggtaaccagcgcacagtaatgcccgttgctttagagaagcaggctgacggctggttttgcgatatgggcaagctggaagccgtgttggcgaaaccagaatgtaaaattatgctcctgtgtagcccacagaatcctaccggtaaagtgtggacgtgcgatgagctggagatcatggctgacctatgcgagcgtcatggtgtgcgggttatttccgatgaaatccatatggatatggtctggggcgagcagccgcatattccctggagtaatgtggcgcggggagactgggcgttgctgacgtcgggatcgaaaagtttcaatattcccgcgctgaccggtgcttacgggattatagaaaatagcagcagccgtgatgcctatttatcggcactgaaaggacgtgatgggctttcttccccttcggtactggcgttaactgcccatatcgccgcctatcagcaaggtgcaccgtggctggatgccttacgcatctatctgaaagataacctgacgtatatcgcagataaaatgaacgccgcatttcctgaactcaactggcagatcccgcaatccacttatctggcatggcttgatttacgtccgttgaatattgacgacaacgcgttgcaaaaagcacttatcgaacaagaaaaagtcgcgatcatgccggggtatacctacggtgaagaaggtcgtggttttgtccgtctcaatgccggctgcccacgttcgaaactggaaaaaggtgtggctggattaattaacgccatccgcgctgttcgttaaccccaattgcgcaacgtaaaaaatcgttgcgcaatcgtggatttttaccctgctttgtttttataatggtgcgcacttttatatccagaaaaagagtgcgaccatgattgataccaccctgccattaactgatatccatcgccaccttgatggcaacattcgtccccagaccattcttgaacttggccgccagtataatatctcgcttcctgcacaatccctggaaacactgattccccacgttcaggtcattgccaacgaacccgatctggtgagctttctggccaaacttgactggggcgttaaagttctcgcctctcttgatgcctgtcgccgcgtggcatttgaaaacattgaagatgcagcccgtcacggcctgcactatgtcgagctgcgtttttcaccaggctacatggcaatggcacatcagctgcctgtagcgggtgttgtcgaagcggtgatcgatggcgtacgtgaaggttgccgcacctttggtgtgcaggcgaagcttatcggcattatgagccggaccttcggcgaagccgcctgtcagcaagagctggaggcctttttagcccaccgtgaccagattaccgcacttgatttagccggtgatgaacttggtttcccgggaagtctgttcctttctcacttcaaccgcgcgcgtgatgcgggctggcatattaccgtccatgcaggcgaagctgccgggccggaaagcatctggcaggcgattcgtgaactgggtgcggagcgtattggacatggcgtaaaagccattgaagatcgggcgctgatggattttctcgccgagcaacaaattggtattgaatcctgtctgacctccaatattcagaccagcaccgtagcagagctggctgcacatccgctgaaaacgttccttgagcatggcattcgtgccagcattaacactgacgatcccggcgtacagggagtggatatcattcacgaatataccgttgccgcgccagctgctgggttatcccgcgagcaaatccgccaggcacagattaatggtctggaaatggctttcctcagcgctgaggaaaaacgcgcactgcgagaaaaagtcgccgcgaagtaacaaaatggatggtgcaaattgcaccatccatttttcatgcaaggcacaaagtcgcgcgatgtttggcggattcgatgcccagctcaatcaactccattacctggattgcctggcttgccggaaccggattttcaccatcgccatttaacgcatcacgaatagccgcatagtaagccggataattcccaggcaccgtcaacagcgtttcttcgacacgttcctcaccttccacgcgggtaagtacgccatcacgcatatcgtagccccagtcttcctgcggtagacgctcgccatttttcagacgttcttcctgtggatcgaggccatatttcacataactgcctcgggatccatgcacgatataccgtgctgactcagcggctgccagcatggtaccgtgtaaaatgactcgccgctgtggataggacaagatggcgtggaaataatcggtcgactgcgctccgggccgtaactgtgccaaatctaccgtcatgctgaccggtaaaccaaaaagcgtaatggcctgatcaagaagatgtggtgctaaatcgtaccagataccgctgcctgggccgccctgttcacgccaacgatcgcgcacctgcggacggaagcggtcaaaatgagactcaaagtaagcaacttcacccagcacgccttccgcgagtaaaccttttagcgtcaagaaatcgctatcccagcgacggttatggaatacagacagcacacgccccaggctttttgccagcgcatccagctctcgcgcttgtgacagtgtcacggtaaagggtttatcaacgaccacatgtttacccgcctcaagcgccgctttggctaacgggaaatgggtatcgttgggtgtaggaatgacaatcaggtctatgttgggatcgttaaacagatgcttcggctcagagacaaccgtaaccgttggccagtcggcttttacttttgtttcatcgctgctggagattaccgccagttccagcccgggcgtgcccgcaatcaggggcgcatggaaggttttgctcgcataaccatacccaatcaacccaacacggatgttgtcgctcatgtcattgcctctcattgaagtatgatggctatttgacactatcctttacccacgctcaacagtttaataacctgccagcaataagggatgttgtttaacttaagtcaaaaaaatagcgaattttccaacgacaaaagctaaatatcgcaaaaacctcagtaaaaatcttgctggagctattattgctaagtaacatttaccccctgaagttaatggatcaatcaagagagatgtgggctgtaatgaatcgtcttattgaattaacaggttggatcgttcttgtcgtttcagtcattcttcttggcgtggcgagtcacattgacaactatcagccacctgaacagagtgcttcggtacaacacaagtaagctctgcacttgtggagcgacatgctgcccgtccgggtgcatgttttcacttgtcggatattaaaccaggaatttattatcttgttcgatgttgttggtgattgtcagggatagtaaagcgcgttactcttttcagagcagtttttcatccctgaatatttgccatcagcgcattcttattattgtaataacacaagcgttcacttttggtgaaattttatcatcactaataatacctacccctttggtattaattattttatggaccttttatgactgttcaggactacttattaaaatttcgcaaaatcagttcactcgaaagtctggaaaaactctacgaccatcttaattacaccctgacggacgatcaggaactgatcaatatgtatcgtgctgccgatcaccgtcgcgcagagctggtttctggcgggcgtttgtttgacctcggccaggtaccgaagtccgtctggcactatgtccaataaagaaagtagcgatcggttataaaagccttataataacgcccctaaaattagatttgcctgtttgcgtcgctattctggagaacctatgaccaccacaacgccacaacgtattggaggctggttgcttggcccgttggcctggcttttagtcgctctgttgagtacgacgctggcgttgttgctgtataccgctgcgttatcttctccgcaaacatttcaaacgctcggcggacaagcactgacgacacaaatcttatggggcgtttcttttattaccgctatcgccatgtggtattacacactgtggttgaccatcgctttctttaaacgtcggcgttgtgttcctaaacactatattatctggctgcttatttccgtattgctggcagtaaaagcattcgctttttcacccgtggaagatggcatagccgttcgccagttgctgtttactttgttggcaaccgcattgatcgtcccctatttcaaacgctcgtcgcgggtaaaagcgacgtttgtgaatccgtaataaccttacagttaacctgttgtcgcctgctctggattaacggataataggcggcttttttatttcaggccgaaaaatgactgactacctgttactgtttgtcggaactgtactggtcaataactttgtactggtcaagtttctcggtctctgtccgtttatgggggtttccaaaaaactggaaaccgcgatgggcatggggctggcaacaacgtttgtgatgacgctggcgtctatttgcgcctggcttatcgatacgtggattttgatcccacttaatctgatttacttgcgcaccctggcatttattctggtgattgctgtggtcgtgcagttcaccgagatggtggtgcgcaaaaccagcccggtgctttaccgtttgctggggatttttttgccgcttatcaccaccaactgtgccgtgctcggcgtggcgttgctgaatatcaatctcgggcacaatttcttgcagtcggcgctgtacggtttttccgccgctgtcggtttttcgctggtgatggttctcttcgcagccatccgcgaacgccttgctgtggctgatgtcccggcaccttttcgcggtaatgccattgcgttaattaccgcaggtcttatgtctctggcctttatgggctttagtggtttggtgaagttgtaatgaatgctatctggattgccgttgccgccgtgagcctgctgggcctggcgtttggcgccattctgggttatgcctcccgccgttttgcggtggaagacgatccggtcgttgagaaaattgacgaaatcttaccgcagagccagtgtggtcagtgcggttatcccggctgtcgcccctacgcggaagccatcagctgtaacggtgaaaaaatcaaccgttgcgccccaggtggcgaagctgtgatgctaaaaattgccgagttgcttaatgtcgagccgcagccgctggatggcgaagcgcaagagctaacgcctgcgcggatggtggcggttattgatgaaaataactgtattggctgcactaaatgtattcaggcgtgtccggtagacgccatcgttggcgctacccgtgccatgcatacggtaatgagtgatctctgtacgggctgcaatttatgtgttgatccgtgcccgacgcactgcatctcgttgcaaccggtcgcagaaacacctgactcctggaaatgggatctgaacaccattcccgtgcgtatcattcccgtggaacaccatgcttaagttattctctgcattcagaaaaaataaaatctgggatttcaacggcggcatccatccaccggagatgaaaacccagtccaacggtacaccactgcgccaggtaccactggcgcagcgttttgttattccactgaaacagcatattggcgctgaaggtgagttgtgcgttagcgtcggcgataaagtattgcgcggccagccgcttacccgtggtcgcggcaaaatgctgcctgttcacgcgcccacctcgggtaccgttacggctattgcgccccactctacggctcatccttcagctttagctgaattaagcgtgattattgatgccgatggtgaagactgctggatcccgcgcgacggctgggccgattatcgcactcgcagtcgcgaagagttaatcgagcgcatacatcagtttggtgtagccgggctgggcggtgcaggattcccgacaggcgttaaattgcagggtggcggagataagattgaaacgttgattatcaacgcggctgagtgcgagccgtacattaccgccgatgaccgtttgatgcaggattgcgcggctcaggtcgtagagggtattcgcattcttgcgcatattctgcagccacgcgaaattcttatcggcattgaagataacaaaccgcaggcgatttccatgctgcgcgcggtgctggcggactctaacgatatttctctgcgggtgattccaaccaaatatccttctggcggtgctaaacaattaacctacattctgaccgggaagcaggttccacatggcgggcgttcatccgatatcggcgtattaatgcaaaacgtcggcactgcttatgcagtgaaacgtgccgttattgatggcgagccgattaccgagcgtgttgtaaccctgactggcgaagcaatcgctcgcccgggcaacgtctgggcacggctggggacgccagtgcgtcatttattgaatgatgccggattctgcccctctgccgatcaaatggtgattatgggtggcccgctaatgggctttaccttgccatggctggatgtcccggtcgtaaagattaccaactgtctgttggctccctctgccaatgaacttggcgaaccacaggaagaacaaagctgcatccggtgtagcgcctgtgctgacgcctgccctgcggatcttttgccgcaacagttgtactggttcagcaaaggtcagcaacacgataaagctaccacgcataacattgctgattgcattgaatgtggggcttgcgcgtgggtttgcccgagcaatattcccctggtgcaatatttccgtcaggaaaaagctgaaattgcggctattcgtcaggaagaaaagcgcgccgcagaagccaaagcgcgtttcgaagcgcgccaggctcgtctggagcgcgaaaaagcggctcgccttgaacgacataagagcgcagccgttcaacctgcagccaaagataaagatgcgattgctgccgctctggcgcgggtgaaagagaaacaggcccaggctacacagcctattgtgattaaagcgggcgaacgcccggataacagtgcaattattgcagcacgggaagcccgtaaagcgcaagccagagcgaaacaggcagaactgcagcaaactaacgacgcagcaaccgttgctgatccacgtaaaactgccgttgaagcagctatcgcccgcgccaaagcgcgcaagctggaacagcaacaggctaatgcggaaccagaagaacaggtcgatccgcgcaaagccgccgtcgaagccgctattgcccgtgccaaagcgcgcaagctggaacagcaacaggctaatgcggaaccagaagaacaggtcgatccgcgcaaagccgccgtcgaagccgctattgcccgtgccaaagcgcgcaagctggaacagcaacagtctaatgcggaaccagaagaacaggttgatccgcgcaaagccgccgtcgaagccgctattgcccgagccaaagcgcgcaaactggaacagcaacaggctaatgcggaaccagaagaacaggttgatccgcgcaaagccgccgtcgaagccgctattgcccgtgccaaagcgcgcaagctggaacagcaacagactaacgcagaaccagaagaacaggttgatccgcgcaaagcggcagttgccgcggctattgcccgcgctcaggccaaaaaagccgcccagcagaaggttgtaaacgaggactaaatggtattcagaatagctagctccccttatacccataaccagcgccagacatcgcgcattatgctgttggtgttgctcgcagccgtgccaggaatcgcagcgcaactgtggttttttggttggggtactctcgttcagatcctgttggcatcggttagtgctctgttagccgaagctctcgtactcaaactacgcaagcagtcggtagccgcaacgttgaaagataactcagcattgctgacaggcttattgctggcggtaagtattcannnnnnnnnnggtggatggtcgtgctgggtacggtgtttgcggtgatcatcgctaaacagttgtatggcggtctggggcaaaacccgtttaatccggcaatgattggttatgtggtcttactgatctccttcccggtgcagatgaccagctggttaccgccacatgaaattgcggtcaacatccctggttttatcgacgccatacaggttattttcagcggacataccgccagtggtggtgatatgaacacactacgcttaggtattgatggcattagtcaggcgacaccgctggatacatttaaaacctctgtccgtgccggtcattcggttgaacagattatgcaatatccgatctacagcggtattctggcgggcgctggttggcaatgggtaaatctcgcctggctggctggcggcctgtggttgctatggcagaaagcgattcgctggcatattcccctcagcttcttagtaacgctggcgttatgcgcaacgttgggctggttgttctcaccagaaacactggcagcaccgcaaattcatctgctgtctggtgcgaccatgctcggcgcattctttattttgactgacccggttaccgcttctacgaccaatcgtggtcgtcttattttcggcgcgctggcgggcttattagtctggttgatccgcagtttcggcggctatcctgacggcgtggcttttgccgtcctgctggcgaacatcacggttcctctgatcgattactacacgcgtccgcgcgtctacggccatcgcaaagggtaaaccatgctgaaaactatccgaaaacacggcattacgttagcgctatttgcagcgggttcaacagggttaactgcggccatcaaccagatgaccaaaacgacgattgctgaacaggccagtctgcaacaaaaggcattatttgatcaggtgctgccagccgaacgctataacaatgcgctggcacagagttgctatctggtaactgcgccagagttaggtaaaggtgagcatcgggtttacatcgccaaacaggatgacaaaccggtagccgccgttctggaagcaaccgcgccagatggctattccggtgcgattcagctgctggtgggagccgattttaacggcacggtacttggcacgcgcgtgacagagcaccacgaaacgccagggcttggcgataaaatcgaactgcgcctttctgactggatcacccattttgcgggtaaaaaaatcagtggtgcggatgatgcgcactgggtggtgaagaaagatggtggtgatttcgaccagttcaccggcgcgacgattactccccgcgcggtggttaatgcggtaaaacgcgccggattgtacgctcagacgttaccggcacaactttctcaacttcctgcctgtggagaataaagcgtgagcgaaattaaagacgttattgttcaggggttgtggaaaaacaactctgctctggtccagttgctcggcctttgtcctctgttggcggtcacgtccactgccactaacgctctgggtttaggacttgcgactacgctggtactgacgctgaccaacctgaccatttcgacgctgcgtcactggacgccagccgagatccgcattcccatttacgtgatgatcatcgcctcggtggtcagcgctgtacagatgctgatcaacgcctacgcctttggcctatatcaatcattagggatttttattccgctgattgtcactaactgtatcgttgtgggccgcgctgaagccttcgccgccaaaaaaggtccggcgctttcggcactggacggcttttcaattggtatgggcgcaacctgcgccatgttcgtgctgggttcactacgcgaaattatcggcaatggcacattgtttgacggtgcagatgcgctgttaggtagctgggcaaaagtattacgcgtggaaattttccacaccgactcccctttcctgctggcgatgctgcctccaggtgcatttattggcctgggactgatgctggcaggaaaatacctgattgatgaaagaatgaaaaagcgccgtgctgaagcagctgccgaacgtgcattgccaaacggtgaaacagggaatgtctgatgaacaaagcaaaacgcctggagatcctcactcgcctgcgtgagaacaatcctcatcccaccaccgagcttaatttcagttcgccttttgaattgctgattgccgtactgctttccgctcaggcgaccgatgtcagtgttaataaggcgacggcgaaactctacccggtggcgaatacgcctgcagcgatgcttgaactgggcgttgaaggggtgaaaacctatatcaaaacgattgggctttataacagcaaagcagaaaatatcatcaaaacctgccgtatcttgctggagcagcataatggcgaggttccggaagatcgtgctgcgcttgaagccctgcccggcgtaggtcgtaaaacagccaacgtcgtattaaacactgcattcggctggccgactattgctgtcgacacgcacattttccgcgtttgtaatcgtactcaatttgcgccggggaaaaacgtcgaacaggtagaagaaaagctactgaaagtggttccggcagagtttaaagtcgactgccaccattggttgatcctgcacgggcgttatacctgcattgcccgcaagccccgctgtggctcttgtattattgaagatctttgtgaatacaaagagaaagttgacatctgaagaaaaggggtaacaccgattaccccattgataacctttctttatcctcttttaaaacatctttttaacgtcaatgatgccattgcttagcgttatcatcaggtaatccgtttgcggataaccaaaaatgcaggttaattg

SEQ ID NO: 174 - DNA, 52595 bp, Escherichia coli
  source 1..52595: mol_type = genomic DNA
gcatgatgtcgcgctttttttatgcgtcatttagttacaacatactaatgttatatggtttatttcgccggatttcattaagagccattaatatgttacccatggggaatactccttaatacccacctgcataaaattcttaatagtttaaataactacaggtgtaaaacgtcttaatttacagtctgttatgctgtggctgttaattatcctaaaggggtatcttaggaatttactttatttttcatccccatcactcttgatcgttatcaattcccacgctgtttcagagcgttaccttgcccttaaacattagcaatgtcgatttatcagagggccgacaggctcccacaggagaaaaccgatgagtaaattcctggaccggtttcgctacttcaaacagaagggtgaaacctttgccgatgggcatggccagcttctcaataccaaccgtgactgggaggatggatatcgccagcgttggcagcatgacaaaatcgtccgctctacccacggggtaaactgcaccggctcctgcagctggaaaatctacgtcaaaaacggtctggtcacctgggaaacccagcagactgactatccgcgtacccgtccggatctgccaaaccatgaacctcgcggctgcccgcgcggtgccagctactcctggtatctttacagtgccaaccgcctgaaatacccgatgatgcgcaaacgcctgatgaaaatgtggcgtgaagcgaaggcgctgcatagcgatccggttgaggcatgggcttctatcattgaagacgccgataaagcgaaaagctttaagcaggcgcgtggacgcggtggttttgttcgttcttcctggcaggaggtgaacgaactgatcgccgcatctaacgtttacaccatcaaaaactacggcccggaccgtgttgctggtttctcgccaattccggcaatgtcgatggtttcttacgcatcgggtgcacgctatctctcgctgattggcggtacttgcttaagcttctacgactggtactgcgacctgcctcctgcgtctccgcaaacctggggcgagcaaactgacgtaccggaatctgctgactggtacaactccagctacatcatcgcctggggctcaaacgtgccgcagacgcgtaccccggatgctcacttctttactgaagtgcgttacaaaggcaccaaaactgttgccgtcacaccagactacgctgaaatcgccaaactgtgcgatctgtggctggcaccgaaacagggcaccgatgcagcaatggcgctggcgatgggccacgtaatgctgcgtgaattccacctcgacaacccaagccagtatttcaccgactatgtgcgtcgctacaccgacatgccgatgctggtgatgctggaagaacgcgacggttactacgctgcaggtcgtatgctgcgcgctgctgatctggttgatgcgctgggccaggaaaacaatccggaatggaaaactgtcgcctttaataccaatggcgaaatggttgcgccgaacggttctattggcttccgctggggcgagaagggcaaatggaatcttgagcagcgcgatggcaaaactggcgaagaaaccgagttgcaactgagcctgctgggtagccaggatgagatcgctgaggtaggcttcccgtactttggtggcgacggcacggaacacttcaacaaagtggaactggaaaacgtgctgctgcacaaactgccggtgaaacgcctgcaactggctgatggcagcaccgccctggtgaccaccgtttatgannnnnnnnnnaaactacggtctggaacgtggtctgaacgacgttaactgtgcaaccagctatgacgatgtgaaagcttataccccggcctgggccgagcagattaccggcgtttctcgcagccagattattcgcatcgcccgtgaatttgccgataacgctgataaaacgcacggtcgttcgatgattatcgtcggtgcggggctgaatcactggtatcacctggacatgaactatcgcggtctgatcaacatgctgattttctgcggctgtgtcggtcagagcgggggcggctgggcgcactatgtaggtcaggaaaaactgcgtccacaaaccggctggcagccgctggcgtttgcccttgactggcagcgtccggcgcgtcacatgaacagcacttcttatttctataaccactccagccagtggcgttatgaaaccgtcacggcggaagagttgctgtcaccgatggcggataaatcccgttataccggacacctgatcgactttaacgtccgtgcggaacgcatgggctggctgccgtctgcaccgcagttaggcactaacccgctgactatcgctgccgaagcggaaaaagccgggatgaatccggtggactatacggtgaaatccctgaaagagggttccatccgttttgcggcagaacaaccagaaaacggtaaaaaccacccgcgcaacctgttcatctggcgttctaacctgctcggttcttccggtaaaggtcatgagtttatgctcaagtacctgctggggacggagcacggtatccagggtaaagatctggggcaacagggcggcgtgaagccggaagaagtggactggcaggacaatggtctggaaggcaagctggatctggtggttacgctggacttccgtctgtcgagcacctgtctctattccgacatcattttgccgacggcgacctggtacgaaaaagacgacatgaatacttcggatatgcatccgtttattcacccgctgtctgcggcggtcgatccggcctgggaagcgaaaagcgactgggaaatctacaaagccatcgcgaagaaattctccgaagtgtgcgtcggccatctgggtaaagaaaccgacatcgtcacgctgcctatccagcatgactctgccgctgaactggcgcagccgctggatgtgaaagactggaaaaaaggcgagtgcgacctgatcccaggtaaaaccgcgccacacattatggtcgtagagcgcgattatccggcgacttacgaacgctttacctctatcggcccgctgatggagaaaatcggtaatggcggtaaagggattgcctggaacacccagagcgagatggatctgctgcgtaagctcaactacaccaaagcggaaggtccggcgaaaggccagccgatgctgaacaccgcaattgatgcggcagagatgatcctgacactggcaccggaaaccaacggtcaggtagccgtgaaagcctgggctgccctgagcgaatttaccggtcgtgaccatacgcatctggcgctgaataaagaagacgagaagatccgcttccgcgatattcaggcacagccgcgcaaaattatctccagcccgacctggtctggtctggaagatgaacacgtttcttacaacgccggttacaccaacgttcacgagctgatcccatggcgtacgctctctggtcgtcagcaactgtatcaggatcaccagtggatgcgtgatttcggtgaaagcctgctggtttatcgtccgccgatcgacacccgttcggtgaaagaagtgataggccagaaatccaacggcaacccggaaaaagcgctcaacttcctgacgccgcaccagaagtggggtatccactccacctacagcgacaacctgctgatgctgactttaggtcgcggtggtccggtggtctggttgagtgaagccgatgccaaagatctgggtatcgccgataacgactggattgaagtattcaacagcaacggtgctctgactgcccgtgcggttgtcagccagcgtgttccggcagggatgaccatgatgtaccacgcgcaggaacgtatcgttaacctgcctggttcggaaattacccaacagcgtggtggtatccataactcggtcacccgtatcacgccgaaaccgacgcatatgatcggcggctatgcccatctggcatacggctttaactactacggcaccgtaggttctaaccgcgatgagtttgttgtagtgcgtaagatgaagaacattgactggttagatggcgaaggcaatgaccaggtacaggagagcgtaaaatgaaaattcgttcacaagtcggcatggtgctgaatctcgataagtgcatcggctgccacacctgttcagttacctgtaaaaacgtctggaccagccgtgaaggcgtggaatacgcgtggttcaacaacgtggaaaccaagccgggtcagggcttcccgactgactgggaaaaccaggaaaaatacaaaggcggctggatccgtaaaatcaatggcaaactgcagccgcgcatgggtaaccgcgccatgctgctgggtaaaatcttcgctaacccgcatctgccggggatcgacgattattacgagccgttcgattttgattatcagaacctgcataccgcgccggaaggcagcaaatcgcagccgattgcccgtccgcgttcgctgattaccggggaacggatggcgaaaatcgaaaaagggccgaactgggaagatgacctgggtggtgagtttgacaaactggcgaaagacaagaacttcgacaacatccagaaggcgatgtatagccagttcgaaaacaccttcatgatgtatttgccgcgcctgtgcgaacactgcctgaacccggcatgtgtggcgacctgcccgagcggtgcgatttacaagcgtgaagaagatggcatcgtcctgatcgatcaggataaatgccgtggctggcgtatgtgcatcaccggatgcccatacaaaaaaatctacttcaactggaagagcggtaagtctgagaagtgcatcttctgctatccgcgtattgaagcgggtcagccgaccgtgtgctcagaaacctgtgtcggtcgtatccgttatctcggcgtgctgttatacgatgccgacgcgattgaacgtgcagccagcaccgagaacgagaaagatctttaccagcgtcagctggacgtgttcctcgatccgaacgatccgaaagtcatcgagcaggcgattaaagacggtattccgctgagcgttattgaagctgcacagcagtcgccggtttataaaatggcaatggaatggaaactggcgctgccgctgcatccagaatatcgcacactgccgatggtctggtacgtgccgcctctgtctccgattcagtctgcagcagacgcgggtgagctgggtagcaacggcattctgccagacgtcgaaagcctgcgtattccggtacagtatctggcgaatctgctgaccgccggtgataccaaaccggtactgcgcgcgctgaaacgtatgctggcgatgcgtcattacaaacgtgctgaaaccgttgacggtaaagttgatacccgtgcgctggaagaggtcggtctgaccgaagcccaggcacaggagatgtaccgttatctggcgattgctaactacgaagatcgctttgtggtgccgagtagtcatcgtgaactggcacgggaagccttcccggagaaaaatggctgcggctttacctttggtgatggctgccacggttcagataccaaattcaatctgttcaacagccgtcgtatcgatgccatcgatgtgaccagcaaaacggagccgcatccatgatcgaactcgtgattgtatcgcgtctccttgaatatccggatgctgccttatggcagcatcaacaagagatgtttgaggcgattgccgcgtcgaaaaatctgccaaaagaggatgcccatgcgctgggcattttcctgcgcgatttaacggcgatggatccgctcgatgcccaggcccagtacagcgaactgttcgaccgtggccgcgccacgtcactgttgctgtttgaacatgtgcacggcgaatcccgcgaccgcggccaggcgatggtggacctgctggcgcagtacgagcagcacggcttgcagttaaacagccgcgaattgccggaccatctgccgctgtatctggagtacctggcgcagctgccgcaaagcgaagccgtggaaggtttgaaagatatcgcgccgattctggcattgctgagcgcgcgtctgcaacagcgtgaaagccgttatgccgtgctgtttgatctgctgctgaaactggcgaataccgctatcgacagcgacaaagtggcggaaaaaattgccgacgaagcgcgcgatgatacgccgcaggcgctggatgctgtctgggaagaagagcaggttaaattctttgctgacaaaggctgcggtgattcagcaatcactgctcatcagcgtcgctttgccggtgccgtcgcgccgcaatatctgaatatcaccaccggaggacagcactaatgcaattcctgaatatgttcttctttgatatctacccgtacatagccggggcggtcttcctgattggtagctggctgcgttatgactacgggcagtacacctggcgcgcggcgtccagccagatgctggatcgcaaagggatgaacctggcgtcgaacctgttccatatcggtattctggggatttttgttggtcacttcttcggtatgctgacgccgcactggatgtatgaagcctggctgccgattgaagtgaaacagaaaatggcgatgtttgctggtggtgccagcggcgtgctgtgtctgattggcggcgtgctgttgctgaagcgtcgtctgttcagcccacgcgtgcgtgcaaccactaccggagcggatatcctgatcctgtcgctgctcgttatccagtgcgcgctgggcctgttgaccattccgttctccgctcagcatatggacggtagcgagatgatgaaactggttggctgggcgcagtcggtggtgaccttccacggtggcgcttctcaacacctcgatggtgtggcgtttatcttccgtctgcacctggtgctggggatgacgttattcctgctgttcccgttctcgcgtctggtacacatctggagcgtaccggtggagtatctgacacgtaagtaccagctggtgcgcgctcgtcactaagcgaattttagttcacatagaccctgcttcggcggggtttttttatgggcacggtgcggggtgagttgtcggatgcgcttcgcttatccgacctacaggggaggatattgtaggcccggtaaacgtggtgccatcgggcaaaattaactcggagtaacaggttttgattatttaaggaagcgatggtggtgggggaaggattactcagcgctgcgcgcttcgcccttcgggtcgttgcctgcggcaacgctctctcgctggcgctcaagtcgaaccttagtcgaagcttctcatccttccccgcatgggcagaatatttaattgcggattcgcttgaaagttcagggacttttgaaagtgatggtggtgggggaaggattactcagcgctgcgcgcttcgcccttcgggtcgttgcctgcggcaacgctctctcgctggcgctcgagtcgaaccttggtcgaagcttctcatccttccccgcatgggcagaatatctaattgcggattcgcttgagagttcagggacttttgaaagtgatggtggtgggggaaggattactcagcgctgcgcgcttcgcccttcgggtcgttgcctgcggcaacgctctctcgctggcgctcgagtcgaaccttggtcgaagcttctcatccttccccgcatgggcagaatatttaattacggattcgtttgagagttcagggacttttgaaagtgatggtggtgggggaaggattcgaaccttcgaagtcgatgacggcagatttacagtctgctccctttggccgctcgggaaccccaccaggggtaattcaaattttgaggtaatgcttgagatggtggtgggggaaggattcgaaccttcgaagtcgatgacggcagatttacagtctgctccctttggccgctcgggaaccccaccacggggtaatgctttttactggcctgctcccttatcgggaagcggggcgcatcatatcaaatgacgcgccgctgtaaagtgttacgttgagaaaaatgaactggttgcgtaattttcatccgtaacggattaaaggtaaccagttatttttgctggcgattaaagaataatcgtccgattaccgtaaacaaagacgcgctgtgccagtactttgtatagcgcacgacttaagacgtttttctcgacgtcacgacctgcgcgcatcatatcttcagctgtgtaggtatgatcgacatgaataacgtcctgcatgatgattgggccttcgtccagattgtcattcacatagtgagcggttgcgccaataatcttcacaccacgttcataggcctggtgataaggacgtgcgccgataaacgcaggcaggaatgaatggtgaatattgatgattttattcgggaagcgtgccacaaattccggcgttaatacccgcatatacttcgccagcaccacatagtcaggttgataagcatcaatggcgtccgccatcttttgatcgtgctcgttgcggcttaacccttcatggcttaccagctcaaacggaatatcaaaacgctcaaccagagaacgtaaagtatcgtggttaccaataactgccgcgatttcgacatccaggccgccgtaattggctttcatcaacaaatcgccaaggcaatgcgcttctttagtgaccagaatcactatccggcgacgaccggcaggattcagctcacgcacggagccttctggcaatgcgctatcgagatccgccagaagggtgggatcatgaaaaatcccttccagttccgtgcgcataaaaaagcgcccggtacggtgatcaacaaattcattgttctgtacgatatttaactcgtgcttgtagcaaatattggtaatacgtgcgatcagacctttttggtccggacaaatagtacgcagaactttacgttggagtgaatgcattgctggaaaaaccttgttgagagtgtttgctaaaccgtaccgtcaaccattattggccgcagcactttttaaattttttacctgaaccacaagggcagggatcgttgcgaccaaactgcggacgtgtaccgtcaatatagtaccattgaccgttttctttcaaaaatcgcgaacgttcaattattgcacctgttttgccaccttcggtaaatcgagcaacaaaactgacaaatccgatattgtcggcgtcctgccaacaatgttcaaatacggtcaatcccaaccattcagtatgcgcaaatccggccatcaattcggcacgtaacgccgctgctccacaagagggatgccaggtctttattaaataatctgcgtcttgcatcacaaaagcgcagtaacgcgaacgcatgagatgttctggatcaggtgcaaccttttcaccagacacataagggtggcaacataggctatactcgacagcactaccacagggacaaagctgagacacaaataatctccctggaaacaataacggcgtattaaccgcctgagtagcactatgttaaccgagcagtagcgatgtggctacgattgcattccaggggaatcttgcgggaataatgagaaagataaaaatagggctggcgctgggatctggcgcggcgagaggttggtcgcatattggcgttattaatgcgctaaaaaaagtgggtattgaaattgatatcgttgcaggatgttcaattggttcgctggtgggcgcggcctatgcatgcgatcgattatctgcgctggaagattgggtaacctctttcagttattgggacgttttacgcctgatggatctctcctggcagcgcggtgggttactgcgcggcgagcgtgtcttcaatcaataccgcgaaataatgccggaaacagagatcgaaaattgttcccgtcgctttgcggctgttgccaccaatttaagtacgggacgtgaattatggtttactgaaggcgatctccatcttgctattcgcgcatcatgcagtattccaggactcatggcacctgttgcacataacggctactggctggttgatggagcagtcgttaacccaattcctatttcactcacgcgtgcattgggtgctgatattgtgatagcggtcgacctgcagcacgatgctcatttgatgcaacaagatttgctctcctttaatgtcagtgaagaaaatagcgagaatggtgattctctgccgtggcatgcgcgtctgaaagaaaggttaggcagcataacgacacgtcgggcggtgacagcaccaacggcaacagagattatgaccacttctatccaggtgctggagaaccgccttaaaaggaaccgcatggcaggtgatccgcccgatattctgattcaacctgtttgcccgcaaatatctacgcttgatttccatcgcgcgcacgctgccattgcggccggacagctggcagtggaaaagaaaatggacgaacttttgccgttggtacgcaccaacatttgaccagaatttttatctacacttaagttaattctgacaggcgcaggtggcaatagcatgccactattgagtaaagccagtcaggggagagaacatgacgcagccattggtcggaaaacagattctcattgttgaagatgagcaggtatttcgctcgcttctggattcgtggttttcctcattgggagcgacaacggtactggcggctgatggggtggatgcccttgagttgctgggaggtttcactccagacctgatgatatgtgatatcgcgatgccacgaatgaacgggcttaaactgctggagcatatacgtaacagaggcgaccagaccccagttctggtgatatctgccactgaaaatatggcagatattgccaaagcgttacgtctgggcgttgaagatgttttgctgaaaccagttaaagatctgaatcgcttgcgcgagatggtttttgcctgtctctatcccagcatgtttaattcgcgcgttgaggaagaggaaaggctttttcgcgactgggatgcaatggttgataaccctgccgcagcggcgaaattattacaggaactacaaccgnnnnnnnnnnagtgatttcccattgccgggttaattatcgtcaattggttgccgcggacaaacccggcctggtgcttgatattgccgcactttcggaaaacgatctggcattttattgccttgatgtaacccgagctggacataatggcgtacttgctgccttgttattacgcgcattgtttaacggattattacaggaacagcttgcacaccaaaatcaacggttgccagagttgggcgcgttattgaagcaggtaaaccatttactccgtcaggccaatctgccggggcagtttccgctattagttggctattatcatcgcgaactgaaaaatctcattctggtttctgcgggtctgaatgcgacgttaaataccggcgaacaccaggtgcaaatcagtaatggtgttccgttaggcactttaggtaacgcttatttgaatcaattgagccagcgatgcgatgcctggcaatgccaaatatggggaaccggtggtcgactgcgcttgatgttgtctgcagaatgagcaaacgataacgcgggctaaatttgcattacctgctaatgtcggctggtggtactatcgtcgccattcgtataagtaattgtcttaattatgctaactcgcctccttttcagaacttagccccttcggggtgctgatatactgggatgcgatacagaaatatgaacacgttcaaaacacgaacagtccaggagaatttaaatggctgccattaatacgaaagtcaaaaaagccgttatccccgttgcgggattaggaaccaggatgttgccggcgacgaaagccatcccgaaagagatgctgccacttgtcgataagccattaattcaatacgtcgtgaatgaatgtattgcggctggcattactgaaattgtgctggttacacactcatctaaaaactctattgaaaaccactttgataccagttttgaactggaagcaatgctggaaaaacgtgtaaaacgtcaactgcttgatgaagtgcagtctatttgtccgccgcacgtgactattatgcaagttcgtcaggggctggcgaaaggcctgggacacgcggtattgtgtgctcacccggtagtgggtgatgaacctgtggctgttattttgcctgacgttattctggatgaatatgaatccgatttgtcacaggataacctggcagagatgatccgccgctttgatgaaacgggtcatagccagatcatggttgaaccggttgctgatgtgaccgcatatggcgttgtggattgcaaaggcgttgaattagcgccgggtgaaagcgtaccgatggttggcgtggttgaaaaaccaaaagcggatgttgcgccgtctaatctcgctattgtgggtcgttacgtacttagcgcggatatttggccgttgctggcaaaaacccctcccggagctggtgatgaaattcagctcaccgacgcaattgatatgctgatcgaaaaagaaacggtggaagcctatcatatgaaagggaagagccatgactgcggtaataaattaggttacatgcaggccttcgttgaatacggtattcgtcataacacccttggcacggaatttaaagcctggcttgaagaagagatgggcattaagaagtaacatccgtatcggtgttatccacgaaacggcgttgagcaatcgacgccgtttttttatagcttattcttattaaattgtcttaaatcggacaataaaaaatcccgccgatggcgggattttaagcaagtacaatctacaaaagattattgcttgatcaggaaatcgtcgagggatttaccttgctcatccattgcttttttgattacagctggagtacggccctggccagtccaggttttagtttcgccgttttcgtcaacgtagctatattttgccggacgctgagcacgtttagctttggtgccagatttaacggcagcaaggctattcagcagttcgttcgggtcaataccgtcagcgatcagcatttcgcgatattgctgcagtttacgagtgcgctcttcaacttcagcagcagccgcgctttcttcttcgcgacgttcgttaacaacaacttctaatttttccagcatttcttccagcgtttcaagtgtacattctcttgcctgcgcacgaagagtacggatgttgttcagaattttaagtgcttcgctcattgtagtaatctcaaacttatattggggtggtttgttgaggtaataatagagccttaaattcagttgtgcaatagccaggaatgtaaggaattcaaaattgttctttattttgtgccgccaataaatatcttttcataaaattagccagaaaagacgcggcatatagccctatttgcaccgatgatttcgcagctcgtgaggttaaaacttcctgattcatgtcacattttatggggagattatcgtaggctgacgacctttcagtcttctgtattagtcgtgtttacgagaattccctattaagcgaatgatgaaaagtagaacagtcgcaataagagcagggacttagtattgcactatctcctggaggtcaacagagggctattacttgcgcaacaggttaaagattgtgaatagttaccagcagtcatttacccgcttataacaagcgaggcaatagtaatgatagctcagaaggattatgcaaggcttcgtaagggagaacgcatataccacttctgtgcatactgttgagctgaaaaactgacgaattatgataaactccagccaacgttatttcatatcattgagggcctgtggctgatggcacagctatatttctactattccgcaatgaatgcgggtaagtctacagcattgttgcaatcttcatacaattaccaggaacgcggcatgcgcactgtcgtatatacggcagaaattgatgatcgctttggtgccgggaaagtcagctcgcgtataggtttgtcatcgcctgcaaaattatttaaccaaaattcatcattatttgctgagattcgtgcggaacatgaacagcaggcaattcattgcgtactggttgatgaatgccagtttttaaccagacaacaagtatatgaattatcggaggttgtagatcaactcgatatacccgtactttgttatggtttacgtaccgattttcgaggtgaattatttattggtagccaatacttactggcatggtccgacaaactggttgaattaaaaaccatctgtttttgtggccgtaaagcaagcatggtgctgcgtcttgatcaagcaggcagaccttataacgaaggtgagcaggtggttattggtggtaatgaacgctacgtttctgtatgccgtaaacactataaagaggcgttacaagtcggctcattaacggctattcaggaaaggcatcgccacgattaataagaatttctttactgacgggtgagcagggcacttttatcctgtcagttcgttttacgcacttcttccgggctatacacccttctcggcagttttttaacgccgctatacgcctcacagggctcttaagcaccgacgttgacttgtgacctgtaaagtacaatatccctgtgtttacgcgttatacatcgtcgcaaatatgatgaaggctaatgctgtcggtttatggaaaagttgctttgggtaaacaaaaaaacggccccagaaggggccgtttatgttgccagacagcgctactgattaagcggattttttcgcttttttctcagctttagccggagcggcttcttttttcgctgcagtttcaccttctacataatcacgaccgtagtaggtatccagcagaatctgtttcagctcggagatcagcgggtaacgcgggttagcgccggtgcactggtcatcgaatgcatcttcagacagtttatccacgttcgccaggaagtctgcttcctgaacgccagcttcacggatagatttcggaatacccagttcagccttcagcgtttccagccatgccagcagtttctcgatcttagcagcagtacggtcgcccggtgcgctcagacccaagtggtcggcaatttcagcataacgacggcgagcctgcggacggtcatactggctgaatgcagtctgcttggtcgggttgtcgttcgcattgtagcgaataacgttacaaatcagcagggcgtttgccagaccgtgcggaatatggaactgggaacccagtttgtgcgccattgagtgacatacacccaggaaggcgttcgcaaacgcgatacccgcgatagtcgctgcactgtgaacacgttcacgcgctaccggatttttagacccttcgtggtaggacgctggcagatattctttcagcagtttcagtgcctgcagagcctgaccatcagagaactcagatgccagtacagaaacataagcttccatggcgtgagttactgcgtccagaccaccgaaagcacacagggacttcggcatgtccataaccaggttggcgtcgacaatcgccatatccggagtcagcgcatagtctgccagcggatatttctgaccagtagcgtcgtcagttacaaccgcaaacggagtgacttcagaacctgtaccagaagtggtggtgacagcgatcattttcgctttcacgcccattttcgggaacttgtagatacgtttacggatatccataaagcgcagcgccagctcttcgaagtgagtttccggatgttcgtacataacccacatgatcttcgcggcgtccatcggggaaccaccacccagcgcgataatcacgtctggtttgaaggagtttgccagttctgcacctttacgaacgatgctcagggtcgggtccgcttctacttcgaagaagacttcagtttcaacgcctgctgctttcagtacggaagtgatctgatcagcataaccattgttgaacaggaagcggtcagtcacgatgagcgcacgtttgtggccatcagtaatcacttcatccagcgcgattggcagggagccacggcggaagtagatagatttcggaagtttgtgccacaacatgttttcagctcgcttagcaacggttttcttgttgatcaggtgtttcggaccaacgttttcagagatggagttaccaccccaagaaccacaacccagagtcagggaaggtgcgagtttgaagttatacaggtcaccgataccaccctgagacgctggggtgttaatcaggatacgagccgttttcattttctgaccgaagtaagaaacgcgagccggttggttatcctggtcagtgtacaggcaagaggtatgaccgataccgcccatagcaaccagtttctctgctttttctaccgcgtcttcgaaatctttagcgcggtacattgccagagtcggggacagtttttcatgtgcgaacggttcgctttcatcaacaacggtcacttcaccgatcagaatcttggtgttttctggtacagagaagcctgccagttcagcaattttataggctggctgaccaacgatagccgcgttcagcgcaccgtttttcaggataacatcctgaacagctttcagctctttaccctgcaacagatagccgccgtgggttgcaaaacgttcacgtacagcgtcataaacagagtcaacaacaacaacagactgttcagaagcacagattacgccgttgtcgaaggttttggacatcagtacagatgcaactgcacgtttgatatcagcagtttcatcgataacaactggagtgttgcccgcgcctacaccgatagctggtttaccggagctgtatgcggctttaaccatgcccggaccaccagtcgcgaggatcaggttgatgtctgggtggtgcatcagtgcgttagacagttcaacagaaggttgatcgatccagccgatcagatctttcggagcaccggcagcgatagcagcctgcagaacgatatcagccgctttgttggtggcatcttttgcacgcgggtgcggggagaagataatggcgttacgggtcttcagactgatcagcgatttgaagatagcagttgaagtcgggttagtggtcggaacgataccgcaaataataccgattggttcagcgatagtgatggtaccaaaagtgtcgtcttcagacagaacaccacaggttttttcatctttataggcgttgtagatatattcagaagcaaagtggtttttgatcactttatcttcgacgatacccatgccggattcggcaacggccattttcgcgagtgggattcgagcatctgcagcagccagagcggcggcgcggaagattttgtctacttgctcttgagtgaaactggcatattcacgctgggctttttttacacgctctacgagtgcgttaagttcagcgacattagtaacagccataatgctctcctgataatgttaaacttttttagtaaatcatctgctcgaatacgagagtatagtcagtgcggtgatgatttgcttaacctatgaaaatcaaaagcttactcgcgctcacactcactgtgatttactaaaagagtttaaacattagagttattatctctaatgcgtcacttccaggtggcgtaagcaagattactcacttctgggtactgattacgtgatccaaatcaaatttttgcaaagctgacacctttcagcatcgcttttcgccattatagctaacagttaataaattgtagtatgatttggtggctacattagcatgttttgcacaactagataacaataacgaatgatagcaattttaagtagttaggaggtgaaaaatgctgtcaaaaggcgtattgtcagcgcgtcttttcaaccttatttatggctaacattatccggcttttgcttcggagctaaccgtgattcagaccttttttgattttcccgtttacttcaaatttttcatcgggttatttgcgctggtcaacccggtagggattcttcccgtctttatcagcatgaccagttatcagacagcggcagcgcgaaacaaaactaaccttacagccaacctgtctgtggccattatcttgtggatctcgctttttctcggcgacacgattctgcaactttttggtatatcaattgattcgttccgtatcgccgggggcatcctggtggtgacgatagcgatgtcgatgatcagcggcaagcttggcgaggataaacagaacaagcaagaaaaatcagaaaccgcggtacgtgaaagcattggtgtggtgccattggcgttgccgttgatggcggggccaggggcgatcagttctaccatcgtctggggtacgcgttatcacagcattagctatctgtttggtttctttgtggctattgcattgttcgctttatgttgctggggattgttccgcatggcaccgtggctggtacgggttttacgccagaccggcatcaacgtgattacgcgtattatggggctattgctgatggcattggggattgaatttatcgttactggtattaaggggattttccccggcctgcttaattaattcctttcaaatgaaacggagctgccatgctccgtttacttcgtcattatttttactttgttcccgcgcagttatcaaaagcaaaaggaataggtaaaaatattcttctcaaattacagttagttataaggatttccttaactgcttctcctcaccatcatgttattttcgccacatcataatcctgggcttgctgaagaataattgaaatgatattagtaattccactgcctttggtagaggaaagtgctaaataataatcaattgttaaattattgtgcatttcactactggaactgtaatcagaaaagatagacatgcttagccaatctctatttgattgaattgaaagatgtttgttaaggcatggatgcaagctatagattctgatacggtcaataaaagagaattgcttaacaattttgcaaaatgtattggcgagtaagaaccgcatttggtactttccgggcaaccgccagacgattctttattggtaatgagaataattaacaattaaagagcgtcgcgaaagaataatgtgtctcgacaggggagacacagtacgaatcgacataaggtgatcgtctgaatcaccagaataaataaagtcggtgatagtaatacgtaacgataaagtaacctgacagcagaaagtctccgagcctgtgcagggtcccaatccgggattacacatgctggttaataccagtaattataatgagggagtccaaaaaacaatgaccaacatcaccaagagaagtttagtagcagctggcgttctggctgcgctaatggcagggaatgtcgcgctggcagctgatgtacccgcaggcgtcacactggcggaaaaacaaacactggtacgtaacaatggttcagaagttcagtcattagatccgcacaaaattgaaggtgttccggagtctaatatcagccgagacctgtttgaaggcttactggtcagcgatcttgacggtcatccagcacctggcgtcgctgaatcctgggataataaagacgcgaaagtctggaccttccatttgcgtaaagatgcgaaatggtctgatggcacgccagtcacagcacaagactttgtgtatagctggcaacgttctgttgatccgaacactgcttctccgtatgccagttatctgcaatatgggcatatcgccggtattgatgaaattcttgaagggaaaaaaccgattaccgatctcggcgtgaaagctattgatgatcacacattagaagtcaccttaagtgaacccgttccgtacttctataaattacttgttcacccatcaacttcaccggtgccaaaagccgctatcgagaaattcggcgaaaaatggacccagcctggtaatatcgtcaccaacggtgcctataccttaaaagattgggtcgtaaacgaacgaatcgttcttgaacgcagcccgacctactggaacaacgcgaaaaccgttattaaccaggtaacctatttgcctattgcttctgaagttaccgatgtcaaccgctaccgtagtggtgaaatcgacatgacttataacaacatgccgatcgaattgttccagaagctgaaaaaagagatcccggacgaagttcacgttgatccatacctgtgcacttactattacgaaattaacaaccagaaaccgccattcaacgatgtgcgtgtgcgtactgcactgaaactaggtatggaccgcgatatcattgttaataaagtgaaagcgcagggcgacatgcccgcctatggttacactccaccgtatactgatggcgcaaaattgactcagccggaatggtttggctggagccaggaaaaacgtaacgaagaagcgaaaaaactgctggctgaagcgggttataccgcagacaaaccgttgaccatcaacctgttgtataacacctccgatctgcataaaaagctggcgattgctgcctcttcattgtggaagaaaaacattggtgtaaacgtcaaactggttaaccaggagtggaaaacgttcctcgacacccgtcaccagggtacttttgatgtggcccgtgcaggctggtgtgctgactacaacgaaccaacttccttcctgaacaccatgctttcgaacagctcgatgaataccgcgcattataagagcccggcctttgacagcattatggcggaaacgcttaaagtgactgacgaggcgcagcgcacagctctgtacactaaagcagaacaacagctggataaggattcggccattgttcctgtttattactacgtgaatgcgcgtctggtgaaaccgtgggttggtggctataccggcaaagatccgctggataatacctatacccggaatatgtacattgtgaagcactaatggcaatacgtggggcaggagtgtcctgctccacggtgtctgatttttatcgcattacagaaggcacaggccagaaggtagggcaatgttaaaatttattctacgtcgctgtctggaagcgattccgacgctatttattcttattactatttcgttctttatgatgcgcctcgcgccgggaagcccttttaccggcgaacgtactttaccgccagaagtgatggccaatatcgaagcgaaatatcatcttaatgatccgatcatgacacagtatttcagctacctgaaacaactggcgcacggtgatttcggtccatcgtttaaatataaagattattcggtcaatgacttggttgcatccagttttcccgtttctgccaaactgggagccgcagcatttttccttgcggtaatactgggtgttagtgctggcgttattgccgnnnnnnnnnncaccaaatgggactataccgtgatggggctggcaatgaccggggttgttatccccagttttgtggttgcaccattattagtcatgatatttgcgatcattttgcattggctgccgggcggtggctggaatggtggggcgcttaaattcatgatattgccgatggtggcgttgtcactcgcttatatcgccagtattgcgcgtattacccgtggctctatgattgaagtattacactccaattttattcgtactgcccgggcgaaagggttacctatgcggcggatcattttacgtcacgcattaaaacctgctctgttacccgtgctctcttatatgggccccgcatttgtcggcattattaccggttctatggttatcgaaaccatttatggtttgccggggattggacaactgttcgttaatggcgcattgaaccgtgactattccttagtgttaagcctgaccatcctggttggtgctttaaccattttgtttaatgccattgtcgatgtgctatatgcggttatcgacccgaaaatccgttactgatactggagctcgcgatgatgttaagtaagaaaaacagcgagacgctggaaaatttcagtgaaaagctggaggtcgaagggcgcagcttgtggcaggacgcacgtcgacgttttatgcataaccgtgcggcggttgccagtctgatagtgctggtgctgatcgcgttatttgtaatcctggcaccgatgctttcccagtttgcctatgacgatactgactgggcgatgatgtccagcgccccggatatggagtccggtcactactttggtactgactcatccggtcgcgacctgcttgtgcgcgttgcgattggcgggcgtatctcactcatggtcggtgttgctgcggcactggtggctgtggtcgtcgggacactttatggttcgctttccggttatctgggcggtaaagtggattcggtaatgatgcgtctgctggaaatcctcaactccttcccattcatgttcttcgtcattttgctggtgacctttttcggtcaaaacatcctgctgattttcgtggcgataggcatggtttcctggctggatatggctcgtattgtgcgtgggcaaaccctgagtctgaagcgcaaagagtttattgaggcggcacaagttggcggtgtatcgacatcgggcattgttattcgccacattgtgccgaatgtactcggtgtggtggtggtctacgcatcacttctggtgcccagcatgatcctctttgaatctttccttagcttcctggggttgggtacgcaagagccgttaagcagctggggtgcattgctgagtgatggcgcgaactcgatggaagtctctccatggttattgttgttcccagcgggattcctcgtggtgacgctgttttgtttcaactttatcggcgatggcttgcgtgatgccctcgacccgaaagatcgttaaggagtgcagccatgagcgtaattgaaactgcaactgtgccgctcgcacaacaacaggctgacgcactgctgaacgtgaaagatttgcgtgtcacctttagtaccccggacggcgacgtcacggcggtcaatgatttgaatttttccctacgtgccggagaaacgctgggtattgtaggtgagtctggttcgggtaaatcgcaaactgcatttgcgttgatgggcctgttggctgccaacggacgtattggcggatcggcaaccttcaatgggcgtgaaatcctcaatttgccagagcatgaactcaataaactgcgcgctgaacaaatctcaatgatttttcaggacccaatgacttcgttgaatccctatatgcgcgtcggtgagcagttaatggaagtgctgatgctgcataagaacatgagcaaagctgaggcgtttgaagagtcggtgcggatgctcgatgcggtaaaaatgccggaagcgcgtaaacgcatgaaaatgtacccgcacgaattttctggcggcatgcgtcagcgagtcatgattgcgatggcattgctatgtcgacctaagctactgattgcggatgaacccactactgcgctggacgtcaccgtacaggcgcagatcatgacgctattaaatgaactgaagcgggaatttaataccgccatcattatgatcacccacgatcttggcgtggtggcggggatctgtgacaaagtgctggtaatgtacgccgggcgcacgatggaatatggcaatgcgcgcgatgtcttttatcaacccgttcatccttattctatcggtttgctcaacgcggtgccgcgtcttgatgcggaaggtgaaacaatgttgaccatcccgggtaatccgccaaacttgctgcgattaccgaaaggttgcccgttccagccacgttgtccacatgcgatggaaatttgtagtagcgcaccgccgctggaagagtttacgcctggccgtctgcgtgcttgctttaaaccggtggaggaactgttatgaatgctgtaactgaaggaagaaaagtcctccttgaaatcgccgatcttaaagtgcactttgaaatcaaagatggcaaacagtggttctggcaaccgccgaaaacgctcaaagccgtcgatggtgtcactcttcgcctgtatgaaggggaaacattaggtgtggtaggggaatcgggatgcggtaagtccacctttgctcgnnnnnnnnnncggtttggtcaaggcgaccgacggtcatgttgcctggttaggtaaagagttgctgggcatgaagcccgatgaatggcgtgccgttcgcagtgatattcagatgattttccaggatccgttggcatcgctaaacccgcgtatgaccatcggcgagatcatcgctgaaccactgcgtacttatcatccgaaaatgtcacgccaggaagttcgcgagcgcgtgaaggcgatgatgctgaaagtcgggttattgcctaacctgattaaccgctatccgcatgagttctccggtgggcagtgccagcgtatcgggattgctcgtgctcttattcttgaaccgaagctgattatctgcgatgagccggtttcggcgctggacgtgtcaattcaggcgcaggtggtcaacctgctccagcagctgcaacgtgagatgggattgtcattaatttttatcgctcatgacctggccgtggtaaaacacatttccgatcgtgtgttggtgatgtatctcggccatgcggtagaactggggacctatgatgaggtctaccacaatccactacatccttacaccagggcattgatgtcggcagtccccatacctgatccggatctggagaagaacaaaaccatccagttactggaaggggaattaccgtcgccgatcaacccgccttccggttgtgttttccgtacccgttgcccgattgccggtccggagtgcgccaaaacacgtcctgttctggaggggagtttcagacacgccgtttcttgcctgaaagtcgatccgctttaaacacaataagggctgacagttgtcagccctttttcacgctaaaagcgattatttattcccgccagatgatatggcaaagtttgtgatctttttcgcggcataacagaatgcgggcgaaaacatcgttgatttcaccatcttcactgtccgccagaccaatcaccacttcggcaaaaaagtctgggttcaaatcgaaatcaacatgttcctgccagtcttccgccggatcgaataactccgcgccgccgcgctcttcaaactgaagattgaacagcagaacatcagctggatcgagattgtcggcagccagttcgagaaaaatatcgtaggcctgctcaagcgtttcatcttcagtcaggcgattgtttagatccatatccatagtcactacctgtttaacctctgttggcgacgttttacagcaacggactgaagaagtaaaacagtcgctcggcgacacgttgccataatggacgttttagccataaacgggcatcgagcagacgtgaacgcgaaatataatcgtcctgaacggcggcaaggtctgcaccaaaacctttatcgtcgattgccagggtaatctcgaaattcagccacagactccgcatatcaaggttaacggtgccaaccagacttagttcgccatcgaccagcacgctcttggtatgcagtaacccgccttcaaactgataaattttaaccccagcagcaagcagttccgtaaagaatgcgcgactggcccagccgaccagcatcgagtcattttttcgcggaaggataatactgacatccaccccgcgctgcgccgccgtgcaaatcgcatgaagtaaatcatcgcttggcacaaagtagggcgtggtcatgatcaaatattcacgcgccgaataagccgcagtcaataatgcctggtgaatgagatcttccggaaagccggggccagaagcaattgtgtgaatggtgtgaccgctggcctgttcaaacggcataatattgacatctggtggtggcggcagaatacgttttccggtttcaatctcccagtcgcaggaataaataatccccatcgcggtggcgatggggccttccatacgnnnnnnnnnngatcaatccattgccctacgcccgcatcttgtttgaagtagcgaggatcgaccatattcatgctgccggtgtacgcgatgtaattatcgatcatgatcatcttgcgatgttggcgcaggtccatacggcgtaaaaacacacgcatcagattgacctttaaggcttcgaccacttcaataccggcattacgcattagctcgggccacgggctgcggaaaaaagccacactcccggcggagtcgagcatcaatcggcaatgaataccacgccgtgcagccgccattaatgattcagccacctggtccgccatgccgccgggctgccagatataaaacaccatctcaatattatggcgcgcgagctggatgtcgcggattaacgcctgcatcacatcatctgactcggtcatcagttgtagctgattccctttgaccccagcgatcccctgacgacgctcgcaaagcttgaataatggcgcagcgacactgctattttcttcggcgaagatatgcttacaggctttaaggtcgttaagccattttgcggtggaaggccacatcgctctggcgcgctcagcgcggcgtttgcctaaatggagctcgccaacggcaagataggcaataattccgactaacggcagaatgtaaataatcaacagccaggccatcgcggagggaactgcgcgtcgtttcattagaatgcgtaaagttacgcctgcaatgagcaaccagtatcccagaatggccaaccaactcaccaacgtataaacggttgtcatagattagaaatccttttgaaagcgcattgttatgagtttacgcatatggattcatctggcaaataaaaacgcgggaaaagcactggtcagcgtcgggggtgggggtataatgaccattctgttattgcatagagtagttaacatgaagcggagtagaacggaagtggggcgctggcgcatgcagcgtcaggctagccgacgtaaatcgcgttggcttgaggggcaatcgcgccgaaatatgcgtatccacagcatcaggaagtgcattctaaacaaacagcgtaactcgttattgtttgcgatctacaatatctaaatgtactgggcaccattgcggtgcccaataagtttactcttccgtctttaaactctatttttgcgccgattctttactgtcagctttcgtttcttgttcatcgttatcgctgaaaataccatgacctgagttcaacaacattgaaacgagcatatcattattaatctcttcaccatttaaaactcgcgccagaatttcgctgccaaacagttgcggtgagagaatgatatccggatgtaccatcttaatcttattcaggtttttgctatcactgacggcgagaactgttttgacatcactgctcatatcttttgccgagagtacaacaaacgcgttatctgcatcgttatcactcagcgccagaatggcccggcaacgatcgattcccgctttctttaatactgaactgtcattactgtcaccggggataacatcagcgttatcgcctaagcgttgctcaagttgcttgatatcatcttcaggcaagttgctgataaccgttacgttttgtccgcgttgattcagttgcaggatcgtattgatggcgagaatcgaatgtccgcaaacaataaaatgatctttacgatgcattgtatgattgtttccttttacaagtttgttgaatcccccgcggataagcggaccaaaaattgaggtcatagatgtggcaaaaacggtaatgccggaaataatgaccgaaatagtgaacaatcgtgctgattcagaaacagggacaatatcgccatagccgacggttgacatggtttctatcgaaaaatagaacgcggtcatcaaactttctattcgcggattaaaaccttcgcttaaataaagcgcaccgtaggttgagtaaaacagtaatgtcgtgaaactaataaatgcaaaaattgtcccggctgcggcgctactgtgggagaagtctttgcgcagtatcagcaaaaacaccagcgtaaaaatgcaaaatccaatactaaatttcagccagggataaaaatgcagggtgtaaattagcgctatcaacaacaaaatgatactgattgcccatgcgagctttgcccggaacagtaagccaatggagttcaggacaagaaagacgccgagcataaatagtggggcgtttgccagcaaggagagatccaactctgaaaatgctttgatatggaaaatatcaagcaaattgaccgacataccatagattgttttaaaaataagcaatccatttaaaaagacggccagcgcgagaatgtcgtgccgaagggtcacccataaatttgttgctgtttgtttgaatgtagcccagtgactcactgatacctctgtaaccacaattttgtttaattatcttagcgtgcacattttctgaacatacatgcagcgcgtgaatgtgttaaacaatagtagatgactttatccgcagtaatcaaaggatttgagcgagcaactgtacctcaggaaaggtcatttttcctgaatatgctcacatcatataaagatatacagataaagttattatctgcttgtggtagtgaatgcactgaccggctataaggaaaggccaaacaagaacacggttgcaaaaaccgtgcccttaaatattgaatctctattcagaacactttcttaaatggtttcactgaaacgtgttcatagactcctgccgctacgtacgggtcagcatcggcccaggcctgagctgcttccagcgattcaaattcagcaataacggttgagccagtaaatcccgcagcccctggatcgttactgtctaccgctggcattggaccagctgtcaacaaacgaccttcatcatgcagtaactgtaaacgtgctaaatgtgccggacgaacggaaaggcgtttttcgaggctatcagctttgtcttgagcgtaaataacatacaacacgggcacaactccttgttcgggaaagttgtaaagtacgttatttgaaagggcgaagatctgcaacggaaagatgatgtctttgttaagaccatgcataaattaaggtcaattacgccaaaaatgacattttcactgatcctgatcgtcttgccttattgaatatgattgctatttgcatttaaaatcgagacctggtttttctactgaaatgattatgacttcaatgacccttgatttacctcgccgcttcccctggccgacgttactttcggtctgcattcatggtgctgttgtggcgggtctgctctatacctcggtacatcaggttattgaactacctgcgcctgcgcagccaatttctgtcacgatggttgcgcctgctgatctcgaaccgccacaagccgttcagccgccaccggagccggtggtagagccagaaccggaacctgagccgatccccgaaccaccaaaagaagcaccggcggtcattgaaaagccgaagccgaaacctaagccaaaaccgaagccggtgaaaaaggtacaggagcagccaaaacgcgatgtcaaacccgtagagtcgcgtccggcatcaccgtttgaaaatacggcacccgcacgcctgacatcaagtacggcaacggctgcaaccagcaagccggttaccagtgtggcttcaggaccacgcgcattaagccgtaatcagccgcagtatccggcacgagcacaggcattgcgcattgaagggcaggttaaagttaaatttgacgtcacgccggatggtcgcgtggataacgtacaaatcctctcagccaagcctgcgaacatgtttgagcgtgaggtgaaaaatgcgatgcgcagatggcgttatgagccgggtaagccaggcagtgggattgtggtgaatatcctgtttaaaattaacggcaccaccgaaattcagtaagcagaaagtcaaaagcctccgaccggaggcttttgactattactcaacaggtaaggcgcgaggttttccttcaggatcaaccgcgacatacttaaataatgcttctgtcgctttatagcgttgcccgattggttcagacgctacttttttcacccacacttcaatattaatgctgaccgatgtcgtccctttctggacacagcgtgcatagcagcacaccacatcgccgaccgcaaccggccgtaagaaagtcattccttcaacccgcacagtcactacgcgaccgtgggcaatttctttcgccagaatagcgccgccaatatccatttgtgacattaaccaaccaccaaagatgtcaccattggcattggtatcggcgggcatggctaaagtacgtaaaacaagatcgccctgagggacgttatgtgttgtagacatggtaaaaccgacttaaaaggaaaatcacaggcgcgatgctactatgattttcctgaggagaacagaggagatacagcgccagccccgaaggactggcagtctggttaggatttatcttcctgcggcatgtggcggtagatatagataccgcttaacaatgtgaagattaaggtaagggcggtcaggccaaagactttaaagttgacccaaatattttgcggcagccagaatgcgatgtagatgtttgccagaccgcaaaggataaagaaaacagcccaagccagatttagcttcgaccataccggttgcggcagcgtgagttctttacccagcatccgctgaattagcggctttttcatcacccattggctgactaacagggctcccgcaaacagagcataaatgactgtaaccttccatttaataaactcatcattgtggaagaacagcgtcaagccaccgaagacgaccaccagaacaaaagtgatcagggccatcttctcaaccttacgaaagcgaacccagctatagataagcacaatcgccgtggcgacgatcagcgccgcagtagccgcatagatgtcataaatcttgtaaaacgcgaaaaagacaaccagcggtaaaaaatcaagaaactgcttcattttacgattccgtaatcaaatgcttaaggttattggcgaatcaacatatacaggcggaacagatagatgagcaatatggcagaaatcaggttgctcaaggtgttcgccagtacggcaccaatttccggggttaatgcggcaaaagaagaggcaaaaagcagcaacagtgtttttgccagcaaccagctcagtactgcgggtgccaccagacgcatattcgcccaagtcagccgcatactgctacgcatcgaggcaaaaatgcccattttgtcctgtaccagcatcaccggtgccagggccagtaaaatggccatgataattcccggaacgaccaccagcatgatgccaatctgtactaaaagggtagtcagaaaaatcagaataaataacttgggcaatatcggcgcactggcaccaatagctcgcagcgcactgactctctgacccgcagacaccagctggataattaatattacgcctccggcgagaatggcgttaccgattaatcctgaaaaagtggacgccgctgaagcctgcagcaaaatttgttgctgttccggtgacatattctgaaccaggtcgaacaacccactactgccgctaacgggcacgccgtcattgagctgcgcaagctgtgcatcactgggtgagaaaacatgccctaacaccactgtgataaacgcacatagcaacgataccaacagaatggtcataaattgattacggaagaaatttccggtgtcacggtatacggactgcgccgtgatagacatgcactctccttgagttttatgcaggtgttaattagcgggcaattgtaccctggttaagcctcgggtggcagcatcaggtcttgtatggaaaagcatatctttgtaaagcggaggtaattgctggccttcaggcgtgggcaaaccgcggcaagtggcgatcgagttaatatttgcgtagagaaaatatttaaaaactgatttaaatcacattaaccaggattctcaatgcaacttctaaattaatccagatcaataaatggtgaattatcatatgtaatgtgatctatgtaggatcatttgttactccaatgtaggtatattcgtcacgtttttataaccataacgacggagcggatatgaaaaagttaacagtggcggctttggcagtaacaactcttctttctggcagtgcctttgcgcatgaagcaggcgaattttttatgcgtgcaggttctgcaaccgtacgtccaacagaaggtgctggtggtacgttaggaagtctgggtggattcagcgtgaccaataacactcaactgggcttgacgtttacttatatggcgaccgacaacattggtgtggaattactggcagcgacgccgttccgccataaaatcggcacccgggcgaccggcgatattgcaaccgttcaccatctgccgccaacactgatggcgcagtggtattttggtgatgccagcagcaaattccgtccttacgttggggccggtattaactacaccaccttctttgataatggatttaacgatcatggcaaagaggcggggctttccgatctcagtctgaaagattcctggggagctgccgggcaggtgggggttgattatctgattaaccgtgactggttggttaacatgtcagtgtggtacatggatatcgataccaccgccaattataagctaggcggtgcacagcaacacgatagcgtacgcctcgatccgtgggtgtttatgttctcagcaggatatcgtttttaattccacaaaaaaacgaccccgtaatatacggggtcaataaggacatggcataaagtgtattatttcttcgcttctacgccgtcagtttcagagcgaattaaaaatttctcagttgtttgcggaatatgctgaatcagccagtcggccatttgcttttcctcatttaaaatcgcttcgatggttggaattgaagctgtatcaccggcattttttgctgctgctaatagtgaggtgtaacaggcgatttcaaattgctcgaagacatatccgctaatagagcctttgactatttcatcagaagggaatataccaccgattgactgcccaagcgcagccattttactcatggaatctttaatgactgaacgtgaaatgtcattacgatcaagaatagtttccagttgaacaatctggtttttggtttcactaagatgttgttcaatacgagcgcgtagttcaggataattatctatacggctggccatggattcaagcatagattcggcttgcttttccattgcgtgggcgtcacgtaaccagtcatgataatgttcaatacgattcatgaaaatgtcctctttataaaatgactaaaagttaaagttcatatttcaggctttattttcggctttcttatttacgttattaagggccagatcagtcagtttgatgtcggtggccttttcttcttccagggtctctttcagaagcttcgctgctttacgataacctaattgttcagccagcgtcgctaatgtcccgtaactggcaatctcataatgctcgactttctgtgctgcggcaatcagtgcggcatcacgcacttcgtttttctcggtactttcgatgacctcattagcttcttcaataagaccttccattgccacacatttcatgcgcttaattttcagattcgattctgattccacaacttgatcaatacgttcaatctgtccatgtgtttcctcgaggtgcgcatgaaaagcctgacttaatttttcgtttgatgttgctcttgcgagttttgccagtgcccgggttaattgtttttctgcgctgtaggtatctgaaagcaggtgaataaatacatcttcaatggtcttcatattcatatttttctccagtgaaatcactgcgagccatacggcccgcagatgcaattatctttatcagctgatattaataattaacggtgaatcaggatttgcctgatttattaccaccgctttgttgaccgccttttttacccgcttcagatgcgcgttgcggatcatttttaaaattaccgccgctatgctgaccgcctttacggcctgcgtcggatgccttctcacggtcttcggcgaaatttcctgaaccaccacgatgttcggccatgttatttctcccgttgcgttgcattgtttcattaatatgagtgttgtgtgtcgacactcattaaaattagtcgctaatgagaattagtcaaattaagcgcaacgagaagatagagggaaaatatattttgaggaacattctggatatattaacaattacctgaggaataagtgacttagagaaaattattgattttactggtgttatgttgcgggattaatttgtttgattatattactgttgggcggaaaaatgacgtaagttgacgttcgaccggggtaagcgaaacggtaaaaagataaatattaaatgaatttaggatttttccggcttcattaaagaaagttaaaatgccgccagcggaactggcggctgtgggattaactgcgcgtcgccgctttcatcggttgtacaaaaactttcagtgccgccagcattttctctggctcattaatatgttgctcgatgattttaacaatggccgaaccagaaatcgcgcccgcagctcctgcatcaatcgctgcttttacctgatccggggcggaaataccaaacccctgcaatggaggtgcagcgttgtactctttcagcttcgcaaccagatgattgaggggtaacgcggcgcggttttctgcgccggtcacgcccgctcgtgacagcaaataggtgtaaccacgaccgtaagaggctatctggcgcagcaggtcgtcatcggcatttggcgggcagatgaagataggtgcgacattatggcgcaacgcggcctggcggaagggcgcggactcttcaattggcacatcggcaaccagcaccgaatcgacgccgactttctcgcactgggcataaaactcatcaatgcctttgttaaacaccagattggcatacatcaacaggccaatgggaatggtcgggtgtttctggcgaatcagtgccagcatttcaaaacattgtgccggagtcacacctgccgcaaaggcgcgcagagtggcgttttgaatggtcgggccatccgccagtgggtcggagaaggggatacctaactccagcgcgtcagcaccggcttcaattagcgtatcgataattttcaatgactgctcaatgcccggatcaccgagcgtgacgaaaggaacgaatgcgccttctttgcgctccttcaactgggcaaacagagattcgtagcgttccatcagatttcccctcgtgctttcaaaatatcgtgaacggtgaagatgtctttatcgccgcgaccggaaaggttaaccaccagtagctgctctttatccgggttttcgcgcatcattttcaacgcatgggccagggcgtgggaggattccagcgccgggatgatcccttcgtgcaggcacagcgttttgaaggcttcaagggcttcatcatcggtaatagacacgtaatcagcgcgtccagtgctgttaagatacgcgtgttgtgggccgacagacgggaaatccagtccggcggagatggagtaagattcttcaatctgcccgtcttcggtttgcatcatcggcgctttcataccgaaatagatgcccacgcgaccatgttttaacggtgcgccgtgctcgccagtttcgataccgtgaccacctggctccacaccaatcaggccgacgttggtttcattgatgaaatcagcaaacatgccgatggcattcgaaccgccgccaacacaggcgataacggcatccggcaggcgaccttctctttccagaatctgcgctttggtttcttcgccaatcatccgctgaaactcacgcacaatggtcggataaggatgcgggccagctgcggtgcccagcatatagtgcgcggtttcgtaactaccggaccagtcgcgcagcgcctcgttacaggcatctttcagcgtcgcggaaccgctatgcaccgggatcacttccgcacccattaagcgcatacgaaaaacgttaggcgactggcgttctacgtctttggcacccatataaatacggcatttcaggccgagcagggcgctggcaagggccgacgccacgccatgctgaccggcaccggtttcggcgatgatttcggttttacccatccgcttcgccagtaaagcctgaccgagcacctggttagttttatgcgcgccgccgtgcagcaaatcttcacgcttgagatacagagtggtgttcgtcccggctgtaatgttctggcatttggtcagcgcggttggacgcccggcatagtttttcagcaggtcgttgaactgagcctgaaattcaggatctttttgcgcactgacaaaagcttcttccagctggcgcagagcaggcatcaggatttgtggcacgtacatgccgccaaactcaccaaaataggggttaagtaatgttgtcattgttcctttccttaatatgcgcgcagcgtctggaaaaccgaggccaaaagacgtgcgtctttgatgcccggttgcgactctacagcagaattaaaatcaagtccggcgcagccggtttgtgccgcttccacgcagttatctgcgcctaagccccccgccagcagaacgttgccaagcgattgaccatttaatagtgaccagtcgaaacgttgcccgcttccaccctggccgttgtctaaaacatatttatcaacgtgctgaagctcgcgggcgggcagggtttcaccgacgcttaatgctttccagatggcaacgtgtgctggcagagcttcacgcagcgtatcgatatacagctgatcttcattaccatgcagttgcactgccgccagcgataacaccttagctttgtccaccacatcggcaatatcgtgattgcggaacacgccaacatactgcaacggtgccgcagccatcacttcctgcgcctgttcaacgttgacgcaacgtggtgatgtcgcaacaaaaatcaacccaccgtaaatcgcgcccgcgtcataagctgctttagcatcttgcccacgcgtcaggccacatactttattctcacccagcaacacccggcgcacggcggcgtgcaaatcgtcatgggccatcaacgccgaaccaatcagaaaaccgttagcgaagtggcttaactcgcgcacctgagcgtaagtattgatgccggattcgctgattaccgttacgttgtgccccagtttcggcgcaagctcgcgggtacggttgagatcaatcgacaaatcacgcagatcgcggttgttgatgccaacgacctttgcccccaatgcaatggcacgctccagttcctcttcattactgacttcggtcagcacacccatctccagactgtgggcgacggcggcaagctggcgatattgttcgtcatccagtactgaaagcattaataagcaggcatcagcctggtaatagcgcgccagatagatctggtaaggatcgataatgaagtctttacataaaatcggctgcggggcgatttggctgacgatggggaggaaatcaaagctcccctgaaaatatttctcatcagtcagcaccgaaattgccgaagcgtaatgtttataaatggcggcaatgcgtgctggatcgaaatcatcacggatcacgccttttgacggcgacgctttcttgcactccagaataaacgccgtgcgcgcaccctgtagcgcatcataaaaatgtcgcgtgctcggctgaacctcattctgaaaactggccagcggttgctgctgtttgcgggtttctacccaaatcgccttgtctgcgacgattttcgctaaaacggtttgcatcatttaccctcgtgccgccagcgcggtaactctgtcgtaagcggaaccactgcgcagtacctcaagaacggtttgcgcattggcttgcagatcttcatggccatgcaggcgcattaacatggcgacgttcgcagcgacggctgcttcatgggcggcgtcgcctttaccttgtaacaaacgtgttaaaatgtcacggttttcttccggtgttccgcctgccagttgctcctggtggtagggtgtcaggccaaaatcttcagcggtcaattgatagctcttaatttcgccgtcatgcagctcggcaacgattgtcggcgcgtgtaatgaaacttcatccatcccgccgctgtgcaccaccgccgcgcgttgataccccagcacgcgcaaggtttcggcaatcggcagcaccagttccggactataaacaccaattaacgccagcggcggatgcgccgggttaatcaatggccccagcacattgaacagggtgcgggtttttagttgctggcgaaccggcattgcatggcgaaatccggtgtgatatttcggtgcaaagaggaaacatacgcctaactcatccagcgcctggcgcgatttatcggcgttcatatcaagattaataccgaacgccgccagcagatcggacgaaccagatttactggagacgctacggttgccgtgtttcgccactttcagcccacaggccgcggcgacaaacgcactggcggtagaaatattgatactgttgctgccgtcaccgccagtaccgacgatatcagcaaacagataatccgggcgcgggaacggcgctgcgttttccagtagcgcggttgctgccccggcgatctcgttcgggtgctcaccgcgaattttcatgctcaccagcgccgccgccagttgttccggcttcagctcgccacgcaccaccgctgaaaacagctggtggctttcttgttggctaagcgtctgcgcctgatacagtttttccagaatcggttgcagcgtgttggctggctctagtttctgctgcgcccaggccagcgtttgttccagcaggcgagcgccctgggtggtgagaatggattccggatggaactggaatccacaaacgcgatccgcatcgtgacgtactgccatcaccatgccattaaaatgggcgttgatggttaaaccggccggaatgttactgccaaccagcgagtgataacgcgccaccggcagcgggtttgttaatccggcaaacatcgcctgaccgtcatgttcaatgctcgacgctttaccgtgaagaatttcgcccgcctgaccgacatagcccccgtaagcttcgacaattgcctgatgtccgaggcaaatgccaataatgggcagcttgccacgcaagcgggtgaggagttccggcatacaaccggcttcgctcggcacaccggggccaggagaaagcatcagtaccggattgctcatggtcgccaggcgttcaattaaggtctgcgccggaatatggttgcggtaaatcaccacgttatgcccattgctgcgcaactgatctgccaggttgtacgtaaaagagtcgatattatcgagcagcagtatgtcagccatcagaaagtctcctgtgcatgatgcgcggtggcaatagcgcgcagtacagcgcgggctttattacgggtttcgtcggcttccgactgcggaatagaatcaaggactacgccagcaccggcttgcacggtggcgataccgttttccaccagcgccgagcggatcacaatgcaggtgtcgagatcgccgtgcgcggtgaaataacctaccgcgccgccgtagctgccgcggcgacgaccttccgcctcggcaattaactgcatggcgcgcactttcggcgcaccgcttaacgtccccatattcatacaggcgcggtaagcgtgtagggcgtcgagatcgtggcgcagctcaccgaccacgcgggagaccaggtgcatcacgtaagagtaacggtcaactttggtgaggtcggcgacgtagcggctgccgggggtgcaaatgcgtgccagatcattacgggcaagatccaccagnnnnnnnnnncagatgttcagaaagctctttatgatcggtacgcatttccagttcgatgcggctgtcgaggtctctgtccagcgagccatcggcacgacgaccgcgtggacgtgttccggcaatcgggtagatctcaatctggcggctggtggcgtcatacttgagcgaactttccggcgacgcgccaaacagggtgaaatcattatcctgcataaaaaacatgtacgggctgggattactctttttcagcacgtaataggccgccagcggtgacgggcagggcagagagaaacggcgagatggcaccacctggaaaatttctccagcgcgaatcgctttttgcaacaaacgcactacgccaccgaactcttcatcgctctgattacattcacaacgcatatgcggcacggaaaccaccggcagcggcggcgcggcttcggtcagttgctgacgtagttcgttcaggcgagcagtgagacgttgtttttcttcttcattcggagcaaacaggctggcctgaatacgggtgctttttttctgatggtcaatcaccatcagagtttcagcgagataaaaacagaaatcagggcagttattttccgctgacagttgcggtaaatcttcaaatcccgccacaaggtcataagagaacaggccgccgaagaacattgcttctcgttcttccttcggtacattcaacagattctgcaataaacggaaagcgtcaaaaaccgaaagggagcataagcgagcgtcttcatccagcagtggactgacaggggggaagcgcagcacacggcagtttggtaattgttcattttccacacccgcaggcagggcgttatccagtagtgtcagcagggcttcgccgttgccggaaagtgcctggattgtgacagtgtcacctaaagctgtaatgcgcagcgcactgtctaccagcagcaggctttttaaatcatctttgctgtcgatatctgcggattccagcagcagcgttgccggacgatccccacacaactggtgaaaaagcgcggtgggattgtcgcgataagcgccttcgcaggttagcagttcgagagtcggtttttgtgtttgcattgttattctctaattttgttcaaaaaaagcccgctcattaggcgggctgggtatctgattgctttacgcatggtgaatacactgcccgtttcaggaagtgcgccaccaacctttcagtacgaaaattgctttcattgtcgataccctttttacgtgaacttgcgtactagttaactagttcgatgattaattgtcaacagctcatttcagaatatttgccagaaccgttatgatgtcggcgcaaaaaacattatccagaacgggagtgcgccttgagcgacacgaattatgcagtgatttacgacctgcacagccataccacagcttccgatggctgcctgacgccagaagcattggtgcaccgtgcagtcgagatgcgcgtcggcaccctggcgatcaccgaccatgacaccacagctgcaatcgcgccagcaagagaggaaatttcacgttcgggactggcgttgaatcttattcccggcgtggaaatttccacggtctgggaaaatcatgaaattcatattgtcgggctgaatattgatattactcatccgctaatgtgtgagttcctcgcgcagcagacagaacggcgcaatcagcgggcgcagctgattgccgaaagacttgaaaaagcgcaaatacctggggcgctggaaggcgcacaacgactggcgcagggcggcgcagtgacgcgcggtcattttgcgcgtttccttgttgagtgcggcaaagccagttcaatggcggatgtctttaaaaagtatctggcgcgcgggaaaaccggatacgttccgccacagtggtgtacaatagaacaagctattgatgtcattcatcattctggcggtaaggcggtgctagctcatcctgggcggtacaatcttagtgctaaatggctgaaaagattggttgcgcattttgccgaacaccacggtgacgcgatggaagtcgcgcagtgccagcaatcgcccaatgaacgtacccagctggcggcccttgcgcgtcagcatcatttatgggcatcacaaggatctgattttcatcagccatgcccgtggatcgaactgggtcgtaaactctggctgcccgcaggcgttgaaggcgtctggcagctatgggaacagccgcagaacaccacagagagggaattatgagccagtttttttatattcatcctgataacccacagcaacgtctgatcaaccaggcggtggagatcgtgcgtaaaggcggggtgattgtttatccaactgattccggctatgcgctcggctgtaaaattgaagataaaaacgcgatggagcgtatttgtcgtattcgccagctgccggacggtcacaactttaccctgatgtgtcgcgatctttctgaactctcgacctattcatttgttgataacgttgcgtttcgtttaatgaaaaacaacacgccgggcaactataccttcatcttgaaggggacgaaggaagtgccacgccgtctgttgcaggaaaaacgcaaaaccatcggtatgcgtgtgccttctaacccgattgcgcaggcgttgcttgaagcactgggcgaaccgatgctttccacttcgctaatgctgccaggcagcgaatttaccgaatccgatcccgaagaaattaaagaccgtctggaaaaacaggtggatttgattatccacggcggctatctcggacagaaaccgacaacggttattgatcttaccgatgatacgccggtcgtggtgcgtgaaggcgtaggtgatgtgaagcctttcttataagtgcgtaactctgtatactacgcggccttaaaatggcgctatacggcgccattgattctcctgttcgacgcctgtgaaggcgacaccaaaaggaagctctatgagcgaaaaattacagaaagtgctggcccgcgctggccacggctcccgccgtgaaatcgaatctattattgaagccggtcgtgtgagtgttgatggcaaaattgctaaactcggcgatcgcgttgaagttacccctgggctgaaaattcgtatcgatggtcatctgatttcggtacgtgagtccgctgaacaaatttgtcgcgttctggcctattacaaaccggaaggtgagttgtgtacccgtaacgatccggaagggcgtccgacggtgtttgaccgtctgccaaagctgcgtggcgcacgctggattgccgtaggtcgtctggacgttaacacctgtggtctgctgctgttcaccaccgatggtgaactggcaaaccgtttaatgcatccaagccgtgaagttgaacgtgaatacgccgtgcgtgtatttggtcaggttgacgacgcgaaactgcgtgatttgagtcgtggcgtgcaactggaagatggtccggcagcttttaaaaccatcaagttcagcggcggcgaagggatcaaccagtggtacaacgtgactctgaccgaaggccgtaaccgtgaagttcgtcgtctgtgggaagcggttggtgtgcaggtgagccgcctgatccgtgttcgttacggtgatatcccactgccaaaaggtctgccacgcggtggctggacggagctggacctcgcccagactaactatctgcgcgaactggtggagcttccgccagaaaccagctctaaagtcgctgtagaaaaagaccgtcgtcgcatgaaggctaatcagattcgtcgtgcggtgaaacgtcacagtcaggtgagcggcggtcgtcgttctggcgggcgtaataacggttaatcaaagtatgccggacgtcatatccggcatttttacagattaataatcaatccctatttgcgccttaacaccggcatcaaacgcatgtttgatggggcgcagctcacttaccgtatccgccagttcaagaatatcccgatgacagcctcgacccgtgataatcaccgtctgttgatgtggacgttcatttaacgcctgcaccacttcttccagtggcaaatagtcatacgccaccatatacgtcagttcatcaagcaaaaccatatccagtgaggaatcagcaagcatccgctttgcatgttgccagacttcgcggcaggcggcggtatcagactcgcggttttgtgtatcccaggtaaagcccgttgccatcacctgaaactcaacgccatgtggctccagcagattgcgttcgccattaggccaggtgcctttaataaactgcacgacgcctactttttttccgtgaccaactgcgcgtgttgccgtaccaaatgccgcggtggttttgccttttccattgccggtaaagacgatgataataccgcgttcatcctgggcctgggccacacgagcatctactttttctttcactcgctgctgacgctgttggtagcgttcatcactcattgggaaattcctggtttacggcccggttgggcgtcaaaggtcatgccggttttacggcggctgtcatcgcccatcagccagaggtagagcggcatgatatcagcgggtgttttaagtttctgtggatcttcggtcgggaaggcgctggcacgcattgcggtgcgcgtaccgcctgggttaatgcagttgacgcgcaggcgctgctgatattcatcggccagtacctgcatcatcccttcggtggcaaatttcgacgctgcatatgcgccccagttggctcgtccctgacgtccaacgcttgatgaagtaaagaccagtgaaccggcgtccgatttgagtaataaaggaagcagtgcctgggtgagcataaaggtggcattaacgttgacctgtatgacgtcctgccagacctgtggattttgttcgctcattgggcaaacatcgccgagcaatccggcattatgcaaaacaccatccagacgcggataattaacggtaatgcgctgtgccagttgttggcaatcttcggacgtgcaggtcagcaaatcgagaataaaccactgtggctgacgtccagtttcttcgtttatgtggctggctacctgacgtaatttttcttcattacggcccaacagaatcactgtcgcaccatagcgtgcatacgtcatcgcggcttcacggccaatcccatcgctggctcccgtcaccaggataatgcgatcattgagtaaatcttgttttggctggtaatgcatggctactcctcaacgacgttgtctgtcgtgctgccagtgtactttatgactttggggctttatgcctgaaacagaagggcatttcaatcagcctggggcgataacaccgcaaaatggatactttgtcatactttcgctgcaataacatctctgcgagacggcttaacatgcctgttgtaaactgtgagccaaagcgttgtttaaccaaggtggggactcgtggaattgttgtctgaatatggtttgtttttggcgaaaatcgttaccgttgtgctagcgattgcggcgattgccgccattattgtcaatgttgctcaacgtaataaacgccagcgtggcgagttacgggtcaacaatctcagcgaacagtataaggagatgaaagaagaactggccgcggcgctgatggactcacatcagcaaaaacagtggcacaaagcgcagaagaaaaagcacaagcaagaagcgaaagcagcaaaagcgaaagccaaactgggcgaggtggcaactgacagtaaacctcgcgtctgggtgctggattttaaaggcagcatggacgcccatgaagtgaactcgctacgtgaagagataacggcggtactcgcagcattcaaaccgcaggatcaggttgtgctccgtctggaaagccctggtggcatggtgcatggttacgggttggcggcttcgcagctgcagcgtctgcgtgataaaaacattcctttaactgttacggtagacaaagtcgctgccagcggcggttacatgatggcctgtgtggcggacaaaattgtttccgcaccgtttgctattgtgggttccattggggtggtggcgcaaatgcccaactttaaccgcttcctgaaaagcaaagatattgatatcgaactgcacactgccgggcagtataagcgtactctgacgttgctgggtgaaaataccgaagaagggcgggagaaattccgcgaagagttgaacgaaacgcatcagttgtttaaagattttgtgaagcgtatgcgtccgtctctggatattgaacaggtggcaacgggtgaacactggtacggacaacaggcggtagagaaaggcctggttgatgaaatcaacaccagtgatgaagttattcttagcctgatggaaggccgtgaagtggttaatgtacgctatatgcagcgtaaacgactcattgaccgattcaccggcagcgcggcagagagcgccgatcgattgttgctacgctggtggcagcggggtcaaaagccattgatgtaaaagacaaacgcgaggctaagacctcgcgttttgctttaatcaaccagatgatatttttctgaaagcacatgggccaggtgtttgaacatattaaacaccgcggtgcttttggctgttggcaatccttgttcatctaaaaagtagtcgccggtaaataccagcacgccattacgctgcgtgacgccggtggcttcaatccctgcgagcgtatcctcatgctcacgaatgattttgttggcctctttcaacagcgtttcgcggtcgatgggttgtgtctctttgttcattatttactccttaaacaaggacattagtctacgccaggcatggcttgcagacaaatataccacgctggtggcaagagcgccttactggtaactttggattttgcatgctaataaagttgcgtatcggattttatcaggtacagtgtgacgctttcgtcaatctggcaatagatttgcttgacattcgaccaaaattccgtcgtgctatagcgcctgtaggccaagacctgttaactcagtcacctgaattttcgtgaacagagtcacgacaaggggttgatatccgcagagaacgagtccatatcggtaactcgttgccagtggaaggtttatcaacgtgcgacgcattcctggaagaatcaaattaggtaaggtgaatatgggtaaagctcttgtcatcgttgagtccccggcaaaagccaaaacgatcaacaagtatctgggtagtgactacgtggtgaaatccagcgtcggtcacatccgcgatttgccgaccagtggctcagctgccaaaaagagtgccgactctacctccaccaagacggctaaaaagcctaaaaaggatgaacgtggcgctctcgtcaaccgtatgggggttgacccgtggcacaattgggaggcgcactatgaagtgttgcctggtaaagagaaggtcgtctctgaactgaaacaactggctgaaaaagccgaccacatctatctcgcaaccgaccttgaccgcgaaggggaagccattgcatggcacctgcgggaagtgattggtggtgatgatgcgcgctatagccgagtggtgtttaacgaaattactaaaaacgcgatccgccaggcatttaacaaaccgggtgagctgaatattgatcgtgttaatgcccagcaggcgcgtcgctttatggaccgcgtggttgggtatatggtttcgccgctgctatggaaaaagatcgctcgtggtctgtctgccggtcgtgtgcagtcggtggcggttcgcctggtggtcgagcgtgagcgtgaaattaaagcgttcgtgccggaagagttctgggaagtcgatgccagcacgaccacgccatctggtgaagcgttggcgttgcaggtgactcatcagaacgacaaaccgttccgtccggtcaacaaagaacaaactcaggctgcggtaagnnnnnnnnnngcgcgctacagcgtgctggaacgtgaagacaaaccgacaaccagtaaacctggcgctccttttattacctctacgctgcaacaagctgccagcacccgtcttggatttggcgtgaaaaaaaccatgatgatggcgcagcgtttgtatgaagcaggctatatcacttacatgcgtaccgactccactaacctgagtcaggacgcggtaaatatggttcgcggttatatcagcgataattttggtaagaaatatctgccggaaagtccgaatcagtacgccagcaaagaaaactcacaggaagcgcatgaagcgattcgtccttctgacgtcaatgtgatggcggaatcgctgaaggatatggaagcagatgcgcagaaactgtaccagttaatctggcgtcagttcgtagcctgccagatgaccccagcgaaatatgactccacgacgctgaccgttggtgcgggcgatttccgcctgaaagcacgcggtcgtattttgcgttttgatggctggacaaaagtgatgcctgcgttgcgtaaaggcgatgaagatcgcatcttaccagcagttaataaaggcgatgctctgacgctcgttgaacttacaccagcccagcactttaccaagccgccagcccgtttcagtgaagcatcgctggttaaagagctggaaaaacgtggtatcggtcgtccgtctacctatgcgtcgatcatttcgaccattcaggatcgtggctacgtgcgagtagaaaatcgtcgtttctatgcggaaaaaatgggcgaaatcgtcaccgatcgccttgaagaaaatttccgcgagttaatgaactacgactttaccgcgcagatggaaaacagcctcgaccaggtggcaaatcacgaagcagagtggaaagctgtactggatcacttcttctcggatttcacccagcagttagataaagctgaaaaagatccggaagagggtggtatgcgcccgaaccagatggttctgaccagcattgactgcccgacttgtggtcgcaaaatggggattcgcacagcgagcaccggggtattccttggctgttctggctatgcgctgccgccgaaagagcgttgcaaaaccaccattaacctggtgccggaaaacgaagtgctgaacgtgctggaaggcgaagatgctgaaaccaacgcgctgcgcgcaaaacgtcgttgcccgaaatgcggcacggcgatggacagctatctcatcgatccgaaacgtaagttgcatgtctgtggtaataacccaacctgcgacggttacgagatcgaagagggcgaattccgcattaaaggttatgacggcccgatcgttgagtgtgaaaaatgtggctctgaaatgcacctgaaaatggggcgtttcggtaaatacatggcctgcaccaacgaagagtgtaaaaacacacgtaagattttacgtaacggcgaagtggcaccaccgaaagaagatccggtgccattacctgagctgccgtgcgaaaaatcagatgcttatttcgtgctgcgtgacggtgctgccggtgtgttcctggctgccaacactttcccgaaatcgcgtgaaacgcgtgcgccactggtggaagagctttatcgcttccgcgaccgtctgccggaaaaactgcgttatctggccgatgcgccacagcaggatccggaaggtaataagaccatggttcgctttagccgtaaaaccaaacagcaatatgtctcttcggaaaaagacggaaaggcgactggctggtcagcattttatgttgatggcaaatgggttgaaggaaaaaaataacctttaattctgtcaggtttttataaacaaagggtcgcgaaagcggcccttttttattgcatattattttttcttcacacctatacactaaggctataaatgatatagtggttatagttagcaccttttttattattaaatcgtattagtcacccgccaggtgtgacgaaaaaacgatgttctgatggcgtctaagtggatggtttaacatgaaattacaacaacttcgctatattgttgaggtggtcaatcataacctgaatgtctcatcaacagcggaaggactttacacatcacaacccgggatcagtaaacaagtcagaatgctggaagacgagctaggcattcaaattttttcccgaagcggcaagcacctgacgcaggtaacgccagcaggacaagaaataattcgtatcgctcgcgaagtcctgtcgaaagtcgatgccataaaatcggttgccggtgagcacacctggccggataaaggctcgctgtatatcgccaccacgcatacccaggcacgctacgcgttaccaaacgttatcaaaggctttattgagcgttatccccgcgtttctttgcatatgcaccagggctcgccgacacaaattgctgatgccgtctctaaaggcaatgctgatttcgctatcgccacagaagcgctgcatctgtatgaagatttagtgatgttaccgtgctaccactggaatcgggctattgtagtcactccggatcacccgctggcaggcaaaaaagccattaccattgaagaactggcgcaatatccgttggtgacatataccttcggctttaccggacgttcagaactggatactgcctttaaccgcgcagggttaacgccgcgtatcgtcttcacggcaacggatgctgacgtcattaaaacttacgtccggttagggctgggggtaggggtcattgccagcatggcggtggatccggtcgccgatcccgaccttgtgcgtgttgatgctcacgatatcttcagccacagtacaaccaaaattggttttcgccgtagtactttcttgcgcagttatatgtatgatttcattcagcgttttgcaccgcatttaacgcgtgatgtcgttgatgcggctgtcgcattgcgctctaatgaagaaattgaggtcatgtttaaagatataaaactgccggaaaaataatttcttgcgttattttcggcaccttttatgtagcgaaggtgccggaatatattctcttttgttacttatttctataccgtgcacaatatttttatccctcatatttatagggtaaattacctgtaaagtagtgtctaattacccgcctcgcaaactccagttttcaaatatctatttcaggtcaaaagattgaattattcactggagacgattcgtaaattcgctggatttttgactaaagtttctttaggatttgtctcatcgtatgattaattacaccaatcgttcaacgtcttgctgataagtgatggcgattatatgaggttagcaatgccttctggaaatcaggaaccccgccgcgatcctgaattaaaacgtaaagcctggctggcggtttttcttggttctgcacttttctgggtggttgtcgcactgctgatttggaaagtgtggggataactatggtcggtcaggagcaactggagtcgtcaccattatgccagcatagtgacaatgaaacagaaacgaaacgggaatgttccgtcgttattccagacgactggcaactaacatcgcagcagcaagcctttatagaactgtttgctgaagatgatcagccgaaacaataattatcatcattcttattacccatttttaatgaattaaagggcttttaatacaccgcagcaataacagcttgagttatctcaacacaaaataataaccgttaagggtgtagcctatgatcaacacaaatatgaaatattggtcctggatgggcgcgttttctctgtcgatgctcttctgggccgaactcctctggatcattactcactgatccttgaccccgctgcggcggggttgtcatttgctttgccacaaggtttctcctcttttatcaatttgggttgttatcaaatcgttacgcgatgtttgtgttatctttaatattcaccctgaagagaatcagggcttcgcaaccctgtcattaaggaggagctatgtcgtcaaccctacgagaagccagtaaggacacgttgcaggccaaagataaaacttaccactactacagcctgccgcttgctgctaaatcactgggcgatatcacccgtctgcccaagtcactcaaagttttgctcgaaaacctgctgcgctggcaggatggtaactcggttaccgaagaggatatccacgcgctggcaggatggctgaaaaatgcccatgctgaccgtgaaattgcctaccgcccggcaagggtgctgatgcaggactttaccggcgtacctgccgttgttgatctggcggcaatgcgcgaagcggttaaacgcctcggcggcgatactgcaaaggttaacccgctctcaccggtcgacctggtcattgaccactcggtgaccgtcgatcgttttggtgatgatgaggcatttgaagaaaacgtacgcctggaaatggagcgcaaccacgaacgttatgtgttcctgaaatggggaaagcaagcgttcagtcggtttagcgtcgtgccgccaggcacaggcatttgccatcaggttaacctcgaatatctcggcaaagcagtgtggagtgaattgcaggacggtgaatggattgcttatccggatacactcgttggtactgactcgcacaccactatgatcaacggccttggcgtgctggggt

SEQ ID NO: 175 - DNA, 52110 bp, Escherichia coli
  source 1..52110: mol_type = genomic DNA
attgctggccgattcattttctgatatcggccatttttattgcgggtatcaggccagtttatggttagccattaattccagcgcctgcactaacgcagagtgatccaactggctgccaccgtttgccgcacaggtattaaataactcctggcaggtcgcagtgtttggcaggttcagcgcaagtgctttcgcactttgcagtgccaggttgagatctttctggtgcagagcgattttgaagcccggattaaaggtgcgtttaatcatacgctcgccgtgaacttccagaatacgtgaggaagcaaagccgcccatcagcgcctggcgcacacgtaccgggtccgcaccggcttttgaagcaaatagcagggcttcagaaaccgcttcaatattgagcgccacgataatctgatttgccactttgcaggtttgaccgtcgccgttaccgcccacgagggtgatatttttaccgagcagttcaaaaagcggtttaacacgttcaaataccgcttcatcaccgccaaccataatcgacaacgtcccttcacgcgcaccgatttcaccgccggagactggcgcatcgagataatcgccgcccagttcattcacctgacgagcgaaacgcttagtttcaatcggggaaatggagctcatatcaacaatggttttgcccttcagcgaggctttggtacaaccattttcaccgaacagaacttcttcaacctgtggtgtatctggcaccataataaaaatgatgtccgatgcttccgttacctggcgcgcagtttcaacactgacggcacccagtgacagtaattcatcagcaaccggaccaatggttgtgacatgcagttgatgaccggcacgcgccagattaatggccatcggtgtacccataatgcctaagccaataaatcccagtttcataattaacatcttttaaatttcgcttttcctgaattcagacaacacgatcccctgccaacttagcggcctaaaaaagcattgcctgaacagcgttacgttttaacggtacggatccatccagcgtaaaccggcttccgtggtggtttggggtttatattcacacccaacccaaccgttgtagtcagaattttcgattaccttaaagagataatcataattaatttctccggtccccggttcgccgcgatgcggattatcagcaatttgcaggtggccaattttatcggcccactgagtcatggtgttggttaattcaccttccatccgctgcatgtgataaatgtcatactgaattttcaaattgcagcaaccaacatcatcaatcaatttcagcgcctgccgagttccggtgagatggaaaccaggaatatcaaaatggttaataggttcaatcagtaataaaatatcttctttcatcagcatattcgcggcataacgcaggttttctacaagcgttgcgtgaatctgttcactgctgaaaccagccggcgttttaccgaccagacagttaatttttttattccccagcgcacgggcataacgaatcgctgctgctacgccatcccgaaactcttcttcacggccaggaatacaggcaataccgcgctcccccgccgcccagtcacccgccggtagattgtgcagcgtatgttcgagtttattactcgccagcacctgttttaattcttcaatgtcgtagtcataaggaaacataaattcaacgccgcgaaaaccacactgcgcagctttctcaaaacgggcgagaaaatcatattctccaaataacatcgataaattagcagagaaacgtaacattatttatctcccttattcatagtgcatgaagcaggtttcagtcggtgcgtccgctgcgttatcggcgatatcttcaaattccatgacgttatccagttcgctgcccatcgaaatattggtcacacgctcgagaataacttccacgactaccggtacccgatattgcgccattaaggctttcgcctgttcaaaggctggcgcaatatcttccggtttgaagacgcgaatcgctttacaacctaaaccttccgctacttttacgtggtcgacgccgtaaccgttcacttcgctggagttgatattctcgaaagcgagttgcacgcagtagtccatatcaaacgcgcgctgcgactggcgaatcagccccagataagcgttgttgaccagcacatggatgtacggaatgttgaactgcgcgccaacagctaactcttcaatcaggaactggaagtcaaagtcgccagaaatcgccaccacattgcgtttcggatcagcggcacaaacccctagcgcagccggaatcgtccagcctaacggaccagcctgaccacagttgatccagtggcggtctttaaagacatgcagcatttgtgccgcagcgatttgtgacagaccaatggtggtgacataacaaacatcgcgaccaaaggctttgttcatctcttcatacacgcgctgcggtttcaccggcacgttgtcgaagtgggttttgcgcagcaaagtgcgtttacgctgctggcagtcggcgacccattctttacgacacggcagacgacccgctttttgcatctcctgcgccacttcaaccagcagtgtcagcgccgctttagcatcagagacaataccgagatccggacacagcacgcgaccaatttgcgtcggctcaatatcaatatgaacgattttgcgcccttcggtgtatttctctaccgagccggtatgacggttagcaaaacggttaccgataccaaacaccatgtcagacgccagcagcgttgcgttaccgtaacgatgcgcggtttgcagacccaccatcccggccatcagttcatgatcgtccgggatacagccccagcccattagcgttgggatcaccggaacgctggtcagttcagcaaactgttgtaacagtgcagctgcgtcagcattaattaccccgcccccggcaacaatcaccggacgttcggcctggattaacatttctacagctttttcgatctgcatacggctggcagcaggtttgtagaccggcagcggttcgtacatgtcaggatcaaactcgatttccgcaacctgaacgtcgaacggtaaatccaccagtaccggacccggacgaccagaacgcatcaggtgaaatgcctgttgcagcacgcgaggcaccagcgccgcttcacgaactgtaaccgccattttgctgaccggtttagcaattgcttcaatatctacggcctgaaaatcttctttatgcagacgggcgcgcggtgcctggccggtaatgcacagaataggaatggaatcagcagaagcggaatagagcgcggtgatcatgtccgtgcccgcaggaccggaagtccccagacatacgccgatattccctgccgttgcgcgggtataaccttccgccatgtgcgaagcaccttccacatgacgcgccagaatgtgacgaataccgccgtgcttacgcatcgctgagtagaacggattgattgcagctcccggaacgccgaaggcggtggtgataccttctttctccagcacatacattgccgcgtcaacggctctcatttttgccattttattcctacctctattaattggaaaaattttccaactttcaaattttgtcaaaaaaacccgctccgcagagcgggatgcgacagacactatggatgtgctttcagtcccaacgccgtgctgatatcgcgggcggtgtctctgaccagctcaccctgactgacaaaacgatcttctgtcagtcttgatgaaggcccggagatggagatagcggcaacaacactacctacatcatcgtaaattgctgaagctatgcaattcagacctacaacatgctcttctttatctacggtatagcccagttcacgcgcttgctccaggtccttcagtaaggtgggcatatccacaagcgtagttggcgtaaactgctgcaaaccggtttgcagaatgatgctcatcaactcctcttccgccagcggataaagcagcgctttgcccgcaccggaagcatgcagtggcagacgactgcccagtggcgcacacatcctgaccatcgatttacactctagctgaccaattaatactgcttcattgccgttacggatcgcgacattgaccgtttcgccggaaagtaacatcaggcggcgcataaacggcccggcgacggagaggacatcgcggttatggatgtacgccgcaccgacgttaaagacacctaatcctatatgccaccagcctaactgactgtcctgatagacaaaatccgctgcctgtaaaaccttcagcaagcgaaaggtcgtggagagcggcaaatccagattgagagaaatatcgctaaccgacgaacttcccccacttttttccagatattgcagaatcgcaattccccgctctaacgcctgtgcgcccttctgtgccacaggctccgcctgtcctggcctgccgcgccgtctaacttccgtcatacctacgttaactccgacctacaagtgagcataaacaatgaacaattaatttatcttatgcaagtcggttgcaggcgtcacgcaaaacagagttcctgttcaggaatactttcaacatcacagttgtcactgccgccgcgatcgatggtcagaaaatcggtgacgcgcagccaggcgaaaagtgggtgatgccagacgttacgatggtaattcaccccctgttcaccgttggtgataaacgcccgcagggttgacaggtctggtttgtcgtcacctaacgccacgaccaccacaaacacttcacctttcatcgggataaaggcctgagtacccagcggatgacgttcgagttcgtgaatggtcagcggtagattcgccggttgcgcgcggttaatgctgataagcgtacggtcttgctcaagaatctcaaccagcgccaaatcgtggtaacgctccaccaggccattgttaatatggaaaaaatcccgttgctgcgtttcgattacgtcgccataagcactaaaggcttcctgacttaacggtaatacctgaagtttcatctttttgtccttgtaacataattccgttcaaccaccgccgaccggtcagcttggtttcaataacaggcaatctaaaaccttaagagaacaacttcaatacaaaagttggaatatttttccaaaactagatttagtccacaaattgaacagggttatcatgtaaaaatactgataaatcagaggataagaaaatcacgcaacttgcggatttaaaaggggatacctgaagatgttcgatccagaaaccttgcggactttcattgcggttgctgaaacaggaagtttttcaaaagcggcagaacgattatgtaaaaccacagcgacgatcagttatcgcattaaacttctggaagagaataccggagtagcgctgtttttccgcacgactcgcagcgtgacgttgacagcggctggcgagcatctactttcccaggccagagactggctgagctggccggaaagtatgccaagcgagctgcaacaggtgaatgatggcgtggaacgccaggtgaatattgtcatcaacaacctgctctacaacccccaggccgtcgcccagttgctggcgtggctgaatgaacgttacccctttacccagtttcacatctcccgacaaatctatatgggcgtctgggactcgctattgtacgaaggtttttcactggctatcggcgtcacgggaaccgaggcgctggcaaatacctttagtcttgatcccttaggatcggtgcaatggcgctttgtcatggcggcggatcatccgctggcgaacgttgaagagccgctaacagaagcgcagttgcggcgctttccggcggtcaatattgaagacagcgcccgcaccttaaccaaacgcgtcgcctggcgattgccagggcaaaaagagattattgttcctgatatggaaacgaaaatcgccgcccatctggcgggcgttggcattggttttttgccaaaatcactttgccagtcaatgatcgataatcaacaactggtcagccgggtaatcccaacgatgcgccctccttcgccattgagtctggcatggcgcaaatttggcagcggcaaagcggtagaagatattgtgaccttgtttacccaacgcaggccggaaatcagcggatttttagaaattttcggcaacccacgcagttaaaaatcaagtttccttgcgcgttggcgcgtaaaatagcgcgcaagctgatttgaggttcacttttaactatgcaagagagacacacggaacaggactatcgtgccctgctgattgctgatacgcccattattgatgttcgcgcccctatcgagtttgagcacggcgcaatgcccgccgctatcaatctgccgttaatgaataacgatgaacgcgccgccgttggcacctgctataaacagcaaggctcagacgcagcgctggcgctgggacataaactggtggcgggtgaaattcgtcagcagcgcatggacgcctggcgggcagcgtgcctgcaaaatccgcaaggtattctctgctgcgcccgtggcggtcaacgttcacatattgtgcaacgctggttgcatgaagtggggattaattatccgctggtggaaggcggttataaggtactgcgccagactgcgattcaggcgaccattgaactgtcacaaaaaccgatagtgctgattggcggttgtaccggctgcggcaaaacgctgttagtgcagcaacagccgaacggtgttgatctggaagggttggcgcgtcatcgcggttcggcgtttggtcgcaccttacaaccacaacttagccaggcgagttttgaaaacctgctggctgccgaaatgctaaaaaccgacgcccgtcagaatttgcgcctgtgggtgctggaagacgaaagccggatgatcggttcgaatcacctgccggaatgtctgcgcgagcgaatgactcaggcggcgattgcggtggtagaagatccgtttgagatccgtcttgaacgcctgaacgaagagtatttcttgcgtatgcatcatgattttacccacgcttatggcgacgaacagggctggcaggaatattgcgaatacctgcatcacggactttcggcgattaagcgtcggctggggctacagcgatataacgaactggctgcaaggctggatgcagcactgacaacgcaactcaccaccggcagcaccgacggtcatctggcctggctggtgccgttacttgaagaatattacgacccgatgtatcgctatcannnnnnnnnngcggaaaaagttgtctttcgcggtgagtgggcggaagtggcggaatgggttaaggcgcagtgatgggcggtattctgaaacggcgattgtcgtgagaacagaatggttgcaccagaatacagatataaaaaaaccgacatgacagtcggtttttttattttttccgcccaagacttggtggttccgggcagaaatgaaacagtcctcatctagcaagtgaattataagtcaggatgcctacatttcaaacagctatgttggcgatacaatcccaacgctagtagtgatactgcctcaagggattaccgcagtgcggaaaagtacttttaagtcctggtcaggatacaggtggtgctgattctggtgctctaatttggagagaggcagtcctcatctagcacatgaagaaaatcatagttacaggcaacgtaagggtaagctgtgattgtctttctcccttaagggagcaacggatgaaaacttttctcgataaagttctcatcgttcttaaggcgctaatcgcgctgctggaactgatccgtcagtttattgaataactgaggaaacgtagctaaggccgaaggtttaccaccttcggcctttaaaaaaaccgacatgacagttggtttcatatttattgccaaaatgcacactgttcatgccagatgcggcgtaaacgccttatccggcctacacaatcttgaaaaatcaatatattgcacgctcttcgtaggcctgataagcgtagcgcatcaggcaatctaacgcctgtcatcaccccgcaaactgcctgaacagcgccttacccttaaccagtcgcgcacccagccagccgccgaaaagcgacagcagcagcgcaccgctgcacggcagaacaatccacaatcgccagtctggctcccacggaaaatcaaacactttcgcctgcaacactgccagtgccgtttccgcaccaattgcggccaccaggccggaaacaaacccaagcatggcgaactcacaccacaatgtcgtgcgcagcagttttttccccgcaccgagtgtgcgccataccaccagctcctgatgacgctggcgcattcccacctgcacctgtgccagcaacagcaacataccgcaggcggtgaccagcaccaccatcacctccagcgcccgacttacctgctccagcacctgaccgacctgttttaaaatcgcgccaatatctaacaggctaatggtcgggaactggcggttgagttgcgtcaacatgccgttgccattctcccagcggaaactggtaagccagctctgcggttgcccgtctaatgccccttccgggaaaataaaatagaaattaggccgcagactttcccagtccactttgcgcaggctggtcactttagcgcggaactcctgggtatcgcccataaaagtcacggtatcaccgagggcaacgtttaagcgtttcgccagcccctcttccatcgacacttcatcggcttttggcggccagttaccggcgacaatcggattatgatcgggccgcgtattttgccaggtaagattgagttcgcgattaagcgcctcatcttcattaccttctgtcggcttatcgttaatcgccgtcagccgcgcccgcactaccggataaaatgattccgggactatatgatgttccgcgaggaacgcttttagcggtgctacctgttctgtggcgatgttaattaaaaagtagttcgggctttctggcggtagctgctgctgccagcggtcgagcagatcgccacgcaataccagcaacagcgccagcagcataaaggagagcgaaaatgccgaaagctgacttaacgttgaccacggctgacgtaacaggcggctaaccgccaggcgcagaggcagcgatttcagcgtcatgcggcgaagtacattcagcagcatccagcccagcacaccgcacagcaaagccagtactaccgcgcccgccagcaccgcccaaagcagcatgctgccacccattaatccggcgagcagcagcacaaccaccacactgacaatcggcagataaaacttcagcggccagacgttcgctaccacatcattacgtaatacgcgtaaaggctgcgttgccagcaacaagcggtatggtcgtagccccaccagcagcgagatgaccgtcatggtgccaagcgcccacagccacggccagaggctggctggcggtagtgcagcaggcagaacgggcttgagcagcaccatcaacacgttttcgaacaacagacctatggccccaccggtaacggctgaaagcgtcagcaccatcaaccactgaccgacgattagcttacgcagttgcgctcgccctgcccccagcgttttgaggatcgccaccagatcgtagcgactgcgacagtaatgattcatcgctaccgccaccgctgccactgccagcagcaaggtcagaagcgccgaaagcagcaggaactgttgcgagcgttccatcgatcgccccagcgcgccttcgtcctgttccagaccgtaccagcgttgttcgggtttaagctgaggtaacaaccatttctcatagccgtcgagctggttctcgttgccgccgaatttataacgccaggtgacccgactccccggctgcacggctccggttttatcgacatccgccagattcatcatcagacgcggagccatctggaaggggttaaaaccggaatccggttcctgaatcacttctccggcaatccgcaaggtggcatcgcccacgtcaatggtgtcgcccgttttcaggttaagcagtgccatcaggcgtggggccagcaatacgctgcccgcctgcggtttcaggccagggggattagtttgcagatcgccatacatcgggtagatatcatccaccgctttgacgttcgccagctgcggtgtgtcgcctgcaaaggtcattgtggcgaaagtcagctgcttgccgactttcaggccgcgcttttgcgcttcctccagccacgcttgcggcacttcgcgtgaactgcgcaacgcccgatcgcccgccataaactcacggctttgctggcttaagcccttctccatgcgatcgctgatattgcccagcgccagcacgcaggccaccgccaggcttagcgccagccagacaattaatagcgacggcgaacgccattcgcgccagaaccaacgtgcaatcatgcttcctcctgcaactgcccgttcaccagccgtaagcagcggtcgcagcgtgccgccagttgcaggtcgtgggtcaccataatcaacgtggtgccatgttcacggttgagggaaaacagcaggtcggcaattttatcgcccgtctggcggtcaaggttgccggtgggttcgtcggcaaacagcacatcaggtcgaccattaaaggctcgtgccagcgccactcgttgctgttcaccgccggaaagctgtgccggaagatgatccagacgtttacccagccctaactgttcgagcaacgctttcgccccgttacgactttccgcgctactctcaccgcgcagcagagccggaagctcgacgttttccagcgcgttaagggtaggaattaacataaatgactgaaaaacaaagccgacgtgcttcgcgcgcaactttgcccgcgcttcttcgtccatattatgtagcggttgtcccaccagactcacttcgccactgctgccgtcatcaagcccggcgaggatcgccagcaaggttgacttacccgatcccgactcgcccaccagtgcgatggtctcgccacgtttgacaaccagctcaactccggtgaggatggagagttcatgctccccctgaccgacggacttcttaagatgatgaacttcaacaatgttttccgctggcatttgcccttcctgttcctggtcctgttaaccttccgtgccgccgcagcggacacgttattgattctgggtgatagcctgagcgccgggtatcgaatgtctgccagcgcggcctggcctgccttgttgaatgataagtggcagagtaaaacgtcggtagttaatgccagcatcagcggcgacacctcgcaacaaggactggcgcgccttccggctctgctgaaacagcatcagccgcgttgggtgctggttgaactgggcggcaatgacggtttgcgtggttttcagccacagcaaaccgagcaaacgctgcgccagattttgcaggatgtcaaagccgccaacgctgaaccattgttaatgcaaatacgtctgcctgcaaactatggtcgccgttataatgaagcctttagcgccatttaccccaaactcgccaaagagtttgatgttccgctgctgcccttttttatggaagaggtctacctcaagccacaatggatgcaggatgacggtattcatcccaaccgcgacgcccagccgtttattgccgactggatggcgaagcagttgcagcctttagtaaatcatgactcataaagcaacggagatcctgacaggtaaagttatgcaaaaatcggtcttaattaccggatgttccagtggaattggcctggaaagcgcgctcgaattaaaacgccagggttttcatgtgctggcaggttgccggaaaccggatgatgttgagcgtatgaacagcatgggatttaccggcgtgttgatcgatctggattcgccagaaagtgttgatcgcgcagccgacgaagtgatcgccctgaccgataattgtctgtatgggatctttaacaatgccgggttcggcatgtatggccccctttccaccatcagccgtgcgcagatggaacagcagttttccgccaactttttcggcgcacaccagctcaccatgcgcctgttacccgcgatgttaccgcacggtgaagggcgtattgtgatgacatcatcggtgatgggattaatctccacgccgggtcgtggcgcttacgcggccagtaaatatgcgctggaggcgtggtcagacgcgctgcgcatggagctacgccacagcggaattaaagtcagcctgatcgaacccggtcccattcgtactcgcttcaccgacaacgtcaaccagacgcaaagtgataaaccagtcgaaaatcccggcatcgccgcccgctttacgttgggaccggaagcggtggtggacaaagtacgccatgcttttattagcgagaagccgaagatgcgctatccggtaacgctggtgacctgggcagtaatggtgcttaagcgcctgctgccggggcgcgtgatggacaaaatattgcaggggtgagttgaagcgcgcgcttaagcccccatgtcaaagaaaatatcgacaacagagagcgactccatgtccgtagaaaatattgtcaacattaacgaatctaacctgcaacaggttcttgaacagtcgatgaccactccggtgctgttctatttttggtctgaacgtagccagcactgtttgcagttaaccccgatcctggaaagcctcgcggcgcagtacaacgggcaatttattctggcgaagctggactgcgacgcggagcagatgattgccgcccagtttggtctgcgcgcgattccgaccgtgtatctgttccagaacgggcaaccggtagatggcttccaggggccgcaaccggaagaggcgatccgcgccctgctggataaagtgctgccgcgcgaagaagagctgaaagcgcagcaggcgatgcaactgatgcaggaaggcaattacaccgatgccctgccattgctgaaagacgcctggcagttgtcgaatcagaacggggagatcggcctgctgctggcagaaacgctcctttctctgaaccgttctgaagatgcggaagcggtgctgaaaaccattccgttgcaggatcaggacacccgctaccaggggctggtggcgcaaatcgaactgctgaagcaggcggctgatacgccggaaattcaacagttgcaacagcaggtggcggagaatccagaagatgccgcactggcgacgcaactggctctgcaactgcaccaggttgggcgcaatgaagaggcgctggagttgctgttcgggcatctgcgtaaagatctcaccgccgcagacggtcagacgcgtaaaacgttccaggagatcctcgctgcgctgggtacgggtgatgcactggcgtcgaagtatcgccgccagctgtatgcattgttgtattgatattccgttgatcggcacatgaaccacaacgccggatgcgatgctgcgcatccggcatcgcattatttcttcttcaattgcgtcaccaccaactggtggcgcgaattataaaacttacgataggttaaatagcaggcaataatggtcgacaagctggcggttgagagcagcataaaggtcaccataatctgatatttaatcgccttcaccggatcaatcccggcaaatatcagcccggacatcattcctggtaaactcactaagccaaccgtttttgctgaatcgaccgtcggaattaaagccgcgcgaatactgtcgcgaatcaatatcgctgaagcctgcttcggcgtcgcaccaagactcagtttctcctgaatctgttgctgttcgctaatgacccgttgccctaaattgttgtaacacaaccccaccgctaccatggcgttaccggcaatcatcccggcgatagggatcacctgcatcgggataaattcaatcgaccctgagagaatcagcaccgccagggtaattcccgccccgaccgtaatggcaacaaacgatgagataaaagctttagcaatatatttactgcgtttttgcgcgttccacgccgcattaaagcagataaataacaccatcaataatgtcaggctggcatcatccacgctgaaaatatacttcagcacatagccgacaataatcagctgaattatcgctcgcccgacgctccagagaatatctttctccagcgccagtttttctttatggctaattaagattgccaccaccaccagcattaatgccagtgctaatgattcgttagtaatattatgcgagttcatagcgtgcttcctgcatttctccggcatgcggttgcagtgtaatcactttatccgcatgattaatttcgtctttatcgtgtgtcacccacagcacggcaatattttgctcgcgcacataacgatggatcatctcattgacgttatgtttattactttcatccagcgcactggttatttcatccagcaataaaaccttcggcataaattgcaggttacgaatcaatgagatgcgttgtttttcaccaccagatagctcggcgatatccttcgtcaaaatgctgtccggcaaagcgaagcgttcgagaaaatcgagaaaaatggccgggtcaggctgctggttacggatctgccagggaaagatcagattatcgtataccgtatcgccaaacagcgtcggtgtctgggcgcagtaagagacttgctggcggtagatttctggctttagtgtgctgacatcctccccttcaaacagtaacgttccgctggttgggctgatcaatgaagcaactatttttagcagcgtacttttgccacaaccagaaggaccggtaattaacttaaattcgccagcacgcagcgaaaaattgatgttattaagaatcttcgtatcacccgccagatatcctacgttttgtagctgaagcaaaggactattttcctgcatcgctgttccctttttctgatttttactaaaaacagtttatccttcgcaggaataagggggaactctctttcagtaatcaggtataatttgtttaatcaagcagcaattttgctgattatggacggtacaacaggaggtttttccgatgcttatctttatcccgattctcatttttgtcgcgctggtcattgtcggcgcgggcgtcaaaatcgtgccgcagggctatcaatggacggtagaacgttttggtcgctataccaaaacgttacagccggggctcagtctggtggtgccgtttatggatcgcattggtcgcaagatcaatatgatggagcaagtgctcgatatcccttcccaggaagttatctcgaaagataacgccaacgttaccatcgacgccgtgtgctttattcaggtgattgacgcgccacgcgcggcttatgaggtcagcaatctggagctggctatcatcaacctgaccatgactaacatccgtaccgtgctgggttcaatggaacttgatgaaatgctctctcagcgcgacagcatcaactcacgcctgctgcgtattgtcgatgaagccaccaacccgtgggggattaaagtcacccgtattgaaattcgcgacgtgcgcccaccggcagagcttatctcttcaatgaacgcgcagatgaaagcggaacgtaccaaacgcgcttacatccttgaagcggaagggatccgtcaggcggaaatcctcaaagccgaaggtgaaaaacagtcgcaaatcctgaaagcggaaggcgaacgtcagtcggcgtttttacaggctgaagcgcgtgaacgttccgctgaagcagaagcccgcgccaccaaaatggtgtctgaagccatcgcctcaggtgatattcaggcggtgaactacttcgtagcgcagaaatacaccgaagcgttacagcagatcggttcgtccagtaacagcaaagtggtgatgatgccattagaggccagcagcctgatggggtcgattgccgggattgccgagctggtgaaagacagcgccaacaaacggactcagccatgatggagttaatggtcgttcatccacatattttctggctcagtctcggcggtttgctgctggcagccgagatgctgggcggaaatggttatttgttgtggagcggcgtggcagcggtgattaccggcctggtggtctggctggtgccgctgggttgggagtggcaaggggtaatgtttgccatcctgacgctgctcgccgcctggctgtggtggaaatggttgtcgcggcgggtgcgcgaacaaaagcacagcgatagtcatttaaaccagcgcgggcagcagctgattggccgacgttttgtgctggaatctccgctggtcaacgggcgcggtcatatgcgcgtcggtgacagttcatggcctgtcagcgccagcgaggatctcggtgcaggtacgcatgttgaagtcattgcgatagaagggataaccctacatagccgagccgtctcgtcttaatcaccctgcccgatgatgacagcagccggagagattttcgataatcgggcagtcggcgctgtcatcgccagggcaggcattcgccagtgccagcagctggtcgcgcatggattgcagctcctcaatgtgtcgttcgatctccgccaccttctccagcgtgcgccgtttgacgtcggcgctgtgccgctgcgggtcgttaaacagattcaccagctcgccgctctcttccaggttaaagcccacctgccgtgcctggcgcagtaaggtcagttcgttgagatgctgctgcgtgtaggtgcgataaccgttttcgctgcgcatcggcggcgtcaccagccccttctcttcatagaagcgaatggctttgctagtcaggccggtaatttttgctacatcgctgatgttcatcgttcgcgcaacgcctcctgtgctttgttaaagggtttcaacagatattcaagcacgtttttttgccagtgcgaatatcgaccgccaccacaataatacaggaagtactgcgcacagagagatgttatacggttttattgcgcttcatgaccattgccacaataaggctgagtaagagtgagccaataatccatatcaacgcacggctaccctgggaccacagactgtagataaagccaacgatcaccaacaacatcaccaacgtaccaacgataagaatcggcaacgaggcgtgaatatcatgacgcaggcggatcgccaccacaaacaccgccaggtagcaaatcaaaaaggtggcgctggcaacactggcgagtgagcctaaatttagcgccgccgtcatcagcataatcaacaccacgacaatgatgttgccccaggtactctgccgccacagggatttattcattagcttcggcagttcgcgttcgctgcccatgttgtccatgatgttaaacacggcgaacaggttcgcgttaatggctgaagccgtcgccagtaaagcgccgatgacgacgatcacataaccaccatgtccgagcagcggagaagcagcctgcgctacggcggtatcggcatatttttctaactctaatgccgatacatcgctaagcaaaaccagtgccagcgagatataaagcaacgtggtaacgccaatcgccaccagaaacgcccgcggcataatgacctgcggatctttcactttatccgccgcgttcgccatcatgccaaagcccgcataggcaaggaaggttatcccgatacaggagaagaacgcaccggagctggggggcgcagagacggaaatatgcgccggttgcagcgaccagacaccggcaataatcagcaataacaggatcatcattttaatgccgacgaggatcacttccagccgccctaccgcatggttgcttaaggagttgaaaagcgtcatcaccgcaatgatccccaacgcgtagagcaaaataaggtgctcctcctggctgccttcatgcaaaaactgcacggcataagcgccaaaagcacgggcgaccatggcgatgctcaccgccagcgtcaacaggtacagtaacgagagcgccagcgaaaagacgccgttgcctaatccgcgacgaaagaagtcgataatgccgccattgctgggatagctcgcccccagacgcgcataggcataaccggaaaacatcgccacaataccgccaaaagcaaaggcgacccaggtcgaggcttccatcagcaacgcagcctgccccagcagcgcgaagatccccgcccccaccattgccccaatgccgatggaaacgacgttccatagaccgaggggtttgttaccgttattaccttccgtgttcatcatgatcagcccttaaacacgttatagccgagttgcttagcgaccgatgccaccattttttgaccgcgaacactgttgccttcttcgtccagcggtggtgagaacgcggcaattcccatcacaccagggacgaccgccagaataccgccacctacaccgcttttgcccggtaaaccaacgcgatatgcccagtcaccggagcgaccatacagcccttccatcatcatttcggccagaatgtacggcacgttatcggcctgaagaacgcgtttatgcgtcagcggattcactccccccgccgccagcgtcgcgccaagtgttgccagttcaacagtattgaggagcgtggagcactgacgggtgtacacgtcacaggcttccattgcatcacaatagagatatccggcggagtacagcagccaggcaatggcccggttatggaagttggttgtttgttccgactggttgacttcgtcagagagcgctacctgctcaccagccagttgctgttggatatgtaaaattcgctgccagcgttgttcaacattttcagcgttaatcaggctggtggtggcaatggcgccagcatttaccagtggcgaaagcggtttgccgccatgcaactctaaggcgataactgagttaaagggcaatccggtcgggtcagcgccaattttgtcctgtaccgcctgcgggccgacatcctctaacgcaagggctaacgtacagactttcgagatggattccagcgcaaagcgataatcactgtcacccgcactatagaccttgccatcgcaggtcacgatagccactgccgccagttgaccaggcacattcgccagaaagggaatgtagtcggcattttgaccgccgttaagtgagtgaaattgggtgtaagcctgatccactgcctgctgtaatttgtttgcatctaacatcttttgttaactcctttttatagatgcgggaggtaattcctcaccccggtgccgattttcaggcatcctgatttaacttagcacccgcaacttaactacaggaaaacaaagagataaatgtctaatcctgatgcaaattgagccaattttttaatctttacggacttttactcgcctggtttattaatttcttgaccttccccttgctggaaggtttaacctttatcacagccagtcaaaactgtcttaaaggagtgttttatgtcacaaattatcgacctgaccctggacggcctgtcctgcggtcactgcgttaaacgcgtgaaagaaagtctcgaacagcgcccggatgtggaacaagcggatgtgtctatcactgaagcgcacgttaccgggactgccagtgcagaacagctgatcgaaaccatcaaacaagcgggttatgacgcatctgtaagccacccaaaggctaaaccgctggcggagtcatcaatcccgtcggaagcactgacagcggtttctgaggcgcttccggcagcgaccgccgatgacgatgacagccagcagttgctgctgagcggcatgagctgcgccagctgtgtcacccgcgtacaaaatgcgctgcaaagcgtaccgggcgtcactcaggcacgggtaaacctggcggagcgtactgcgctggtgatgggcagtgcctccccacaagatttagtgcaggcggtggaaaaagcgggctacggcgcggaagcgattgaagatgacgcgaaacgccgtgagcgccagcaggaaaccgccgttgctacgatgaagcgcttccgctggcaggcaattgtcgcactggcggtgggtatcccggtgatggtctgggggatgattggcgataacatgatggtcaccgctgacaaccgcagcctgtggttggttatcggcctgataaccctggcggtgatggttttcgccggcggccatttttaccgcagtgcatggaaaagcctgctgaacggtgcagcgacgatggatacgctggtggcgctgggtactggcgtggcgtggctctattcgatgagcgtcaacctgtggccgcagtggttcccgatggaagcgcggcatctttactatgaagccagtgcgatgattatcggtctgattaatctcggccatatgctggaagcgcgcgcacgtcagcgttcttctaaggcgctggagaaattactcgatttaaccccaccgacggcgcgagtggtcaccgcagagggtgaaaaaagcgtgccgctggcggaagttcagccagggatgttactgcgcctgacgaccggcgatcgcgtgccggtagatggcgagattacccagggcgaagcatggctggatgaagcgatgctgacgggcgaaccaatcccacagcaaaaaggcgaaggcgaaagcgtccatgccgggacagtggtacaggacggcagtgtgctgtttcgtgccagtgcggttggcagccataccacgctgtcacggatcattcgcatggtgcgccaggcccagagcagcaagccagaaatcggtcagctggcggataaaatctcagccgtatttgtacctgtggtggtggtgattgcgctggtcagtgcggcaatctggtacttctttggtccggcaccgcaaattgtttataccctggtgattgccaccacggtactgattatcgcctgtccgtgtgcgctggggctggcgacgccgatgtcgattatttccggcgtcgggcgggcggctgagtttggcgtgctggtgcgggacgccgacgcgctgcaacgcgccagtacactcgataccgtcgtgttcgataaaaccgggacgctgaccgaagggaagccgcaggttgtcgcagtgaaaacgtttgctgatgttgatgaagcgcaggcattgcgtctggcggcggcactggagcaaggttccagccatccgctggcacgggcgatcctcgataaagcaggtgatatgcagctgccgcaggtcaacggtttccgcacattgcgcgggctgggcgtgagcggtgaagctgaaggtcatgcgttattgctgggcaatcaggcgctgttaaatgagcaacaggttggtaccaaagctatcgaagcggagattactgctcaggcatcgcaaggagcaacgcctgtgctgctggcgattgacgggaaagcagtagccctgctggctgtacgcgatccgttgcgtagtgatagcgtggcggcgctgcaacgcctgcataaagcgggatatcgtctggtgatgttgaccggggataacccaaccaccgccaatgcgatcgccaaagaagctggaattgatgaagtgattgccggagtgctgccggacggtaaagccgaagcgatcaaacgtctgcaaagtgaaggacgtcaggtggcaatggtgggcgacggcattaacgacgcgccagcgctggcccaggcggatgtcggcattgcgatgggtggcggcagtgatgttgccattgaaaccgcggcgattaccctgatgcgccatagcctgatgggcgttgcggatgcgctcgcgatttcccgcgcaacgctgcgcaacatgaagcagaacctgctcggtgcctttatctacaacagcatcggtattccggtcgccgccggtattttgtggccgtttactggaacactgcttaacccggtagttgccggagcggcaatggcgctctcgtcgattaccgtagtgagtaacgccaaccggttgctgcggtttaaaccgaaggaataagtacgtcattgcggatgcgctgctttagggcggcgcatttggcatcgacgcatgactgccggatgcggcgtaaacgccttatccggcctacgagatgaagcgatgttttggccttacgcgaccttttttgcacgctcttcacggcgtgccaaatattcagccactgtttcaatccgtcccaattcttcctgggtgcgcatgttgttttcaacttcccaaaaatcaactgccgcctggaggtttagcctaaaatcgactgtggtatcaaaaactttcgccagacggaatgccatctcagtggtgagtttacgattgttattgatcagtgcactgacgctattacgatgaacatgcagcaactctgctaactcattgattttcaaatcgagcggttccagatattcatagagaagaatatctccgggtgtcgtcggttttcttgttgcctgtttcatggtttttaactgttgcttccctgtgaatagcgatgcaagaacatactgaatcatacaaacacattaaacaagtccccaactccatttgcgccatccctcaccgcgcgctagcatgatatttcacaaagggaggtcgtatggatctgttgtaccgggtaaaaacgctttgggccgcgctgcgcggtaatcattacacctggcctgccatcgatatcacccttcccggcaatcgccattttcatctgattggcagtattcatatgggtagccacgatatggctcccctgcccacccgtttgctcaaaaagctcaaaaacgccgatgcgctgatcgtcgaggcggatgtttccaccagcgatacgccttttgctaatttgcctacttgcgaggcgctggaagagcgcattaacgaggagcaactccaaaatctgcagcacattagccaggagatgggcatttctccgtcgctcttttctactcaaccgctgtggcaaatcgcgatggttcttcaggcgacgcaggcacaaaaactggggctgcgggcagaatacggtatcgattaccagttattgcaggcggcgaagcaacaacataaacccgtgattgaactggaaggggctgaaaaccagattaccatgttgctccagctccctgacaaaggactggcgctgctggacgatacgctgacccactggcataccaacgcacggttgctgcaacaaatgatgagctggtggctgaatgcgccgccgcaaaataatgaaataacgctgcccaatacgttcagtcagtcgctgtacgatgtgctgatgcatcagcgaaatctcgcctggcgggataaattacgcgccatgccgccggggcgatatgtggtcgcggtcggtgcactacacctgtatggagaagggaatttgccgcaaatgttgcgctaaaaaaatggccaatatcgctattggcccgtcaaagaggaatttcatttttttattattatgccgtcactttaagcgacggtgtaactcgattgtcgctcaatctcaccatcctgccaatactcttaggcaagatgactcttttttttggaccgccatcaggcgtatgcttgcttcgtttttttgtttaaggcaggaaaattaccatgacacccgcagttaaattactcgaaaaaaacaagatttcgtttcaaatccatacctacgagcacgatccggctgaaaccaattttggcgatgaagtcgtcaaaaaattaggtttgaatccggatcaggtctacaaaacgctgctggtggcagtgaacggtgatatgaaacatctggcagtggccgttacgccggttgcaggtcaactggatcttaaaaaagtagcaaaagcgctgggtgccaagaaagttgagatggccgatccgatggtcgcgcagcgttcgacgggatacctggttggggggattagcccactggggcagaaaaaacgtctgccaacgattatcgacgcccccgcacaagaatttgccactatttatgtttccggcggcaagcgcggactggatatcgaactggcggcaggcgatctggcaaagatcctcgatgccaaatttgctgatatcgcccgccgcgattaagcattgtgccggatgcaaacatccggcactttcggattactgccagctcacctcacctttcggttcataaacactcacatccagcggcgagcttttctggatatacgctttcagcacttcggcatcaataaagccggtattcacatagcccggtttgttatcaaggcgcggatatccatcaccgccggtggcattgaagtttaatgtcgccatacggtaagttttcgccggatcgaccggttcgcctttgattttaaggtcgttcagtttgccgtctttcgccacaaagctaacgttggcaaattgcgggtaggcacctgaatctggcttcatctgcgcgacggcggtcaggtaatcaatcacctctttaccggtcatgtcggcatacaccaccacattgccgaatggctgcactttcagcacgtttttatagctgatatcgcctgcttcgatagaatcacgaattccgcctccgctcatcaccgcaaagtcggcaccagtgcgatccatttgggctgccagaatcaaccgccccatattagtctgtacaaaacgcactttgtcacgatcgccttccagacgaccattggtttcgcctattttcacttccagctgcgctttgcctttgttctggaacggtgataacagcgagatcatttgctggttttcagcgatttcaggagtgtaaagcacgcgctcgcttttcccgtcttcccaggtcactttcttcttcaggttcaccggaatcagctggtagttaaccattttcatttcgccattacgaaactcaaaatcagcccgtcccacgtatttgccccactcatgcgcctgcacaatccagatgccgttttgttgatctggcttgcatggcgtacccggcacgtaatcgacctgttttttgttttctgccgccatgcagaccggatcttgcgagtaaccaccgacgatcatcgccagcgatccggcaggcagcgcgcgtgccatctccacatcgcccggtgcgttagagccgtgctcaccattatcgtaatgccccatatgggtcgccgcgataataatgtctggcttttctgtctgttgcagctcctgaatcaccagcttcgcttcatcggcgggcttacgaaattcgacatcagtgaagtattccgggttaccaatttttgctgtgtcatcggttgtcagcccaatgacggcaattttcagatcctgacgcttaaacagcgcccacggtttaaacaggcgctcgccagtacttttctggtagatatccgcggaaagcaacgggaacttggcccacttttcctgctggcgtaatacggtgagcggattatcaaattcatgattaccgatcgccatcgcgtcatagcccaccagattcataccgcgaaaatcaggttcggcatcctgtaagtcagactcgggcacgccagtgttaatgtcgccaccggaaagtagcagcacgctaccgccttcagccgcaacctctttgcggataccatccaccagcgttttttgcgccgccagaccatattcgccatattcattgcgccaaaaatgcccatgatgatcattggtatgcagaactgtaattttgtaggttttatcctgctcatacgccagagcagtttcactcgccagtgtaaatgtggttaacagcgctaacgccacgccccgctgcaataatttcatacttctctccctgacctgatttcaacgtgttgaaaaatagtatgacgcgacatcatagacaagtctgcgtccggtgaagataaatctgcatccagattagaaattctgtattcggcgttgagacttccttcaggcgacgcatacaggtatgttagtcgggtaataatcacaaataagatcattctttacatcgcaaccctgaaaaagtgactttcctatggcaatgagtgaacaaccccagcctgtggcgggcgcggctgcgtcaacgaccaaggcccgaacatcgtttggtattttaggtgctatcagcctctcacatctgctgaacgacatgatccaatcgctgattctggcgatttatccgctgcttcagtcagaattttctctgacatttatgcagattggcatgataaccctcaccttccagctcgcctcttcgctactgcaaccagtggtcggctactggaccgataaatatccgatgccgtggtcgttgccaattggcatgtgctttaccttaagtggtctggtgctgcttgcgctggcgggcagttttggcgcagttctgctggcggcggcgctggtcggtaccggttcatcggtctttcatccggaatcttctcgcgtagcccgtatggcttccggcgggcggcatggcctggcgcaatctatctttcaggtcggcggcaactttggcagttccctgggacccttgctggcggcggtgattatcgcgccttatggcaaaggcaacgttgcctggtttgtgcttgcggcactgctggcgatcgtggtgttggcgcaaattagccgttggtactcggcacagcaccgaatgaataaaggaaaatccaaagcgacgataatcaatccactgccgcgcaacaaagtggtactggcagtcagcattctgttaatcctcattttctcgaaatatttctatatggcgagcatcagcagctattacaccttttatctgatgcaaaaattcggattatctatccagaatgcccagcttcatctgtttgccttcctgtttgccgttgcggcaggtacggtgatcggcgggcctgtaggggataaaattggacggaaatatgtgatttggggctctatcctcggcgttgcgccgtttacgctgattttaccctacgccagcctgcactggacgggggttttaacggtgattattggatttatcctcgcttcggcattctctgccattctggtctacgctcaggagctacttccgggacgtatcggtatggtttctggactctttttcggttttgcttttggcatgggaggtctgggagcggcagttctggggcttatcgccgatcacaccagcatcgagttagtctataaaatctgtgctttcctgccactattggggatgttgaccatattcctgcctgataaccggcataaagactgatttcattgcagccaaaggcaaactttggctgcatcgttttacagtcgccataagcctttcctctgttaaaccgccttctgttttccgatccgtgctttttttgcagctaattccatttttctgcaaaattcaataattattcatgaacatcatcaatgaaattgtcataaactattacctgtaattttggttttcccggccaaaaatggacaataaccaccaggaaaaggagacggaatgcatcacgccaccccgcttatcaccaccattgttggcggccttgtgctcgcctttatcctcggcatgctggccaataaactacgtatttctcctctggtgggatatctgttagcgggtgtgctggcaggaccattcactccgggctttgttgccgataccaagcttgcgccggaactggctgaactgggcgtcattctgttgatgtttggcgtcggtttgcacttttcgctgaaggatttgatggcggtaaaggccatcgccattcccggtgcgatcgcccagatagccgtggcgacgctgctgggtatggcgctctctgccgtgctgggctggtcgttaatgaccggtatcgtgttcggtttatgtctttccaccgccagtaccgtggtgttactgcgcgcacttgaagaacggcaattaattgacagtcagcgtgggcaaatcgccatcggttggttgattgtggaagacctggtaatggttctgacgctggtgttgctgcccgcagtggcaggaatgatggaacagggcgatgtgggctttgccactcttgcagtcgatatggggatcaccatcggcaaagtgatcgcatttatcgccattatgatgctggtaggtcgccgtctggtgccgtggattatggcacgcagcgcggcaaccggttctcgcgagctgtttaccctgtcggtgctggcgctggcgttagggattgcctttggtgcggtagagctgtttgatgtctcctttgcactcggtgcgttctttgccgggatggtactgaacgagtctgaactgagtcaccgtgccgcccacgatacgctgccattgcgcgacgcgtttgcggtgctgttttttgtctccgtcgggatgttgtttgatccgttaattctgattcagcaaccgctggcagtgctggcgacgctggcgattattctgtttggtaagtcgttagccgcatttttcctggtgcgactgtttggtcactcccaacgtacggcattaaccatcgccgccagcctggcgcagattggtgagttcgcgtttatcctggcgggactgggaatggcattgaatttactgccgcaggccggacaaaacctggtactggcaggggcgatcctgtcgattatgctcaacccggtactgttcgcactactggagaaatatctggcgaagaccgaaacgcaggaagtgcagacgctggaggaggcagtcgaagaagagaagcagttcgctgtggatatttgcaaccaagggctagtggtgggtgacggtcgtgtaggcagcctgctgggggagaaattgctcgcctctgatattccgctggtggtgattgagacgtcacgaacccgtgttgatgagctgcgagagcgcggggtccgcgcagtattgggcaatgcggcgaacgaagaaattatgcaactggcgcatctggaatgtgcaaaatggctgatcctgacgattcccaacggttatgaagcgggtgagattgtggcatctgcccgcgcgaaaaatccggatattgagattattgcccgcgcccattatgacgatgaagtggcgtatatcaccgaacgtggtgcgaatcaggtagtgatgggcgagcgtgaaatcgcccgtaccatgctggaactgctggaaacgccaccggcgggtgaggtggtgacggggtaaacggtggttgccggatgtaaaatatgaaaaatatgtaggcatgataagacgcgccagcgtcgcatcaggcatcgagagccaaatgccagatgcggcgtgaacgccttatctggcctacgaaccgacgataacttaacgatcccagtaagactcttccaggctgtcttcacgctccggcaagccgcgcgttaaacgaggtgaatgctggttcagtacctgatagctcacacggttagcatatttacacacctgcgctaacgatgaataagttaaccaggtgaatttatgtttgctggagtttggtacgttgctacgatggtagctgttggcggtaatgtcatgcagcaacgctgccaatgcgccatcccccgctccattagtgttcatgattttttccggcccgcccatgtacggcgcaatgtgcgaatatacacgcagcggattctggcaatccttgtggcgcatggcgcggctaaactcatactggttgaattccgctatagcgcccggcagcagcggatgctgggttttacgtttcgcttcgtcttcggtaaagcccgccatatacaagccgattggcccggcggtgcacagcaccagatctacccagtccagcgccttgtcagatgccaacaacggatcgctttctccggtcaacgcttcggcttcatcttcgttcatcgcaaggatagagacgtggtctttgaggaattgctgccaccactgcggattctcggcaatgacaaacttagttcccagcgtcagcaccaccggtacgttatatttcttcgcgtactcaatggctttcatggttgcttccggcatgggttcacccggcttgcaacgcaccagataagaggtgagaaccagagccgaggctccggcaatcacatcttccggaatactttcagcccgcagctggttcatgtggccagggctgatagcaaaggtacgttccccggactcgccaatcagcgtaaagcaacgaccaatcgggccatccacgccttgtagatagttaagatcggtacggctggaggtgttacacaggtaacgataggcatagctgccaatttcaatattgctgcacatgacgcccagcagcaccgaacggtcgtccgcgagcaccgagtagttatgcatggtgttaccaatggtgccacccgcaaactgatgggtaatcaggtttttctgttttagttcctgataaagcgcttcggctacatcatcctcaatcaccagtgaatgcccggcgcttaatccataacgctcaatgaattcatcatccactttcgcttcaatatcgaccagcgtttgatcgatacccactacccaggcagcgctggtttcgttttctggctggaattgctgaagcagcggatcgcgtgcatttacggggaagtaatgtttggatttacgtttaccgggaaatttcatggttgtttttacgggtggttaactgagcggcgaatgttaacacaatctgacgggagcgcgcgagacgcagccagtttcaatatcagcaggcgggatcgcattttcatggcagtggttccttacaatgacgtaatttgaaaggagtttttgtatgaagccggaaaacaaactacctgttctggaccttatttctgctgaaatgaagaccgttgtgaatactcttcagtcggatttaccgtcctggcccgcaacgggaacgattgctgagcaacgacagtattacacgcttgagcgccgattctggaatgcgggcgctccagaaatggcaaccagagcttacatggttccaacaaaatatgggcaggtggaaacacgtctcttttgtccgcagccagatagcccggcgacgctattttatttgcatggaggcggttttattctcggcaatctcgatacccacgatcgcatcatgcgcctgctggcaagctacagccaatgtacggtgattggtattgattaccccctttcacctgaagcgcgttttccgcaagcgatagaggaaattgtggctgcttgttgttatttccaccagcaggcggaggattatcaaatcaatatgtcccgcattggctttgccggtgattccgcaggtgccatgctggcgctcgccagtgcgttgtggttgcgtgataaacagatcgattgcggtaaaattgcgggtgttttgctgtggtatgggctttacggattacgggattccgtgactcgtcgtctgttgggcggtgtctgggatggcttaacgcaacaggatttgcagatgtatgaagaggcgtatttaagcaacgacgcggaccgcgagtcaccgtattactgtctgtttaataatgatctcactcgcgaagttccgccctgttttattgccggggcggagttcgatccgctgctggatgacagccgtctgctttaccagacgttagcggcgcatcagcagccctgtgagttcaaactctacccaggtacgctgcatgcctttttgcattattcacgaatgatgaaaaccgccgacgaggctcttcgcgacggcgctcagttctttaccgctcagctttagcgatacgcggcaacaagattagccatcatttcgatatgttccggcgtggcattaagcgctggaatatattcatattttttcccgccggcaccgaggaagacctcacggttttgctcggcaatctcttccagcgtctccagacaatccgcagcaaagcccgggcacatcacctgtatatgacctacgcctttttctccgagcattttcagcgtttcgtcggtataaggcatcagccagggttcccggccaaagcgcgactgaaaggtcatcatcactttttccggtgccatccccagtgcggaagccagttcgcgagtcgttgtgcggcaacgttgcgggtaatcatcgccttcatctgcataacgctggggaatgccatgataagagagcagcagcagatccggttcgccatgtttggcaaaagaagcgcgtacgctgttcgccagtgcattaatgtaatcgtggttatcggcgtaatcacgaataaacgatatccccggaatgctacgtttgcgcgccagaatgcgtgccagttcatcccataccgcaccgaccgtagaacaggagaattgcggataaagcggcagcaccacaatatgatctacatgctctgccaggagttcatcgacggcgctttccagtgatggcgagccgtagctcatgcccagcgctacgggcgtatccggtaaacgttgtgccaacgcctgctgttgctggcggctgtaaaccatcagcggcgagccgtcttccatccagaccgaggcgtacagcttcgccacacgcggcgagcgcagcggcaaaatcacgccgcgcagcaacggccaccataacaaccgtgaggtatcaaccacgcgtctgtcgcttaaaaattgtttcagatagcgttttaccgcttcaggtgtgggggcatcgggcgtacccaggtttgccagcaggataccggttttagtctgacgcattaccgcctcttatcgattcaacttgttgataattgtagcggaaaagtgaggaagaagaactaattgctgtgagaggtcaaatcagaaaaaggaatagcgcagattgaggtttttgtaaaaggccgaatgaatatccggcctgagattgctgataagtttgcttgtgcgggcctgttcccctcaccctaaccctctccccgagggggcgaggggactgtccgtgcgcgctttcgaattagccgaggattttttccagatcagcgcgaacttcagcaaccggcttggtgccgtcaactttcgcgtatttggtgttacccgcttccgcttctttggagtagtagccgatcagcggtgcagtcatctgatggtattcaaccagacgtttacgcacggtttcttcctgatcgtctttacgggtagtcagttcttcaccggtaacgtcgtctttgccttctactttcggcggattgaatttaacgtgataaacacgaccagacggcgcatgaacgcggcggcctacgatacgatcaacaatcagttcgtccggtacgtcgaattccagaacgtaatcaacattgatgcccgcttctttcatcgcgtctgcctgcggaatggtacgcgggaagccgtccaacaggaaaccattacggcagtcttcctgagcaatgcgctctttaaccagcgcgatcaccagttcgtcggtgaccagtttgccagcatccataatgtcttttgcttgtttacccagctcggagccagatttgaccgcagcacgcagcatatcgccagtggagatttgcggaataccatatttctccatgatgaactgagcctgagtccctttccccgcgcccggagcgccaagcagaatgatacgcattgcgaaaatccccttaaaatgtgtcgaattttttgaaaaagcgataaacgataccaccaacaggcgattgcctcaagaaaggcacctgaggctgaaacggttaatggcgagataatttgcggaaagtgcagatgatgaaaagaaaaatgccggatgacacaaaggtcatccggcatgacatcaggaaaccagcagctggttcatacgacgaataaacaggttcggatcttccagcgtgccgcgttctgccagcagcgcctgatccagcagcagttctacccactcgctgaacttcgcttcatcttcagtatctgccgcacgtttcaccagtacgtgatccgggttcagttcgaagatgtatttcacttctggcactttctggcccgccgcagcgaacagtttcgccatctgagtgctcatttcgtccgcgtcggtcgaaacgatcgctggcgtatcggtcagacggtgagtcagacggacatctttcacgcgctcgccgagcagggctttcacacggtcgatgaacggagtcagtgctttctccgcttctttcgcgctctcatcaacttcgtcagccagtttttccagcgactcgtcaactttagacaccgactggaacggtttaccgtcgaactcagtcagatagttcatcatccactcatcgatgcggtcggaaagcagcagaacttcgatgcctttcttacgcagcagttccaggtgcgggctgctcttcgctgccgcatagctgtctgcagtgatgtagtagattttctcctgcccttctttcatgcgggaaacgtagtcttccagagacacggtctgcgcagaagaatcggtataagtagaagcaaaacgcagcagtttggcgatcgcttcctggttagcgaaatcttccgccggaccttctttcagtaccaggccaaactgttgccagaaggtctggtatttttccgcgtcgtctttcgccagtttttccagcatttgcagcacacgcttggtcagcgcattgcgcaggttacgcgttaccgtgctgtcctggaggatttcacgggaaacgttcagcggcagatcgctggagtcaatcagaccacgcacgaagcgcagatagttcggcatgaactgttctgcgtcgtccatgatgaacacacgctggacgtacagtttcaggccgtgtttatgatcacggttccacatatcccacggagcctgggacgggatgtacagcaggctggtgtactcctgcttaccttcaacgcggttgtggctccaggtcagcggatcattaaagtcgtgggcgatgtgtttgtagaactctttgtactcttcatcggtgattcccgacttgttacgagtccacagcgcctgcgctttgttgattttctcccaggagataacggtttcgccgtctttctcttcgcgtttttcgatctctaccggcagcgcgatatggtcggagtatttgctgatgatggaacgcacgcgccagtcatcgaggaactcgtcttcgccttcacgcagatgcagggtgatttcagtaccacgatcttctttggtgatgtcggcaacggtatattcaccttcaccagccgattcccagaagacgccgttttctggtttttcgcctgccgcgcgagtacgcacggtcactttgtcggccacgataaacgcagagtagaaaccaacaccaaactgaccgatcagctggctgtctttcgcctggtcagaacccagggattcgaggaatgatttggtaccggatttagcgatagtccccagatggtcaatcacttcgtcgcgggtcatccccacgccgttatcggagatggtcagcgtgcgcttgtctttatcgaaagagacacgaacgcgcagttcgccatcaccttcgtacaggtccgggttagatagcgcacggaaacgcagcttgtccgccgcatcggaggcgttagagataagctcacgcaggaagatttctttattggaatagagagaatggatcatcaggtgcagaagctgtttcacttctgactgaaaaccacgagtttcttgtcctttcatgtaggtctacctcaataatgccattttaaggttaaaaacaggatgagggagagatggggacaagggagaataatttcaagcgagagcaggtgatcctgctctcgtttgcttaaaaacgaatcttatgacgcccggcaagggagtgtgacagcgtggtgccatcgaccatttccagttcgccgccaaccggtacgccatgagcgattcggctggcttccacgtcatattgcgcgcaaagctcggcaatgtagttagcggtagcttcaccttcaaccgtgggattggtggcgaggatcacttcagtgattttttcctctgccagacgctgttccagacgatcaaggccgatatcatccggaccgatgccgtccagcggtgacaggtgccccatcaacacaaaataacggcctgaaaactgccccgtctgctcaatggcgtagatgtccgccggactctccaccacacagatttgaccgttttcctgacgacgcggattcgaacagatgttacagacttcctgttcggtgaaagtgcggcaatcggcgcagtggccgatttccgacatcgcccgggtgagcgcctgcgccagacgcatcccgccgctacgatcgcgctgaagcagcgtgaacgccatacgctgcgccgacttcgggccaacgcccggcagacagcgcagtgcttccataagctgtgttaacagcgggctggtttgcatcagaacggcatcttaaagccaggcggcagctgcattccggaggatacagaggccattttttctttctgcgtttcttcaatacgacgtgctgcgtcgttgaatgctgcagccaccaggtcttccagcatctctttgtcgtcttccagcaggctcgggtcgatctctacgcgacggcagttgtgtgcaccgttgatggtcacttttaccagacctgcgccagattcgccggtgacttccagctgcgcgatctcttcctgcattttctgcattttttcttgcatctgctgggcttgcttcatcaggttacccagaccgcctttaccaaacataggtttctctctcaatcacgttaaggatgacgaacgtaagctgtgcttacgatcaaatggggcggatactttcttcatccagctccgcatcgaagaaccgacgcagggtctgaatattattatccgcaataatggactcgcgcgcctgcgcaagtttttcttcgtatatcgcctgacgccactccagcggcgtacgcaccgcgggattatcatcttcaacgatagtcagttcaaccgttgaaccttttaacgtgctcaacgcttcagccagtttttgctgtgcaccgcggttgttcaaatgccgctgagaggagcgcaaatgcagacatactgcgttgtcgctctcctctttccaggcatttaaggccacctgttcgaccagttttggtagcgaaagttgactcacctgtgccgcccacgcgtcgcgctcaatggcttctgccgccagcttcgccgccagttccggcgttttttcatgttccagcgcttttttcagcgccttcggcgtggcgaccacttctttttgctgcatcactggagtggtagccttccagcgatacgcttcttttttggctggcgctttttccagcgccgatggcaccggacgcgcctgaacgcgatcggtgaccgaagccagtctttccagcgcagcgttattcaccggccgcgcgcgggtagcggctgccggttcactcttttttgctttggttgctccctgcacgcgctgcaactgctggcgcgccgccagcacctggctggtggtttccgggagcggtacagtcggtgcctgctgcggcgctgattgcggttgcggcggcacctgggttggcgtcattactgccgttggcgcgacgggcgcaaaggactggcgtggcacttctggctcaggcagaggcatacgtggatggaacgccagcgcgcgcagcagcgtcatctcaacgcccatgcggcggtccggcgcatacggtaattctttgcgaccaatcaacagcgtctgatagtaaagctgaatatccgtcggcggtatggtgcgcgccagttcacgcatccgcagctcaatggcggccatgtcgttgccaagtgcagcaggcgaaagttgtaccatcgcaatacgatgcaacaggccgagcatttccaccagcaacgcttcccactcgataccacgggcagcggcttcattaatcagcgccattacgcgctcgccgttggcctcgaccatcgcttcaaccagcgacagcgcctgatcgtcgtcaagcgtacccagcatcgcactgactgcctgggttgaaacctggccgtcaccgctggcaatcgcctggtcggtcagacttaaggcatctcgcaggctgccttcagcggcgcgcgccagcaattgcaacgcccgcggctcgtgagcgatatgttcttcgttgaggatgtgctcaagttgatggcgaatttgctcgacatccagcgccttgagatgaaattgcaaacagcgcgacaaaatcgtcaccggcaatttctgtggatcggtcgtcgccagcagaaacttaacgtgctccggcggctcttcaagggtttttaacagtgcgttaaagctgtggcgcgacagcatatgcacttcgtcgatcagataaactttgaaacgaccacgcgccggagcgtactggacgttatccagcaggtcgcgggtatcttcaactttggtgcgcgaggcggcgtcgatttcaatcagatcgacaaagcgcccctgctcgatttcacgacagttatcgcacacgccgcacggcgtcgcggtaatgccggtttcgcagtttagccccttcgccagcagtcgggcgatagaggtttttccgacgccacgggtaccggaaaaaagataagcatgatgaatacgccctaacgacaagccgttcgccagtgcggtcagcacatgttcctggccgacgacgtcagcaaaggtttgtgggcgccattttcgggctaagacctgataactcattggcaggctctgaaacgctggaaggtggattcacgaaggggtaatgctaacacagccccgtcagaacggcgaggctgaatgcacatcttgtgctgtccgtagcgtgggcagcacaagactggcgataattaatggcccgggaacgggacaaggctgtagctggtaatgccctgtttttcgagacgctgttcgccgccgagatcgaacaggttgataatgaacgcagcgtcagccacttcaccacccagacgacggatcagtttaacggtcgcttcgatagtgccgccggttgccagcagatcgtccaccaccagaactttgtcgcccggtttgatggcatcaacgtggatctccagctgatcggtgccgtattccaggtcgtaagtttcactgatggtttcacgcggcagtttgcccggtttacggaccggtacaaagccaacgcccagacccagagctaccggagcgccaaacaagaagccacgcgcttcggtgccgacaactttggtaatgcccgcatttttgtaacgctcaaccagcaagtcgatgctgagagcgtaagctttcgggtcttccagtaagctggtgacatcgcggaaaagaatgccgggttttgggtagtcctgaatgcttttgatgctatttttgagatactcaagctgctgtgcagtcgcggtcataagtgtatgcctgcttgttacggtggtactcacggcgcgttttaaacgtatcaaaagtaacagttgtttaacctttgaccgcctgcgcctgtgctcgaaaacgccagaatgtactggctgtacgcaataattgcaactgcgattgttgtgcttcagtgcttttcttgcttttcatcaatcaccggaattcgccacatatagaaaagcaaacaggcgagaattaccagcaacatgatgcgcacccatggcatctggacgaaccacagagaaatggcaaacgtgagcaaaataagcaaaatcgcccgcggtttgacgccgcgcggcatcgcatgatgtttctgccagaaacgtagatagctgccaaaccatgannnnnnnnnnnnnnnnnnnnnnnnnnnnnnnnnnnnnngtacagcaaccaggcgtgaaagcgcggggaagaacgggcaaagcaccaggccgccagcaggataaacggcgtcgtcggtaataccggtaataccacgcccagcgtacccagcactaccgccagccagccaatgatgattaaaatgattcgttgcatattgagtgttgtcagcttacagagtggctactttagcataacaattatcattttcattgaggtcttatcgtgaaaaccgccctgctgctggaaaaactggaaggacagctcgctacgctgcgtcagcgttgtgccccggtagcgcaatttgccacgctaagtgcccgttttgacagacacctttttcaaacccgtgcgacaacactgcaggcttgtctcgatgaggcgggcgataatctggctgcgcttcgtcatgcagttgagcagcaacagctgccgcaagtggcctggctggcggaacatctggcggcacaactggaagccatcgcgcgtgaagcctccgcctggtcattgcgcgagtgggacagtgcgccaccgaaaattgcccgctggcagcgtaaacgtattcagcatcaggattttgagcggcggctacgtgagatggttgccgaacgcagagcccgcctggcgcgggtgaccgatctcgtggaacagcaaacgctgcatcgtgaagtggaagcctatgaagcgcgcctggcacgctgccgccatgcgctggaaaaaatcgaaaacaggctagcgcgcttaacccgctagcaatggagagagtatgtcactggaaaatgcccctgacgatgtcaaactggctgtcgatttgattgtgctgctggaagaaaatcagatcccagcccgcaccgtgctgcgcgcgctggatattgtaaaacgcgattatgaaaagaaattaacgcgcgatgatgaggcggaaaagtgagaaataaatggggccgctaaatgtcccctaagattgtgggcaaacgcaaaactgcctgatgcgctacgcttatcaggcctacaccgctcctgcaatacattgaattcttgcggtttcgtaggccggataaggcggtcacgccgcatccggcatgaacaacgcgcactttgtcagtaatctcggggcaactaaatgtcgccccctttggttattaccctaccgctggcgtcgggtcatcgcctttgtagtcgcgtttgacttccgtcacctcatcgcccttctcgttgtgcagatgcacttcaagctggttaaaggcaatgttgatgtcgttttcacggcacagctgatcgatagtacggttcagctcatcgacagtacgactacggtcacgcagttcacgcacatacagacgcagctcatgatccaacgtgctggcaccaaacgccgtaaagaagacttccggcattggttcgtgcatcacccttgggtgctcagtcgccgccttcagtaacactttacgcactttttccagatcggagccataggccacgccgagacggatcaccagacgcgtagtagtgtcagtcaacgaccagttgatcagacgctcggtaacaaacgctttgttcgggatgatcacttctttgcgatcgaaatcggtaatcgttgtcgcacgaatacggatcttacttaccgtccccgagaagctaccaatggttaccgtatcgccaatacgcaccggacgttcgaacagaatgatcaaaccggagacgaagttaccgaaaatttcttgtaaaccaaaaccaagacctacggataatgctgcggccagccactggagtttatcccaagagacgcccagcgatccgaacaccgtcatcgcaccaacggcaataatgatgtagttaaggatggtagtaatggcatacgacgcgccctgacgcatattcagtcgcgagagcaccagcacttccagtaaaccaggcaggttgcgaatcaacgcccaggccaccattgaggcgataatcgcaaacaacagactgcccatggtgacgtttttcaccaccgcagcgccagcttcagtgccgttgtaatgccagagcgtgatgctgtcgagatagctgaacacggtgatcaaatcggaccaaattgcccagaacatgacaccgaacagcgcaaacatcagcaacatggtaatacgcagcgtctgctggttaacctgttccagtgcaatggtgggttcttccggcggttcggcaccttctgcgccctctttcaccagattctgccgacgcgccagcgcacgacgccaggcgatacgccgcgccgctacgcttaagccgcgcaataccgtctggtagagcaagttccagatgatcaccagataaacggtttcaatccaacgcccggagaggcgcagcgtggtgtagaaataacccgtggcagtcagcaccatcaatgcaatcgggataatcgacagcacggtaatggtgaccagtcgcatggtgtgcgactctttatcacgccagctttcgcggcacattggccataccaggaaggcaatcagcagcaggttgaagaaaatcatcgcctgccccagcacatcatccatcagatgcagcggggaaagttctgccaccacagaccagaaatggataggcagcaacgcgagactgatgcggacaatttgccgacgccagtggctggtctgctgctccggcatgccgaagtgacgcacggcaacgccatttttctccagtaccttccagcacaggccaaacaccagccagaaaatcgccagttttttactgaacgaccatagcagttcgctgatgttgagctgcatggtcaacagaatcaggccaaccgcgagaataatcaggcacaccggcagcgcgcggatcaggtcgataaggatcgcttttggtgtgttgagctggctatcgttacgcagggaacccacagcggaagccagtttctgttgatacgctttcagccagcccagacgccagtggatcagcccggcaatcaacagcagcggcaaaccggcgaggaaagcgataaaaacggcaggccaggctttttcccagttcaccgtgattttcatcgacttaaattcatctttcaggctttgcgggaacgctttgatccagtcccagtccattggacggttactgttcacccaaaagatttgctgagtcaggatggatttcaggtttttcgatacgctcattaactgctgctggttgatttgcaggttaatggccatcatcagctggttacccaactgtttgttgagttgatccagcaattcgcgacgcatatcaaccacttgcaataacgcatcgtgaacttcgctgttgacttcgttggtgtgaccttcttccagtttgttgacgaacgcatcgctctggaagagtgcatcacgctgctggttaacttcaaactgttcgagacgcaaatccgcgatgcggttggtcatgttttccagttcatccgccgagggcagcgtttgttgttgctggtaaaggatacgagacaacagcaggctgcccttcaggacggcaatctgctctttaatattgcgttccgattgcagcgcccgctccagccagtttttgactttaatgttttgctgcatcaactgattaccgttttcagtcgcggtaatcagacgctgacttaactgctggttaatttccagttcctgtttcaccagcggattagcctgaatacgcgcggcttcatccggggagacggcttcctgcgccgttttttcagttaaagtcaggcgcttgctgtttaccgcttcttgcaacagctgcaactggtgctccagacgggcgctgttcgccgtcacgtaatcacgttgcttttgcaaggtatcctgcaagacggtgttcccttccaggcttttacgctgctggtcaatctccgcattcagcaacgcctgctgagcctgcattaacactttctggctgggacgtaaggcagtctcgccgacatcagtcccatccagacgactgcgaatttgttgcagctgctgcgaagcgttatacatcgcattttgcacgcgttcgggctgcgtctgtaacgaaaccagctggctgttataagacgccagatcgttttgtgcgttttgcaaatcgtccagcgcctgggcaacgcgagtttccagctggcgcaacgaaagcgtactcagaattttgcgcgtttcttcgtcgttatcgacatcgctaagtgctgttaacgccgcggtcgcctggcgcattttttccggcgcttcagcgactttttgccgtagctgaactgtctcttcttttatgcgatcgattttatcgagggtggctaatgtatctgtcagatcctgctgcaccagtttgtcctgagcagaaagatctttttgtttatttagtgagtcaagttgcgcctgcaggtccgcttttgtcggcagatcaccattcgatgacgcccgcgcaaacgccgtgttctggcataacaagacaaaaacaaaagcaataaatgctgaaaaaacaaaatgccgtgatcgtttgtaatactggaacatagtcatgatgaatgaaggtttctgaacctgaagaacgacctgaaaaagtcaaaccgcaagaatatcacgacgcagtgaaccagaatagcaacgacgaaaatgtccaggaaaaatcctggagtcagattcagggttattcgttagtggcaggattacgaagcgtggggcacaggagatacatctccagtaagatggcgacgtaatcgcgggcttcttttttaagatcaaaagattgcggggcaaagagccagttttccatcaggccggaaatatagccgcgcataataattgctgcccgacgcgtcattaaatccgcaggcaacattttcgcttcaatacaatgttttaacgtttgttctatacggtcataactttccagacagagattacgttgtgcctgttgcacaacagccatttctccgacaaattcgcatttgtggaatataatctccatcaataatcgacgtcgttcttctgtcaccgtggattcaagaacatgaattaatatctctcttaatactgagagtggatcgccagggaattttgcctgatactcaagctctagttcaccaatattggattctgacagttcccagatctcactgaacaaatccgacttgtctttaaaatgccagtagattgcaccgcgcgtaacgccagctgcttttgcaatctcgcccagcgaggtggatgataccccctgctgtgagaaaagacgtagagccacatcgaggatgtgttggcgcgtttcttgcgcttcttgtttggtttttcgtgccatatgttcgtgaatttacaggcgttagatttacatacatttgtgaatgtatgtaccatagcacgacgataatataaacgcagcaatgggtttattaacttttgaccattgaccaatttgaaatcggacactcgaggtttacatatgaacaaaaacagagggtttacgcctctggcggtcgttctgatgctctcaggcagcttagccctaacaggatgtgacgacaaacaggcccaacaaggtggccagcagatgcccgccgttggcgtagtaacagtcaaaactgaacctctgcagatcacaaccgagcttccgggtcgcaccagtgcctaccggatcgcagaagttcgtcctcaagttagcgggattatcctgaagcgtaatttcaaagaaggtagcgacatcgaagctggtgtctctctctatcagattgatcctgcgacctatcaggcgacatacgacagtgcgaaaggtgatctggcgaaagcccaggctgcagccaatatcgcgcaattgacggtgaatcgttatcagaaactgctcggtactcagtacatcagtaagcaagagtacgatcaggctctggctgatgcgcaacaggcgaatgctgcggtaactgcggcgaaagctgccgttgaaactgcgcggatcaatctggcttacaccaaagtcacctctccgattagcggtcgcattggtaagtcgaacgtgacggaaggcgcattggtacagaacggtcaggcgactgcgctggcaaccgtgcagcaacttgatccgatctacgttgatgtgacccagtccagcaacgacttcctgcgcctgaaacaggaactggcgaatggcacgctgaaacaagagaacggcaaagccaaagtgtcgctgatcaccagtgacggcattaagttcccgcaggacggtacgctggaattctctgacgttaccgttgatcagaccactgggtctatcaccctacgcgctatcttcccgaacccggatcacactctgctgccgggtatgttcgtgcgcgcacgtctggaagaagggcttaatccaaacgctattttagtcccgcaacagggcgtaacccgtacgccgcgtggtgatgccaccgtactggtagttggcgcggatgacaaagtggaaacccgtccgatcgttgcaagccaggctattggcgataagtggctggtgacagaaggtctgaaagcaggcgatcgcgtagtaataagtgggctgcagaaagtgcgtcctggtgtccaggtaaaagcacaagaagttaccgctgataataaccagcaagccgcaagcggtgctcagcctgaacagtccaagtcttaacttaaacaggagccgttaagacatgcctaatttctttatcgatcgcccgatttttgcgtgggtgatcgccattatcatcatgttggcaggggggctggcgatcctcaaactgccggtggcgcaatatcctacgattgcaccgccggcagtaacgatctccgcctcctaccccggcgctgatgcgaaaacagtgcaggacacggtgacacaggttatcgaacagaatatgaacggtatcgataacctgatgtacatgtcctctaacagtgactccacgggtaccgtgcagatcaccctgacctttgagtctggtactgatgcggacatcgcgcaggttcaggtgcagaacaaactgcagctggcgatgccgttgctgccgcaagaagttcagcagcaaggggtgagcgttgagaaatcatccagcagcttcctgatggttgtcggcgttatcaacaccgatggcaccatgacgcaggaggatatctctgactacgtagcggcgaatatgaaagatgccatcagccgtacgtcgggcgtgggtgatgttcagttgttcggttcacagtacgcgatgcgtatctggatgaacccgaatgagctgaacaaattccagctaacgccggttgatgtcattaccgccatcaaagcgcagaacgcccaggttgcggcgggtcagctcggtggtacgccgccggtgaaaggccaacagcttaacgcctctattattgctcagacgcgtctgacctctactgaagagttcggcaaaatcctgctgaaagtgaatcaagatggttcccgcgtactgctgcgtgatgtggcgaagattgagctgggtggtgagaactacgacatcatcgcagagtttaacggccaaccggcttccggtctggggatcaagctggcgaccggtgcaaacgcgctggataccgctgcggcaatccgtgctgaactggcgaagatgggaccgttcttcccgtcgggtctgaaaattgtttacccgtacgacaccacgccgttcgtgaaaatctctattcacgaagtggttaaaacgctggtcgaagcgatcatcctcgtgttcctggttatgtatctgttcctgcagaacttccgcgcgacgttgattccgaccattgccgtaccggtggtattgctcgggacctttgccgtccttgccgcctttggcttctcgataaacacgctaacaatgttcgggatggtgctcgctatcggcttgttggtggatgacgctatcgttgtggtagaaaacgtggagcgtgttatggcggaagaaggtttgccgccaaaagaagctacccgtaagtcgatggggcagattcagggcgctctggtcggtatcgcgatggtactgtcggcggtattcgtaccgatggccttctttggcggttctactggtgctatctatcgtcagttctctattaccattgtttcagcaatggcgctgtcggtactggtagcgttgatcctgactccggctctttgtgccaccatgctgaaaccgattgccaaaggcgatcacggggaaggtaaaaaaggcttcttcggctggtttaaccgcatgttcgagaagagcacgcaccactacaccgacagcgtaggcggtattctgcgcagtacggggcgttacctggtgctgtatctgatcatcgtggtcggcatggcctatctgttcgtgcgtctgccaagctccttcttgccagatgaggaccagggcgtatttatgaccatggttcagctgccagcaggtgcaacgcaggaacgtacgcagaaagtgctcaatgaggtaacgcattactatctgaccaaagaaaagaacaacgttgagtcnnnnnnnnnntaacggcttcggctttgcgggacgtggtcagaataccggtattgcgttcgtttccttgaaggactgggccgatcgtccgggcgaagaaaacaaagttgaagcgattaccatgcgtgcaacacgcgctttctcgcaaatcaaagatgcgatggttttcgcctttaacctgcccgcaatcgtggaactgggtactgcaaccggctttgactttgagctgattgaccaggctggccttggtcacgaaaaactgactcaggcgcgtaaccagctgcttgcagaagcagcgaagcaccctgatatgctgaccagcgtacgtccaaacggtctggaagataccccgcagtttaagattgatatcgaccaggaaaaagcgcaggcgctgggtgtttctatcaacgacattaacaccactctgggcgctgcatggggcggtagctatgtgaacgactttatcgaccgcggtcgtgtgaagaaagtttacgtcatgtcagaagcgaaataccgtatgctgccggatgatatcggcgactggtatgttcgtgctgctgatggtcagatggtgccgttctcggcattctcctcttctcgttgggagtacggttcgccgcgtctggaacgttacaatggcctgccatccatggaaatcttaggccaggcggcaccgggtaaaagtaccggtgaagcaatggagctaatggaacaactggcgagcaaactgcctaccggtgttggctatgactggacggggatgtcctatcaggaacgcctctccggcaaccaggcaccttcactgtacgcgatttcgttgattgtcgtattcctgtgtctggcggcgctgtacgagagctggtcgattccgttctccgttatgctggtcgttccgctgggggttatcggtgcgttgctggctgccaccttccgtggcctgaccaatgacgtttacttccaggtaggcctgctcacaaccattgggttgtcggcgaagaacgcgatacttatcgtcgaattcgccaaagacttgatggataaagaaggtaaaggtctgattgaagcgacgcttgatgcagtgcggatgcgtttacgtccgatcctgatgacctcgctggcgtttatcctcggcgttatgccgctggttatcagtactggtgctggttccggcgcgcagaacgcagtaggtaccggtgtaatgggcgggatggtgaccgcaacggtactggcaatcttcttcgttccggtattctttgttgtggttcgccgccgctttagccgcaagaatgaagatatcgagcacagccatactgtcgatcatcattgatacaacgtgtaatcactaaggccgcgcaagcggccttttttatgcataacctacgaacattaaggagtaattgaaccaccaactcaggatctcatacgaaaaccagtattaaccacggataaaattcataaaaaatactgattgttagttaatttatattaagtagcgctaatagatttaataatccataatcatttagaggctattcttaattatttgcggtaattctttattcattcctcggttattacgtcatattcagagcaatcctggtattagtgtcaccaatttcatctggcgataatcctgaaatgttatgaacagttcgagcaaactgcttttacctgctgcgggttagtgctagtatgaaaaagtgagtcctgtcccgattccttcctaattgtaatttttcgtaataatgcgatgaaaacctgcaaagagtggcttatagttaagctaacaaacgagagggcaagtccaggtcagtaagttttttccatcccgaaaggtgtccgttagttcaaccgctaagaaggggacgcgttatggatgaatactcacccaaaagacatgatatcgcacagcttaagtttctctgtgaaaccctgtatcatgactgccttgcaaaccttgaagaaagcaatcatggctgggttaacgacccaacctcggcgatcaacctccagttgaatgaactgattgagcatattgcgaccttcgcacttaattacaaaattaagtataatgaagacaataagctcattgagcagatcgacgaatatctggatgacacctttatgttgttcagtagttatggtattaatatgcaggatcttcagaaatggcggaagtcaggtaatcgactattccgttgttttgtcaatgcgacgaaagagaatcctgcgagtttatcttgttagaattattacaaccatgggtagaagtatgtccgaaaaacctttaacgaaaaccgattatttaatgcgtttacgtcgttgccagacaattgacacgctggagcgtgttatcgagaaaaataaatacgaattatcagataatgaactggcggtattttactcagccgcagatcaccgcctcgccgaattgaccatgaataaactgtacgacaagatcccttcctcagtttggaaatttattcgctaataaataattcgctttcggagctataaccggctgtttattaagaattttatactttttcgccatgaagacataccctatgtgatctttatcacacagatgtaatgggaacgttctcttcactgacttttcgtcttactgtgttgccgcattttcagcaaccggaggtcagtaatgagcacagaaaaagaaaagatgattgctggtgagttgtatcgctcggcagatgagacgttatctcgcgatcgcctgcgcgctcgtcagcttattcaccgatacaatcattccctggcggaagagnnnnnnnnnnacacattacgccagcaaattctcgctgatctattcggtcaggtgacagaggcttatattgagccaacgtttcgctgtgactatggctataacatttttctcggtaataattttttcgccaacttcgattgcgtgatgcttgatgtctgccctattcgcatcggtgataactgtatgttggcaccaggcgttcatatctacacggcaacacatcccatcgaccctgtagcacgtaatagcggtgctgaactggggaaacccgtcaccatcggtaataacgtctggattggcggacgcgcggtcattaaccctggtgtgaccattggtgataacgtcgtggtagcctcaggtgcagttgtcacaaaagatgtcccgaacaacgttgtcgtgggcggtaatccagccagaataattaaaaaattgtaatcggtttttcgcaactgttatgcaaaattgtggtaaatctgttacttcccctctactattcccacgttaaaatagggtgttccctggaaagttgcagataccacgaaggcaaacgatgaccgaaatacaacgcctgctgaccgaaacgattgagtctctgaatacccgcgaaaaacgcgacaacaaaccccgctttagtatcagttttatccgtaaacatccggggctgtttatcggtatgtacgttgctttttttgccaccctggcggtgatgttgcagtccgaaacgctttcaggctctgtctggctactggttgtattatttatcctgcttaatggtttcttctttttcgatgtctacccacgctaccgctatgaagatatcgacgtgctggatttccgcgtttgctataacggcgaatggtacaacacgcgctttgtacctgccgcgctggttgaagccatcttgaactctccgcgtgtcgcggatgttcataaggaacaactgcaaaaaatgatcgtccgtaaaggtgaactgtatttttacgatatttttacccacgctcgcgccgaatcaacatcttaagttagggttacataccaggcgtaaagctctgcgcctggtcaaatgacaatgatcgtttccacccatcacttcatgaaataccagctctacctccttatctcctgccagcctttttccacaatcagatatac

SEQ ID NO: 176 - DNA, 50364 bp, Escherichia coli
  source 1..50364: mol_type = genomic DNA
ggtatgctacctgttgtatcccaatttcatacagttaaggacaggccatgagtaagatttttgaagataactcgctgactatcggtcacacgccgctggttcgcctgaatcgcatcggtaacggacgcattctggcgaaggtggaatctcgtaaccccagcttcagcgttaagtgccgtatcggtgccaacatgatttgggatgccgaaaagcgcggcgtgctgaaaccaggcgttgaactggttgaaccgaccagcggtaataccgggattgcactggcctatgtagctgccgctcgcggttacaaactcaccctgaccatgccagaaaccatgagtattgaacgccgcaagctgctgaaagcgttaggtgcaaacctggtgctgacggaaggtgctaaaggcatgaaaggcgcaatccaaaaagcagaagaaattgtcgccagcaatccagagaaatacctgctgctgcaacaattcagcaatccggcaaaccctgaaattcacgaaaaaaccaccggtccggagatctgggaagataccgacggtcaggttgatgtatttattgctggcgttgggactggcggtacgctgactggcgtcagccgctacattaaaggcaccaaaggcaagaccgatcttatctctgtcgccgttgagccaaccgattctccagttatcgcccaggcactggctggtgaagagattaaacctggcccgcataaaattcagggtattggcgctggttttatcccagctaacctcgatctcaagctggtcgataaagtcattggcatcaccaatgaagaagcgatttctaccgcacgtcgtctgatggaagaagaaggtattcttgcaggtatctcttctggagcagctgttgctgcggcgttgaagctacaagaagatgaaagctttaccaacaagaatattgtggttattctaccgtcatcgggtgagcgttatttaagcaccgcattgtttgccgatctcttcactgagaaagaactgcaacagtaatgccagcttgttaaaaatgcgtaaaaaagcacctttttaggtgcttttttgtggcctgcttcaaactttcgcccctcctggcattgattcagcctgtcggaactggtatttaaccagactaattattttgatgcgcgaaattaatcgttacaggaaaagccaaagctgaatcgattttatgatttggttcaattcttcctttagcggcataatgtttaatgacgtacgaaacgtcagcggtcaacacccgccagcaatggactgtattgcgctcttcgtgcgtcgcgtctgttaaaaactggcgctaacaatacaggctaaagtcgaaccgccaggctagactttagttccacaacactaaacctataagttggggaaatacaatgttccagcaagaagttaccattaccgctccgaacggtctgcacacccgccctgctgcccagtttgtaaaagaagctaaaggcttcacttctgaaattactgtgacttccaacggcaaaagcgccagcgcgaaaagcctgtttaaactgcagactctgggcctgactcaaggtaccgttgtgactatctccgcagaaggcgaagacgagcagaaagcggttgaacatctggttaaactgatggcggaactcgagtaatttcccgggttcttttaaaaatcagtcacaagtaaggtagggttatgatttcaggcattttagcatccccgggtatcgctttcggtaaagctctgcttctgaaagaagacgaaattgtcattgaccggaaaaaaatttctgccgaccaggttgatcaggaagttgaacgttttctgagcggtcgtgccaaggcatcagcccagctggaaacgatcaaaacgaaagctggtgaaacgttcggtgaagaaaaagaagccatctttgaagggcatattatgctgctcgaagatgaggagctggagcaggaaatcatagccctgattaaagataagcacatgacagctgacgcagctgctcatgaagttatcgaaggtcaggcttctgccctggaagagctggatgatgaatacctgaaagaacgtgcggctgacgtacgtgatatcggtaagcgcctgctgcgcaacatcctgggcctgaagattatcgacctgagcgccattcaggatgaagtcattctggttgccgctgacctgacgccgtccgaaaccgcacagctgaacctgaagaaggtgctgggtttcatcaccgacgcgggtggccgtacttcccacacctctatcatggcgcgttctctggaactgcctgctatcgtgggtaccggtagcgtcacctctcaggtgaaaaatgacgactatctgattctggatgccgtaaataatcaggtttacgtcaatccaaccaacgaagttattgataaaatgcgcgctgttcaggagcaagtggcttctgaaaaagcagagcttgctaaactgaaagatctgccagctattacgctggacggtcaccaggtagaagtatgcgctaacattggtacggttcgtgacgttgaaggtgcagagcgtaacggcgctgaaggcgttggtctgtatcgtactgagttcctgttcatggaccgcgacgcgctgcccactgaagaagaacagtttgctgcttacaaagcagtggctgaagcgtgtggctcgcaagcggttatcgttcgtaccatggacatcggcggcgacaaagagctgccatacatgaacttcccgaaagaagagaacccgttcctcggctggcgcgctatccgtatcgcgatggatcgtaaagagatcctgcgcgatcagctccgcgctatcctgcgtgcctcggctttcggtaaattgcgcattatgttcccgatgatcatctctgttgaagaagtgcgtgcactgcgcaaagagatcgaaatctacaaacaggaactgcgcgacgaaggtaaagcgtttgacgagtcaattgaaatcggcgtaatggtggaaacaccggctgccgcaacaattgcacgtcatttagccaaagaagttgatttctttagtatcggcaccaatgatttaacgcagtacactctggcagttgaccgtggtaatgatatgatttcacacctttaccaaccaatgtcaccgtccgtgctgaacttgatcaagcaagttattgatgcttctcatgctgaaggcaaatggactggcatgtgtggtgagcttgctggcgatgaacgtgctacacttctgttgctggggatgggtctggacgaattctctatgagcgccatttctatcccgcgcattaagaagattatccgtaacacgaacttcgaagatgcgaaggtgttagcagagcaggctcttgctcaaccgacaacggacgagttaatgacgctggttaacaagttcattgaagaaaaaacaatctgctaatccacgagatgcggcccaatttactgcttaggagaagatcatgggtttgttcgataaactgaaatctctggtttccgacgacaagaaggataccggaactattgagatcattgctccgctctctggcgagatcgtcaatatcgaagacgtgccggatgtcgtttttgcggaaaaaatcgttggtgatggtattgctatcaaaccaacgggtaacaaaatggtcgcgcctgtagacggtaccattggtaaaatctttgaaaccaatcacgcgttctctatcgaatctgatagcggcgttgaactgttcgtccacttcggtatcgacaccgttgaactgaaaggcgaaggcttcaagcgtattgctgaagaaggtcagcgcgtgaaagttggcgatactgtcattgaatttgatctgccgctactggaagagaaagccaagtctaccctgactccggttgttatctccaacatggacgaaatcaaagaactgatcaaactgtccggtagcgtaaccgtgggtgaaaccccggttatccgcatcaagaagtaattcttgccgcagtgaaaaatggcgcccatcggcgccattttttatgcttccgccagcggcggcaaaatcaattcatcgctctcatgctgctgggtgtagcgcataacttccagtacgcgcaaccccgcacggtgcaccgcatcgtttaacgccttccctttcagcaaaccactgataagctgagcacaaaacaggtcgccagtccctttcaggtcggtttttacccgtgaatgggaaatgacattcacgctgtcggcactgaccaccaccacctgcatctcctgattttcttcattaccggaggcgctggtaatcaccacccattttaatgtgtctgaaagcagactttttgcggcagcaatggcactgtcgagatcgcggcaatttttaccggtcaggatttccagctcaaagatattgggggtaattccctgcgccagcggcagtaaatattgtcgatacgcctcgggaaggtcaggtttgacataaattccgctatcaatatcgccaatcaccggatcgaccatgatcaataggtcaggatggtctttgcgtagcgcagtcagccactcggcaaggattttgatttgcgatgccgttcccatatagcccgtggttacagcgcgcagctggcgcagcgcatcacgctcctgaagcgcacgcaaataaccgctaaaccattcatccggaatcgcaccaccgtagaaagtgtcataatgcggcgtattgctcagcaataccgtcggcacggcaaaaacattcagaccgttctgtttgatagcaggcacggcaatgctgttgcccacgctgccgtaaaccacctgcgactgcacggcgacgatatccgcctgcagcgccctgctcttatcgttaaacaacaacaaactactcatttaattttttctccttgccgatgatcctcatcgtattccaaccgaaactttacctgattctggcagtcaaatcggctatcacaaaacaaggataaggtaattcaatgaagaaaatcatttgtctggtcattacactactaatgacactccccgcttacgcgaagttaactgcccatgaagaagcccgcatcaacgccatgctggagggattagcacagaaaaaggatttgatatttgtgcgcaacggtgatgaacatacctgcgatgaagcggtttctcatctgcgtctgaagctgggcaatacccgtaaccgcattgacactgccgagcagtttattgataaggttgcttcgtcgtcatcgattaccgggaagccgtatattgtgaagatccccggtaagagcgatgagaacgcacagccttttttacatgcgctaattgcgcagacggataaaacggtgcctgcgcaataatcttaaatccccgccccctggctaaaatgctcttccccaaacaccccggtggaaaggtagcgatcgccacgatcgcagatgatcgctaccaccaccgcaccagggttagcttttgccacccgcagtgctccggcaaccgcgccgccggagctgacgccacagaatattccttcccgcactgccagttcgcgcatggtgttttctgcatcgcgctgatgaatatccagcacctcatccaccagagaagcgttgaaaatccccggcagatattccgcaggccagcggcgaatgccgggaatactgctgccttcttccggctgcaggccaacaatcgttactggtttggattgttcgcgcataaagcgtgaaacgccggtgatagtgccggttgttcccatgctggagacaaaatgggtaatgcgcccgccggtttgctgccagatttccggcccggtagtggtgtaatgggcgtaagggttatcgggattattaaactgatcgagcagctttccttcgccacgattcgccatctccagcgccagatcgcgcgcaccttccatgccctgctctttggtgacaagaatcagttccgcaccataagcacgcatcgccgcacggcgttcctggctcatgttgtcgggcatcagcaatttcatgcgatagcctttcagcgcggcaatcattgccagcgcaatgccggtgttaccactggtggcttcgattaagacatcacccggtttaatttccccgcgcttttccgcctcgacgatcatcgaaagtgccgcacgatctttcaccgaacctgccgggttattgccttccagttttaaccacacttcactgccgttatccggccccattcgctgcaacttcaccagaggcgtattgcctattgtttgttctaatgtactcacgatctctatccatacgtggtgttgcctgatgcgacgcttgcgcgtcttatcaggtctacaggttacaaaccttgccattaaaaagcccggatcgcgggaagcgcctccgggcgtttaacattcactcaacctatcaggcgctttgtgcgagagcaagttcctcatctcgggtttcgatacgctcgtcgccgttatacagccgcgcatgttgcagaccaacgaataaacgctcgccacgctgcggggcatcgtcgccatgcatcacgaccgtcagcggttcgttgtaccaccccagcggctgcaccactaattgggtgtagtgacctttcgggctggcttccagtacctgtaccggcagcggcgaatcgagactggtacggcggctgatatccacttcccacgggcgcaggaagagatccaccggaccctgatacgcaggtgtgtagcccagcggccagcgatgcgcgccaacatggaactgcccgccgcgaatggttccctgcaggcggttcacttcgcccataaattcgagtacaaaacgggtcgctggttcgcgccatacctgattcggcgcatcagcctgttcaatattcccctgactcatcaccactacacgatcggctacttcggtcgcctcttcctggtcgtgggtcacgaacacgctggtgaatttcagctcttcatgcagttgacgcagccagcgacgcagctctttacgcacctgcgcatccagcgcgccaaacggttcatcaagcagcagaatttgcggttctacagccagcgcgcgcgccagcgccacgcgctgtttctggccgccggaaagctgtgccggataacgatctgccagatgagcaagctgcaccatctccagcaattttgtcactttcgctttgatggctgcggcattcgggcgatcgcgacgcggcagcaccgtcaggccaaaagcgatattgtcgaataccgtcatatggcggaacagcgcgtaatgctggaacacgaaaccgaccttgcgatcgcgcgcgtgcaggcggctgacgtcggtgccgtggaagcgaatatgcccgctggtttgatgctccagcccggcgataatgcgcagcagcgtggttttcccggaaccggacggccccagcaacgcgaccatctgacctgaaggaatatccagtgagatatcgttcagcacctgggtgcgaccaaacgacttcttaatattggcaatctcaatgctcatgatgttcctcctgctgtgcgcgtttttcctgattctccaggcgccactgcaacatactttttaaaaacagggtgataatcgccatcagcgttaacagcgccgcagcggtaaaggagccgacggtgttgtagtcctgctccagcaattcaatctgtaacggcagcgacagggtttcgccgcgaatcgagccggaaaccaccgacaccgcgccaaactcgccaattgcgcgggcgttggtcaacaccacgccataaagcagcgcccagcggatgttcggtaatgtgacgcgacggaacatctgccagccggacgcgccaagcaaaatcgccgcttcgtcttcctggctgccctggcttaacatcaccggcaccagttcgcgcaccacaaacggacacgtcacgaagatggtgaccagcaccattcccggccaggagaacataatttgcaggttatgctcgtcgagccaaccgccgagcgggccgttagagccgtagaacagcaaatacaccagaccggcaaccaccggcgacacggcaaacggaatgtccagcagcgtcagcagcaactggcgtccggggaagttaaagcgcgtcaccagccacgccagtagaataccgaacaccaggtttaccggtacggcaatcagcgcgatcatcaccgtcagccagatggcgtgcagcatatccggatcggccagattctgtaaaacaggcatcagccctttgctgaacgcctgtacgaagatataaatcatcggcaccagcaggatgaacgccgataccagcatcccgatgccaatcagaaaccatttgccccagttaatcgggcgcgcgtcataacgcttcaattgtgtcacttccgccattaatgacctaccacacgccgaccaaagcgactttgcagagtgttaattgagaacagcagtatcagggatgccgcgaggatcaccgaagcaatcgcgctcgccgccgggtaatcaaactcctgcaagcgcacaaaaatcatcagcgacgtcacttccgtcttccacgcgatatttccggcgataaaaatcaccgcgccaaattcaccaagactacgggtaaacgacagcgccacgcccgccaccagcgccggagaaagctccggcagcaccactttgcagaaactctgccagcgcgttgcaccaagcgtttccgccgcttcttcatattccgggcctaactcttccagcaccggctgcacggtacgcaccacaaacggaatgctggtaaaggccatcgccaccgcaatccccagccatgtataggtgactttgatatcaaacttcgccagccattcaccgtaaaaaccgtttacggaaaagagcgaggccagcgttaaaccggcgacagccgttggcagcgcaaagggtaaatccatcagcgcatcaagcagcgtgcggcctgggaagcgatagcgggttaggatccacgccatcagcagaccgaaaacgccgttaaaaatcgatgccacaaacgccgacagcagcgttactttgtaggccgcgaccacctgcgggttggtgatcacctcccagtactgcgcccagctcatctgggccagttgcatcaccagcgcggagagcggcagcagcaaaatcaggcacacaaacagcagactggtgccgaggcttaaggtaaagcccggcagcacgcgtctggaggagacagcaaacatcagttacgccccgccgctaacagcttgtctaactcgccgccgctggtgaagtgggttttcatcacttccggccaggagccaaatttgtcttccacgcggaacagctcggtctgcgggaatttgtctttcagtttgtccatcacctccgggttattcacgcggtagtaatagtcggtgatgatggtttgcgcctgcgggctatagagccagttcagataggctttggcggctttttccgtaccgttggcctgcacgtttttatcaacccacgccaccgggaattccgccagaatgttggttttcggaatcaccacttcaaagccctgcgcttcatactgtttacggatgttgttcacttccgattcgaagctaatcagcacatcgcccaggccacgctcggcaaaagtggtggttgcgccacgaccgccggtatcgaacacttcaacgtttttcaggaactgggtcataaactgttcggttttggctttatcgccaccgtcagctttatccgctgcgccccatgccgccagataggtataacgcgcgttacccgacgttttcgggttcgggaaaatcagcttcacgtcggagcgcaccaggtcgttccaatcgtggatattcttcgggttacccttacgcaccaggaagcccatggtggagtagaacggcgagctattattcggcaggcgcgactgccagtcggccgggatcagcttgcctttatcgtgcaggatttgtacgtcggtcacctggttataagtgacaacgtcggcttttaagccctgtaaaatcgccagcgcctgttttgatgacccggcatgagattgttttatcgtcagtttgtcgccgccgttatcttttgcccattgttgctcaaacggcggattcagggcggcaaacagctcgcgggagacgtcataagaactgttcagcagttccgttgcctgtacatggcccgccagcagcagagaagcgaccagcgcgagtgagttctttttcagtaagttaacggccattgcgcacccttataaatttaatgactttctaatagccatcatatttataacggacgtgaaaggagtaacggttttatataccgtttggtgatttggaagttgaaaagggaataagaaccgggtttaaaacgaaatcctccccacaaatgcagggaggaaacagaggtgaatcagataccgacgctaaccgtctccggcagtgtgctgccgccatcaatcacattctgtgtaccggttaaatagctggattcatccgatgcgaggaaggccgccagttcgccgacttccagcggatcggcgaggcgacgcatcgggattgctttcgccatttcagtcagcaccgactctggatcttccgggttcgactggcgggcaatgctttccgccattggtgtgcgcacgtatcccgggcaaatggcgttaacgcgaataccagactgcgcgtactccaccgccagcgattttgtcaggccaacaatcgccgctttcgttaaggcgtacgccgtttcgccaggatcggccaccatatcgccagtgaccgaagacatcatcacaatgcgaccatctttgcgggcaatcatctccggcagcaccgccttcgtgacgttccatacgcctttaatattgatgtcaatatggaaatcgcgatcgtcatcgctcatatcgaggaaactgcccagacgacaaacgcctgcgttattcaccaggatatcaatgcgcccttctttttccttcgcgcgtttgatagctgcggctaccgacgccgggtcacgcacatcggcgacaaccgccgtacagcgatgaccacgaccacacagttcgtccgccagcttttcgatctcaggggagatatccagcaagattaggtttgcgccatgacgcgcaaaagttctggcaattccttcgccaattccctgcaatgcgcccgtaatcagtgctgtcttgcccgtgagtttacccattttaatgctctccttgttaatacagagcgttacactccattccctctgaaaatacaggataaacaaaatattgctgcggatcagctcactaattcaggaaaatctcaatccagtcgctgctttatgcatcatttcaggcgttgtgttagctcactgctgcgctgaatcattttcaatgactccacatcattgagttgcacaagaccaacaaacagtaaatcggtaacagaattttgcgccgtgcgggtagacatcgacgagctacgccattcggtttcaccggaaacggtatcgagcgtgaaatgcgccagccgccgcagcggagaatcagccagagaagtaatggcaatcaccgttgccccctgctttcgtgccgcttctgcgcataagacaatctcttttttactgccgctgtaagagatagcgatttgtacatcgccttttttcaacgcctgggaaacggtggcttgtacgtgcgtgtcggcttcgcaggccacgcgatagccaattttcatcagtttgaacgacagatcgcgccccaccagcgccgatccgcccaggcccgttatctggataaacggtgctttactgatgacctcaatgattttttgcagccgcgcgtagtcgaacaacgcacaggtttgctccagcgccagctctttttcgcgattcaatttgcgggcaatcacttccagcgaatcatcactggtaatcgaactgtgcaggtgcagcgccgtggcattcgttttctcccggctggcactgtattcgcctattaacgccatacgcaattcagtaaatccttgcgcgccgagtttttgggcaaatttcactatgctcgactggctaatgccgagctgtttcgccatctgccgtgaagaaacggattgcagctcactcacgttggcctgcagaaagtcagcgattttttgctcgttttcggtgaattcactccccgcattgcttattttcgtcaggtacaacatcttccactctcctgggctggcagcataaattccgcttaagttcttatgacgctcttcacactctgcgagtgtagactcaatgattcctttaagtctgtcaattcgggatatatgattccatacatctgcaattatttgatcgtaaatagtaaggtcaccaccgatgcaactagaaaagatgattactgaaggctcgaacaccgcctcggctgaaattgaccgcgtatcgacgctggaaatgtgccggattatcaacgatgaagataaaaccgtaccgcttgccgttgagcgcgtcctgccggatatcgccgcggcgatcgatgttatccacgcccaggtcagcggcggcggtcgtctgatttatctcggtgcgggaacatccggtcgtctggggattctggatgccagcgaatgtccgcccacctacggcgtgaaaccgggtctggtggttggtttgattgctggaggcgaatatgccattcagcacgcggtggaaggcgctgaagatagccgggaaggtggtgttaacgatctgaaaaatattaatttaacggcacaggatgtggtggttggcattgctgccagcggtcgcacgccgtatgtgattgccggactggaatacgcacgccagctcggctgccgcacagtgggaatttcctgtaatccggggagtgccgtttccaccaccgccgagtttgccattacaccgattgtaggtgccgaagtggtcactggttcttcgcgaatgaaagcaggcacagcgcagaaactggtgctcaatatgctttccaccgggctgatgattaaatctggcaaagtgttcggcaacctgatggtcgatgtggtcgccaccaacgaaaaactgcatgtgcgccaggtcaatatcgttaaaaacgccaccggatgtaatgccgaacaagcggaagcggcgttaattgcctgcgagcgcaactgtaaaacggccattgtgatggtgctgaaaaatctcgatgccgcagaagctaaaaaacgcctggatcaacacggcggctttattcgtcaggttttagacaaggaataacccatggccaaagagatcagcagtgaacttctgaacaccattcttacccgtgtcggcggaccgggaaatatcgccagttgtggtaactgtatgacgcgcctgcgtctgggtgtacatgacagttcactggttgatcccaatatcaaaacgctggaaggcgtgaagggcgtcattttgaccagcgaccaggtgcaggtcgtttttgggcctggtaaagcgcatcgtgccgcaaaagcgatgagcgagctgctgggcgaggcaccggtacaggatgccgcagaaatcgccgcccagaacaaacgtcagttaaaagccaaacaaacctccggcgtgcaacaatttctcgccaaattcgccaccatcttcacgccgctgatccccggttttattgccgccggtctgctgctggggatagcgacgttaattgccacggtgatgcacgttccggcagatgctcagggcacgctacccgacgcgctgaattttatgaaggtgttcagcaaaggtttgttcactttcctggtgattctggtgggctataacgccgcccaggcatttggcggcacgggcgtcaatggcgcaattattgccgcactctttttgctcggttataaccccgctgcaaccaccggttactacgccggttttcacgatttctttggtctgcccatcgatccgcgcggcaatattatcggcgtgctgattgccgcgtgggcctgcgcccgcattgaaggcatggtgcgccgctttatgccggacgatctcgacatgctgctgacctcgttaatcaccctgctgatcaccgctacgcttgcgtacctgatcattatgccgctgggtggctggttattcgaaggtatgtcatggctgtttatgcacctgaacagtaatccgttcggttgtgcggttttagccgggctgttcctgatcgccgtggtatttggcgtgcatcagggctttattcctgtttacctcgcgttaatggacagccagggattcaacagcttatttcccatcctttcaatggcaggcgcgggccaggtgggcgcggcgctggcactctactggcgggcgcaaccgcacagtgcattacgcagtcaggtacgcggggcgattattcccggtctgctgggcgttggtgaaccgttgatttacggcgtcaccctgccccgcatgaaaccgtttattaccgcctgtttaggcggcgcagcgggcggtttgtttatcggcctgatagcctggtggggtctgccgatgggcttaaacagcgcctttgggccgtctggtctggtggcgctgccgctgatgacttccgcacaaggcatccttccggcaatggcggtttatgctggcgggattctggtggcatgggtttgcgggtttattttcaccacgctctttggctgccgtaacgtcaatctggactgatatcatgaaacggacaatgctctatctttctctgctggctgttagttgtagcgtcagcgccgcaaaataccctgttctgacagaaagttcgccagagaaagcagggttcaacgtcgaacggcttaaccagatggatcgctggattagccagcaagtggacgccggttatcccggcgtaaacctgctgatcattaaagataatcagattgtgtatcgcaaagcctggggagcggcgaaaaagtacgatggcagcgtgttgatggaacagcctgtcaaagccaccaccgggacgctgtatgacctggcctcaaacaccaaaatgtacgccacgaacttcgccctgcaaaagctgatgagcgaaggcaaactgcatcctgacgatcggattgcgaaatatattccggggtttgccgatagtccaaatgacaccattaaaggcaaaaacaccctgcggatttctgacctgctgcatcacagcggcggtttcccggcagatccgcaatacccgaataaagcggtcgcgggcgcgttatattcccaggataaaggccagacgctggagatgatcaagcgcacgccgctagagtatcagcccggcagcaagcatatttacagtgatgtcgattatatgctgcttggatttatcgtcgagtcggtcaccggtcagccgcttgaccgctatgttgaagagtcgatttatcgcccgctcggcctgacacatacggtatttaacccgctgctgaaaggctttaaaccgcaacaaattgccgccacggaattgaacggcaatacccgcgatggcgtgatccatttcccgaatatccgcacctccactctctggggtcaggtgcacgatgaaaaagccttttattcgatgggcggcgtttccgggcacgcaggtttgttttccaataccggcgatattgcggtgttaatgcaaacgatgctgaacggcgggggctatggcgatgtgcagctgttcagtgcggaaacggtgaagatgttcaccaccagctctaaggaagatgccacttttggcctcggctggcgcgtgaatggtaatgccaccatgacgccgacgtttggcacgctggcaagcccgcaaacctacggtcacactggctggaccggaacggtgaccgttatcgatccggtgaatcatatggcgattgtgatgttaagcaacaagccacattcgccggttgccgatccgcaaaagaatcccaatatgttcgaaagcggtcagctgccgattgcaacgtatggttgggtagttgatcaggtgtatgcggcgttaaagcaaaagtaataaaaaggccagtcagtaatgttactgcctggcctttaatcaatgaatcagaaacgcttacagcgccatcaacttgtccagcgacggtgcgaaataatagccgccggttaccggtttggtgaaacgcaacatcgcatcacgcttaccatcggtatcgccaaacatgctcagcagttgctgctcaatgttatgcagacgcgcgcagtaggcgcagaagtacagaccgtgagtgccactggcagtgccgtacggcaggctctggcgaacaatcttcagccctttgccatcttctttcagatcaacgcgggtgaggtgagaggtttccggacgttcgtcgccgtcgatctcttcgttggcctctttggtgcgcccgatcatcatctcctgatcgtgaacgctcatccggttgagctgcttcaggttgtgttcccaacgctggacaaacacatagctgccgcccgcatccacgccgtctttgataaccgccacttcgcgacgcgtctcttcacccgccgggttttccgtaccgtcaacaaagccgctcaggtcacgctcttcaacccaacggaagccgtggatctcttctttcacttcaatgcagtcaccaaaggcttccatcgccgcctgggcgacagagaagtttacgtcgtgacgcagagaaagaatgtggatcaacacatcgaactgggtggtcggcgcaaggcctttaccgtagcccggaaaatctttcagctcttctgccccaacgccgccgctcagagcgcgccaggtgttgttaccaaaggcaaccaccgcaccaagatgcgcgtccgggaatttcgcttcaaaagttgccagtttgtcggcaaatgttttactggccgcacgcagggcgtcaacttcccctttcacgttggcttcgatccaaatcgccgcgcggcaatgttctggcaaaatgccactctgaacctgagacattgttcctcctgaaaataataatgccacgcaatccgtggcattgttgagcgctattttacgtgttttttcgcggcggcggtttgttcagacgcaaattaacgccgccagataattttactgactttccagtttttcagggtatcgtccgaaggcattaacccttcaggaccactccattccccgctgaactggtagctaatatgttgactgccttcggctttacattcgacggcacgattatcatcaccatcagctttttggcaattgccaaatgctttgctgtaaaggtcgctaaacggtgtaccgattttaacaccggtgtcagcaggaatatcgctatccagcacgtcaatgcgactgatcgtgccttgatcgccgttaatcaccatcgccacgttgtcgcccttcatcacttcaaaaaagcgcaccacgttgccgttcgcggttttcattccgctgcgcaggcgataatcgccatcaagcgcatcggcaatggcttgttcttgcagtggtgtggacgccgttaattcaccaacgccctgctcgctcactttggtggacgacccaaaccagttccacgggttagcggcagaccagttaactgacgacatcgtggaacagccggtcagcatcaatggcatagcgcataacattaaacgcagcgatttcatgtcacttcctttggttattcaataacgttgcttggagtgcaaattcaccaaaaagtgccgttattcttttacttcattaaaacaagcgcgtaaacgtcgattggtcagcagccagattaacgccacaatatccgccactaccagcgccagaccgataccgctaacggattcaccgttcagccacagccacggttgccagcaaagtaaaaccacctgcgccaacagcaacagaaaatagagtacacgccaggtgcgaggaaacgtagcccgccgaccgctcaacaaaaacgccagcaccgccggaatgccaggaatcagccccagccagaaattatcgtgatcgggataaaacagatttagcagcgcagtaccctgctcacgcgacgcaccggcaatgacaaacagcacccaggttcgcgcctgaagcaatagcacaagccagaagagcaagggtaaacgcaggcgtccgtgcgcatcataatggacaggatggaactcagtactcttcatcttcaatcaaacgcttacccagactcagcacgtcggcgtgttcatatcccaggcgttcatacattccgagcaccatgtcgttatcttccggcacattgatctgaattttcgggcagccacgagcaatcagctttttctccagccgattaagcaacgcattggcaatcccacgcccacgaaactctggatgcacgccaagataataagcagacccgcgatgcccgtcataaccgcccatcaccgttccgaccacttcaccgtttacctcagcgaccaaaaacaaactgacgtcatggttcatcttacgctcgatgtccatttccggatcgttccacggacgcagcaagtcgcaacgctcccaaagggtgatgacctcttcgaaatcttcctggcgaaatacgcgtatctccatggtattcgttacctttttgcgggttaaaaggctgattatggcgtgaacggtcgaattagccaatatctgacgaaaatcggttgaaaaagtggcataatggggagttgtcaactattgaaatgaaaagtaaaacaattctcaacatcaaaccgtcgtaacggattacgcgatacgatataacatctggaactttattattacaactcaggccgtatgagcacttttaaaccactaaaaacactcacttcgcgccgccaggtgctgaaagccggtttggctgccctgacgttgtcaggaatgtcgcaagccatcgccaaagacgaacctttaaaaaccagcaacggacacagcaagccgaaagccaaaaaatctggcggcaaacgtgtcgttgttctcgatccaggccacggcggaattgataccggagcgatcggacgcaacggttcgaaagaaaaacatgtggtgctggcgattgctaaaaacgtccgttccattttgcgtaatcatgggattgatgcgcgtttaacgcgttctggcgatacgtttatcccactttacgatcgcgttgaaatcgcccataaacatggcgcagatctgtttatgtcaattcatgccgatggctttaccaacccgaaagctgccggtgcttcggtatttgccctctctaaccgtggggcaagtagcgcaatggcgaaatacctgtctgaacgcgaaaaccgcgccgatgaagttgccggtaaaaaggcgactgacaaggatcacctattgcagcaagtgctgtttgatctggtgcaaaccgatactattaaaaacagcctgacgctcggctcgcatattctgaaaaagattaagccggtgcataaactgcacagccgcaacaccgaacaagccgcgtttgtggtgttgaaatcgccgtcggttccttcggtgctggtggaaacctcgtttatcaccaacccggaagaagagcggctgttaggcacggcggcgtttcgtcagaaaatcgccacagcgattgctgaaggcgtgatcagttatttccactggttcgacaaccagaaagcacattcgaaaaagcgataagttatgaaacccgacgcacaccaggttaaacagtttctgctcaaccttcaggatacgatttgtcagcagctgaccgccgtcgatggcgcagaatttgtcgaagatagttggcagcgcgaagctggcggcggcgggcgtagtcgggtgttgcgtaatggtggtgttttcgaacaggcaggcgtcaacttttctcacgtccacggcgaggcgatgccagcttccgccaccgctcatcgcccggaacttgccgggcgcagtttcgaggcgatgggcgtttcactggtagtgcatccgcataacccgtatgttcccaccagccacgcgaatgtgcgtttttttattgccgaaaaaccgggtgcagagcccgtctggtggtttggcggcggcttcgatttaacccctttctatggttttgaagaagacgccattcactggcaccgcaccgcccgtgacctgtgcctgccatttggtgaagacgtttatccccgttacaaaaagtggtgcgacgattacttctacctcaaacatcgcaacgaacagcgcggtattggcgggctgttctttgatgatctgaacacgccagatttcgaccactgttttgcctttatgcaggcggtaggcaaaggctacaccgacgcttatttaccaattgtagagcgacgtaaagcgatggcctacggcgagcgcgagcgcaattttcagctctaccgtcgcggtcgttatgtcgagttcaatctggtctgggatcgcggcactctgtttggcctgcaaactggcgggcgcaccgagtcgatcctgatgtcaatgccgccactggtacgctgggagtatgattatcagccaaaagatggcagcccagaagcggcgttaagtgagtttattaaggtcagggattgggtgtaactccctcacccccattcccgcatccgctgatgcaacgtcaacgacggcttctcggcaaacagctgctggtaatccgtggcaaattgccccagatgccagaatccccactgcatggcggcgtcttttaccgttgtgctttgcgaccacgggcttatcagttcgcggcgtacggcgttcaggcgaatgcgtttcagccacgcgtttgggccaatgcctaaaatagcgtgaaacgcgttttgtagcgtgcggcgactgacatgcagttgattacacaagtccagcaccgtcaccggctcagacatattttccagcacatattcacgggcgcgggaaagtaatctacggtaactctgatgactgatgctttccgccgtcaccattggttgcgcgtcttccagcatcgcccccatcgccattagcaaattatcccccagcacttttcgcactgcaggctgatggagattttccgggttctcgcaaaacgtcgccagcgcctgttggacaaagccccacagcgcggctttatgctgctctttcacttccagcgccgactggctacgcagcatatgtaatacccgatccgggttatgcaaaaagttagcctgccgggtgatgacatcttcagaaagcaccacgcccaggatcgtgtaatcatccggcgtgctcagttcaaattcagtgccaccagggcgggtggcgatttccgcgcttcccagacattgcgaaccgataaatccctgctcaccgcgcgtcgccggaatgccaaaccagaacgagttcggccagaccaggcacgactgacgcagcgccagaccggtgtattcacgaaaaacctgaatatcatcgagtagaatttccgtaaattcaccatgaaacttgcccggatgcagctgatcgtaaatctgctgccaggcggtaatcgttaaagcatgttcatagacatccgttgtctgtcgttgatgaacattatccacttcgaccttcggcgtgagcttcaggttttcgggtaagggttcatgataaagatggtgcaaattggctgtacgggtctttttcatgatgttaatgccgggtgttgtaggacacccggcacctccgacaggttaatggggcttgagacgataacgactactgcgtttacgtaacgtcccggcagaaaagagctgttcgagcgcatttctggctttttccagcggccagccaaagtgggcagccacttctcctgccgtcattccctgacgtactgatgttaacagcgccaacaactcgtcagcagattccgcgacgataactggcgcgtcgggttcccttacgggttgcttcggctggcggttaaagccagtaaccagccactgggtgtcatcgtctggccgaccgatctccttgcggctgatgacacgcccggtacgcatcgcggcagcacaacctgcgtccagcgccgcacgacacgccgccagatcgccttccaccaccagcgttaagcgaccagggtcaagcacttcgtgactgagcagacgaacgttagctgctttgagcatggcatccgctgcatctatcgcggcgaccatgccgtccacttccagcaatcccagtgcattgatcatcggcaacctccgttacgcacgctggattggattacgcgcgatttccagcactgcatcggtaaaggcgttacaggctgctttacacgcggcctggctaccggttaaaaatgctgccgagtagttggtttcagacggtggcgggacataggtcaccagctgtacgtcggcagatttcaacgctgcatcaatgccataggtcgcttccagcggcggtgccaccagatacgccatcggatcgccaagcgtgatcccggcggttgatgagagataagaaccggtacgcgaaaccacatgcgccaggaaggcggtgttttctgcgtcattggcccactggaatgctgcaccattttcaatatgtgcaaccatcgcatccagaccggcacgcacttccgccgggtttggcccaccaagcataatcagcacttcaccggcagtcggtgacgggccgtgtgcagcgcccgcatacagcgagcgaccatataccacttccaccatcgcctgcttggtcgcttcatcagcggcaatgtaggtgacgtcatcggaatcagcagaaatcagcccgaggctacgaatatgcggcggcaattttagttcacgcgcaaattcagcgttaacggaggcaatcacccgcatggcggttaccgacggtcgaatcaaatctaaagctggcatgatgcctccttatcgggtcatgttgatgccggatgctttctgctccagcatacgtttcgccaaatccacaatgacggctgcggcttcaaccggcggcgtgccgccctggtgaatgttagagatacaggtgcgatcggcctcaacgggggtcgccatacgcggcgagtaaacggcgtagcaggagaggctttctgactgccctaaccccggacgttcccccaccagcaggatcaccactttcgcgccgaggatctcaccgatctgatcttcaatcttcacgcgaccataacgaacaaagaatggcgtgccgactttcagcccggcctgtttcaggcccgccatcagcggcggcaggatctcttcgtagttcacggtgatggcatcagttgacaggccatcagaaataacgacctgtacgtccggattagcaacacactgtgctttcagcgcttcaacagcttctgcacacaggcggcggcccatatccgggcgagtcaggtagagatttttgtcgctaatttcagagcgtacttccagcaagccctgcgctttcacccactcttccggcacttctttcagtacggtatctttcgaacgagagtgatcggccaggaaacgcagcagcgcctgggtacgtggacgcggaccggcacgaccggtacaaacgcgggccacggtgctgcggcgcagttctgttaatacgtctgcgcgatgcgggttttcaacaccaatccacgcttttgcttcagcggaacctaaatccagcgcacagctttccgaggtcaccggtgccgcacagttggtggtggcgcactttgcttctgacggcgcgggggccgtttgtcccattgacgccatcacgctgcgtacaatttcttcaatctgtttttgatccatgatgtgttatctccgcgtcatcagaagaacagtgacggatcgcccgcccgtttggtcaggcgaccgtttgccataatgcccatgctttccagccagcgttcaaactccggtgacggacgcaggttgagtaactgacgcacagtggcggtatcgtggaatgcggtggtctggtagttgagcatgatgtcatcacccagcggcatccccatgatgtagttgcagcctgcggtggcgagcaggatcatcaggttttcgttgaggttctggtcagcgtcagcgtggttggtgtaacagcagtcacagcccatagagatgccgctcagcttgcccataaagtgatcttctaagccagcacggataatctggcggtcgttgtagagatactccggcccaataaagccgaccacggtgttgacgataaacggatcgtaatgacgcgccagcccatagttacgtgcttccatcgtcacctggtcagcgccgaagttagcgccagcggatagcgcagagccttgtccggtttcgaagtagaggcagttttccccggcgatacggttgaactctgcacccactgcgcgcgcttcgtcgagcatcgccagttccacgccaaactctttcagccctttttcgctgccacagatactctggaaaatcagtccgccaggcgcgccgcgacgaatcgcttcgatctgggtggtgacgtgcgccagtacgcagccctgagttgggatgttgaatttgtcgatcacgccgtaaatggtgtccaacacgcggcttaagttttccacgtcgtcagtcaccgggttaacgccgatcaccgcatcgcccaccccgaaggaaagcccttcgtagatttgcgcggcgatactttgcacgtcgtcacgggtgtcatttggctgcaaacgggcgctgaaggtgcccggaataccaatggtggtattggcctttttgattaccggcattttcttcgcgccgtagatcaggtccgcgttggagcaaatcttcgctaccgccgcgaccacttccgaggtcagccctttgcgggtaaaggcaatgtcgtccacgctggtttcatcgctcagcacatactcacgcagttcgctgatgctccagtttttaatctggttgtaggccgtttcgttaacatcgtcctgaatcagccgcgtcacgcagtcatcttcataggcaatcaccggattattgcggatgtccgctacggtcatttccgacaacacctgctttgccgccacgcgctcctgtgaacttgccgctgcaacgcctgccagcacatcccccgaacgcagttcgttggctttagccagcacctcttttacatccttaaactgatatacattgctgaacaatgtggtctttagtttcataagtcgttccctcaggaaggaaatgcgagtgatttcaccgtcaccggcacaaccgatccgccaaaaagaggcgtaccaatgtcgatatagtcccccgcgcggacaatcacttcgtcaatgactgccaacgggagttgttgtagctgtgggcgcaacaacatgcccagagctttaccaaagtcctgcccggccaccaccagcaggggatgcggattcggaaaacgcgcgacgaaatcgaccagcgcgttgatgaccgtcagtaccgcggcgtaacgcacaggcagcgaggcgggaagcgccagcacgtacgcgtcagttttgggatcaagatccagctgaagcagcgcctgttgccaggcactcaccagatccgtttcatcaatcgggatcgccaccggcaaattgcgcagcggcagttgtacgccctccagccagattgtgctgccagagagcgaaagggtatgtgcacccgcgccaatcaccgtggcgcgtacggtttgcgccggaaactgcacattcatctcacgcaggcgcggatggtcatgcagcgccgttgccagaagtgggccaatatcggcaaaacagaacgggtcggcgggctggtggcgataacattcgcccacgcctccagaaagcgtaatgatttcgggcgtaacacctgcgggcagcaaaccggtttgcatcaatgcctgcgcgagcggcgaaagcgttccgtcaatcacttcgacaatcagcgccgccatccgccgggtaacctgcaccagctgcgcgccggtcagcgaacgggcgtcagtgcctgcaccgaagcactcatccacaatcatctgccccggtttatgagcgtaaaccacgcgcccctggctgtcggtttccagcaggcgaccacggacgttgagacaggcagtgccgctgatttttccggcatcgaacagggcgtagttcgcggtgccaccgccgatgtcgatattcagtacccgacacagccgttgttcagaaagggtttgtgccccggctccgtgaccggcgatcacggattcgaggtgcggcccggcgctggcaacgacaaaatcgcccagcgactgagagagcgccatcaccgccgggcgagcattgcgggttttcgcgctttcaccggtgatgatgatggcaccagaatcaacgctttccggcgcaatgcccgcagcctgatattgctctaaaatcagcgatttcagttccgcttcttttaaaccaccctgtttatcgacaggggtaaagaataccgggctttgccagctaatttcgcgtttaatgaattcgtagcgcggcacctgcgacaccgccgcacggttaaccagttccaggtgggagaaaatcacctgggtggtggtggtgccgatatcgataccgacgctcaatagctggcgagtgttcacgattgtgcctccgcttcggttttagtcgcggtcgcgtcttcttttggcaccagcatcatcgccacgccaatcgccgttacgccgccgatcaacttgccgacaatcatcgggaagatcatggcgttcatgttggcagcggcgaagcctaagtggtcgcccagggcgaaagcagcggaaacggcgaaggcgcagttgatgactttgccgcgggtatccatctgcttcatcatgccgaacatcgggatgttgttggcaagcgttgccaccatgccggctgccgcgatgttgttcatattcagcactttaccgacgctcatcagcggtttttcaaaccagcgagtcagcagcagcaccattggatacgcccctaacagcacgcaggagatagaaccgataacttcaatggcgcgcatcacttcaccgggtttatcgccaggggccataaagataggatccagtccggggatcagttcccagccaaggaggaatttcactaccgcagcggcaagaccgagggtgatcaatgcaacgaggaatttggcgaagatctggaagccgttgatcattttttccgggatgaatttcagccccagcgccaccagaatcgcgacaatgatcaccgggatcatgttcatcaggatcagggcgaaagtgaattccaccggctgaccgttgatctgcacaccggagtacatagcaaccagaccaccagcaatacagccaatcggaatggtcacaatgcccgccagcacgccgagcgccagataacgacggtcagaaggttcgataatgccgagcgccaccggaatggaaaacacaatcgttggccccatcatcgacccaagaattaacccagagtatagccacgctgctacgtcgccgcccgccagctctttggcgaggaagaaaccgcccatatcgcacgccagcagcgttccggcgaacattgacgggtttgcgccgagcatttcgtaaaccgggataattaccggcccgagtacgtgagccagtaccggtgccagcgcggtcataccgaccatcgccagacccagagcgcccattgccataaagccttcttcgaactgaccgcctgatccttcgatacttttaccgaacttaccgaggaaacgagcagaaccgccgaactgcgacaggatcctgtctacggcagctatcagcataaagaacatcatgatgtacatgatgatttcgttaattcccatcgcctttactccctgttagttgttatttattggcggatgcggcgtaaacgccttatccgccctacatgtgcaatcccgaaggccggatcagacgcggcaagcgtcgcatccggcatttattgcgccgctgcgtacaggccgacaatctgctccaggctggcggtacgcgggttgctgcgcagacaaatatcttcctgcgcggcctgcgcccatgcaccgtaatgcgcagatgtcgcgccaacatcgcccagtcgtttaccaatcccaacttccgcaatcagctcacttaccgcgttaatagcgtcacgatcgtcggattttttagttcgcagtgcccgaccaatctgactaaaccgttcgcgacaaaccatccggttaaattccatcaccgttggcagcaacatggcgttcgccagaccgtgtggaatatgcagcgccgcgcccggctgatgcgccatcgcgtggcacaacccaagacccgcactggaaaacgccattcccgccatacatgaagccagcaacatgctctcgcgcgcggcaaggtcgtgaccgtagcccaccgctttcggcagcgatttgccaatcatcgcaatggcaccaatcgccagactgtcggtaaacggtgtagcgttcagggcgctgtatgcttcaatggcatgggttaacgcatcaatgccggtcatcgccgtgacatgcgacggcacaccttcggtcaatgcggcgtcgaggatcgccacatccggcatcagcgaggcatgggctaacacctgcttgcgcccgctcaccgcgtcgataatcaccgttacattggtggtttcagagccggttccggcggtcgttggaatggcaatcagcggcaagcgcggttgcagaacgctgatttctgacatctctgccagcgtgctatccgggttcgtcaccagcaacgccacggctttcgccgcatccagcaccgagccgccgccaaatgcgatcaccccatcacagcctgactcacgcaactgcgccacggctgcacacacgtcggtgatgcacggttcgcccaccggacatggccagagcgtcatggcgatacctttaacggccaggctacgcgtcagcccggcggtcatccctgcctgatgcaaaaagctgtctgccatcacgaacagatgtttcagcccacgcgtttgcgcttgctgtccgcaactgctcaccgagcccggaccgcaaagcgtcaccggtggaacgctaaatgtttttacccgttgcagattcagggtatcgaacgcctgaaagagcgcggtctgcaattcattttgcatatagcccctccgctttctctcgcccactactggcgatcgccagcggggtcataaacaaactgtgctgcggtaaatgcacctgtaacgccgggaattgtttgcgaaacagttccgccacgcccggttgcatacaagagccgcccgccagccataaatcagtaatgccctgcccttcaatatgccgggcgacaatgtccgccattttttcgtacaccggtttcaccgcgggccaaatctcgtcaccatgaccgcgcttgtactgctctgcctcttccagcgaaatacgacgatttccggcgagagtcagagagatgtgatgtccgccggtggcttcatccgccgagtacgtcaccttgccctttttcacgatggcaatgccggtagtgccgccgccgatatccactacaccggcgttgtccagttgcagcagatccgcgactgcggttggctcatccagcacatggctcacttccagcccggcagattccagcacgttgatggaaatacgcgggtccgtacctggaggaaatgaagtcgccgcatggctaaaacgaagaccgaattgctgctcaagagtgtcgagatggcgacgaacaatggtgaccgcaccgaagaaatcccagacgatgccgtcgcggaccacatcggcccagtcgaggcataccgccaccggctgaccgtcgcggtcaacaaccatcgacaccacatcgcaggtgcccagatccacccccagccacagcggagattccgtcgcggcgggcgtctggttacacagcgttgccgccgtttgcagacgtggggtgagccattgttcgtcgtgcgccatctgttactccttaaacaatgcgaaacgcatcgactaatacacagcgacgcagacggacaaacgtacgcgcgctggttaccccttcaccggttggcgtggtgatggtcatggtggtccagccttccccgcccagccccagcccggcaatgcacggtccgttcttaacgaaaatgctggtatcaatagcattcgccatctggttcatgttttcgatgttgcgcgagtgcattgccgccgtgtggtggcaaccgccttccagtttcaccgccagcgcaatggcatccgccacgttggcgacgcgcacgacgggcagcaccggcatcatcagttcggtcacggcaaacggatgttctgcagtggtttccacaaacagcaaacgcgtttcttgcggcacgttcaggccgattgccgccgcgattttcgccgcatcgcgaccaacccagtcacggctgacggtgccttttccgcgctcgtcgatatttttcagcaacaccggttgcagctgctgcgcctgttctgcggtcagtttcaccgcgtgctggccttccatcagacgcatcagttcatcggctacgctatcaacaacaatcagtaccttttcgtcggcacaaatgatgttgttatcgaaagacgcgcctttgacgatggactgagcagcacgggcgaggtcagcggtttcatccaccactaccggcgggttgccagcgcctgcggcaatcagacgtttattggtgtgtttacgcgccgcttctactaccgcttcgccgccggttaccaccagcaggccgatacccggaaacttgaacaagcgttgcgcggtttcgatatccggatttgccacagtaaccagtaagttttccggcccacctgcggcaacaatcgcctggttgagcagcgtaatcgcccgctgggagacttttttcgccgccggatgcggggcaaaaatgacgctgttgcccgcggcaatcaggctgatggcgttattaattacggttgccgccgggttagtggacggagttaccgaagccaccacgccccagggcgcgttttcaattaaagtcaggccgttgtcgccggtcagcacctgcggagagagacactcaacgcctggcgtgccgcgcgcctgagcgacgtttttggcaaatttatcttcaacgcggcccatgccggtttcactgacggcaagttccgctaaatctctggcgtgtttttcgcctgcctcacgaatggcagcaatggctaactggcgcattgccacgctttttaacccttgctgggcgactttggctgccgcaacggcgtcatccagggacgcgaaaacgcccatctcatgaacggcggcggacggcgtgtcactgctttgcattttcagcagtaccgctttcaccacctgttcaatatcctgttgattcatgatgttctgccttatttgtggaaaattacctgaccgccagacaccacctcatcgacaatgccaatcacgcacagatcgaccggtgacgtttcgcttttatgcgcctggcgggcggaactgccactcaccagtaacacccactccccggttcccgcgccaatattgtcgatggcgacggcgcattgcccgtcaggattaccttgtggatcaatcatttccaccatcagcaatttgtcatgcgccagtccgtgatggcgtacggtacaaacaatttgtccagtgacgactgccagtttcatacccgcctccgtggcgtatttcaggtaaaagctccccctaccctccgcagaaggtaaaatgaaaaaggagagagcgtgacgcccgaatcgacgtcacacagggtgattacaggttgctgctatcgcctttcaggccgatcgggaagacttcttccaggtcaccgtgcggacgcgggataacgtgtacggataccagctcgccaatacgctgtgccgctgcggcaccggcatcggtcgccgctttacaggctgcaacatcaccgcgaaccatggcagtacacaggccgccgccaatctgcttaacaccaaccagcttgacgcgcgcagctttcaccatcgcgtcagaagcctcaatcagtgcaaccaggccccgggtttcgatcattcctaatgcttccattgtgctttcctctttatcagggtccagaacgggaccgttcattcaaccagtgtttgtaaactgctttcgcggttcacttttgtctgacgcggcacagctgccaccagcgccagctcgataatttcctgcacgctacaaccacgagagagatcgtgcatcggcgcggcaagtccttgtatcaatggcccgacggcacgatatccgccgagtcgttgtgcgattttgtagccaatatttccggcttccagcgacggaaaaaccatcacattggccttgccctgnnnnnnnnnncgctttttgcgccgccacttccggcacgaaggcggcgtcaaactgtaactcgccatcaaccaccagctttggtgcgcgctcacggacgatttctgtcgcctgctggacgttggcaacgcaggggtgacgggcgctaccgttactggaaaacgacagcatcgccacgcgcggctcttctccggtgatggcgcgccaggtttcggcactggcaagcgcgatatccgccagctgcgccgccgtcggctgtggcaccacgctgcaatcggcaaagcccaacgccgggccgctgtactgtggcaacatcaggaaaatggaagagagcgttttacagcctggctgcaagccgataatgcgtaatccggcacgcagcacatttgccgtggaagagaggttgcccgcgatacagacatccgctttaccggcgctgaccattgctgcggcgaacatcagagggtcggtaagtttttccagcgcatccggcggcgttttttcgcccgcgcgggccagccagcgatgagcaaattcttcccgcattgcgaggttgccatgcggatcaatcacctatagcccgtccatcgccacgccgtgactgagcgcaaactgacgaagttcaaacggattggcgaccagaatgggcgttgccagaccttgttgatgtaaatattgcgcggctttcagcacacgttggtctaacgcatccggaaaaaccactctggcgggcgctcgcaacgccagttcacgacaacgttcaataatcattgcgtttcccccagtcgttgttggatctgcttcaccgttagcggctgcttcgttacgctcaggatcatcatcacgtagaccgtgctcgaaaggcggttcagcgcctgcaaaatgtccgggcgtaatacttcaaagctgcgggtgataaagacctgcgccgctacggtttcggtttcccgcactttggtgcgtagcagattgagcaacgcagcatcgcgcccgtggctggcttccggcaccagatgatcgtggtcgagatagcgcagcggctgatgagaaagccgatgcagatcttcgtcagaaagcccgacaatcgcctggcagcccagcggttcccccagcgcatcggcgcgcataatgttgccaagacgcgaacggatatccgccagccacggctgccacggttccgccagttcaatttgcagccacactgccagcgcaatggtgctgtcgagaaccgcgcgaaaacccagacgcggatcgcttttggcgaccattttttccgccgacaggtgagtcagcgtatccggcttttttgccaccggctggcggcacagttcgcagcacgcctgcggatgttcatcgctactggtcagcccatgaacgggctgcggctgctgctgttcatcgtcaacaaacaggcggccctgctcgtcaataaacttgatgcgcagatggcggctttccagcaactcccgggcagagggcgtcaggcgactgtccgcagggagatggatctctgcgccttcgctgagcgtatggttcgctcttagccatgcttcggtgatgaaatctttcatagggattgccagttagccggccaggcgacatacaggaatttcacgctggatgtcgtaccaaattcgatgctggagcctttcgggataaacatcacgtcgcctgctttggcgatcatggtttcgccttcgtggcgaacatgtagctccccttccagcaccatgtcgatttcgtcgtagttcagggtccacgggaagaatgcgttctcccactgcataaaaccggcggccatgctgctgccgtcgtctccggtcacaagatcagtcaagcccacgcaatgcggctctgcgccgtcgaaacgaccaaacttgacgctgctgccatcaatcactttgatgccgcctttgccggtcaccgatttgaagctcggctgcattgcgccctgctccagcgactgtttttccttcatcactttttccatcagctgtgcgaccaggctttcggtaaactggccttccggcagctgggcaatgatggtttcgcggatgcgctggctttcggttttgtcggctggcacgctggcgggcacggacgccgttaccgggatcgattcatcacattcggtgatggtaaaacccagtagatccgccacttcacgggcttccggggtaataatgctggcgcgcagaaccacggacattgcctgttcgccgcgcgcgtgtgcttcacgaatatcattcgctgtgatgagttttttcacctgcttcctcctgtttggtgagagatgccagataatccaccagttgctgcacgctttgcgggtcgtggctgtttagctcgaaaatcggctcttcgaaacccgtctcaagcaataactttcgcgttgcggcgacgtcagcatctggcatgtccgttttactgatgacggcgatttgccgtttgctgacgccaatatccagcaacccggcaggcaaccgactttccgggtcatttgcgccatggacatagatcagcatgtctacatcctgtagcgtggtaattaaggcgtgataccagcggggatggctaaaatattcacccggcgtatcaatatcgcccttatcatnnnnnnnnnnattaaattccacggcctgtgtttttctggcgagggtataattcccctgcaacgcattaaataacgttgtttttcctgccccgacgctacccacaaacgcaattcgtttcatgaatgcctcgtattaacttttggtcatttcacaaagcgtataatttaataagcgacctaaaccgctgacggtttgtgataacgcttcttctactgcgcccaccgagccataaatcaccaatgcaccgctgaagcggtcgagaaaaccgatatgcacatcagcggctttcagcgctaaatcaccggcgatcatcgccgtttcgccgggagttagcgtcataatgccaattgcgcccgcatccggaacgccgattttcttcgccagttcctcaccgggatgcgcgatgagatgcgccagtgtgacctgtttgccgggcacaaattcctgaatgatgcgttctttatccatgagtcgccgcctgtgaaaaactttcgtgtatcgtgacaatttttcgtcagagtaaataacaaaattcggcaagcgcgtttaaaaggtgaggtagatcactaagaatggagagatattcgctgtggtgcataaactttcatatgcaacgcatgaatataaataaaataatatcgagatattatatagactgctttttttattattcgcaaactcagtaataagctttactaatatattgcagccaaaccgcttaccctgaatattcagggtaagcgtgagagttaaaaaagaattacagcggttgggtttgcgcttcaaccacggccagcgccaccatgttgacgatacgacgcaccgatgcgatcggcgttaacacgtgaaccggtttcgccacgcccatcagcaccggaccgacagtcacaccttccgagctggaaacgcgcagtaagttgtaactaatgcgggcagcttccatgttcggcatcaccagaatattggcagaacctttcaaagggctgtccggcatacggtcgttgcgaatcgcttccaccagcgctgcatcgccgtgcatttcaccatcaatcatcagatctggcgcacgatccctgaccagttccagcgcctgacgcattttgctcgacgacgggcagtcagaagaaccaaagttggagtgcgacaacagagcaacgcgcggctcaataccaaaacgacggacagtttctgccgccatcaaggtgatctccgccagctcttctgcgtctggttcgtcattgacgtaggtatcggcaataaaggtgttaccactcggcagcagcagcgcgttcattgcacctgcggtgtgaacgccatcgcgataaccaaagacatttttcaccacgctaaaatgttcatgataatcgcccaccgtaccgcagatcattgcatcggcttccccacgctgaaccatgatcgcgccgatcactgtcgggttactgatcagcgcccgctgcgcctgttcctgagtgacaccgcgacgcttcatgatctggaagtattcggtccagtactctttaaagcgcggatcggattcgttattgacgatctcaaaatcaacgcccgctttgatctgcaagcccagtttctgaatgcgcatttcgatcacgttcggacgaccgataaggatcggtttcgccagtcccagcgttaccagttcctgagtggcatgcagaacgcgcgcctcttccccttctggcagaacaacgcgcttcggcgctttgcgagcctgggagaaaatcggcttcataaacaggttggttttgtaaacgaactcagtcagcttgtcgatgtagacgtcgaaatcagcaatcggacgcgtcgccacgcccgactccatcgcggctttagcgaccgcaggagcgatcttaacgatcaagcgcggatcaaacggttttggaatgatgtattccggaccaaagctcagatcctgatcgccatacgctgaagccaccacttcgctctgttcggcgtgggccagttccgcaatcgcgcgtaccgccgccagtttcatctcttcattgatagccgttgcgccaacatccagcgcgccacggaagataaacgggaagcaaaggacgttgttgacctggtttggatagtcagaacgaccggtgcaaatgatggcatccggacgcacttctttcgccagcggcggcagaatttccggttccgggttcgccagcgccaggatcattggcgcacgagccattttcttcaccatttcctgggtcagcactttcgggccggaacatccaaggaaaatatccgcgccttcaatcacatcatcgagggtacgtttgccgtcatccaccaccgcatatgcggctttggtttccgccatgtttggctcacggccctgatagataacgccttttgaatcgcaaaccacgatgttatgtttttgcagacccagcgctaccagcaggttcatacaggcgattgctgcggcacccgcgccggaaaccaccatccgcacgtcggagatgtttttctccaccacgcgcaagccgttgaggatggcggcagtgctgatgattgccgtgccgtgctgatcgtcgtggaataccggaatattcatccgctcgcgcagtttctgttcaatatagaaacattctggcgctttaatgtcttcgaggttgattccgccgaaggtcggttcgagcgcagcgacaacttcaataaatttgtccgggtcgagttcatcaacttcaatgtcaaatacatcaatcccggcgaatttcttaaacagaacgcccttgccttccatcaccggtttgccagccagcgcgccaatgttgcctaaccccagcaccgccgtaccgttagagatcaccgccaccaggttaccgcgcgcggtatatttgtaggcttttaacgggtctttttcgatttcaagacaaggtgcggcaacgcctggtgagtaggccagcgccagatcgcgctgcgttgccagaggcttggttggagaaacctggattttccctggaactggaaattcatggaaatcaagtgcactttgttttaactggtcatccatttggttgttcctttcacgtaacgttcacaaataaagtgtgtgggcaacagcccctgcccacaacgtggcgcacattattaccctgccggagtctacagactttgagcaagtccaaactctcaccattaatataatgttttggtaataatcctataacactgatgttacctgcttaatccagcaataccatgcctgtctgctatgcttttttgatgcgtttagcgaaatttctcagaagtgtgaattaacgcactcatctaacactttacttttcaaggagtatttcctatgaacgagttagacggcatcaaacagttcaccactgtcgtggcagacagcggcgatattgagtccattcgccattatcatccccaggatgccaccaccaatccttcgctgttactcaaagctgccggattatcacaatatgagcatttaatagacgatgctatcgcctggggtaaaaaaaatggcaagacccaggaacaacaggtggtcgcagcgtgtgacaaactggcagtcaatttcggtgctgaaattctcaaaatcgtacccggtcgcgtgtcaacagaagttgatgcacgcctctcttttgataaagaaaagagtattgagaaggcgcgccatctggtggacttgtatcagcaacaaggcgttgagaaatcacgcattttgatcaaactggcttcgacctgggaaggaattcgcgcggccgaagagctggaaaaagaaggtattaactgcaacctgacgctgctgttttcttttgcccaggcgcgggcctgtgcagaagcgggcgtttttctgatttcgccgtttgtcgggcgtatttatgactggtatcaggcacgcaagccgatggacccgtatgtggtggaagaagatccgggcgttaaatcggtgcgcaatatctacgactactataagcaacaccactatgaaaccattgtgatgggcgcgagcttccgtcgcaccgaacaaatcctcgccttaaccggctgcgatcgactgactatcgcaccgaatttgctgaaggagctgcaggaaaaagtttcgccagtggtacgtaaattaatcccgccttctcagacgttcccacgcccagcacccatgagcgaagcggagttccgttgggagcacaatcaggatgcgatggcggtagaaaaactgtctgaaggcattcgtctattcgccgttgatcaacgcaaactggaagatcttcttgccgccaaactataaaccagccacggagtgttatatgtcccgaaaagaccttgccaatgcgattcgcgcactcagtatggatgcggtacaaaaagccaattctggtcatcccggcgcgccgatgggcatggctgatattgccgaagtgctgtggaacgattttcttaaacataatcctaccgacccaacctggtatgatcgcgaccgctttattctttccaacggtcacgcgtcgatgctgctctacagtttgctacatctgaccggttacgacctgccgctggaagaactgaagaacttccgtcagttgcattcgaaaaccccaggccacccggagattggctatacgccaggcgttgaaaccaccaccggcccgcttggacaaggtttggcgaacgccgtcgggctggcgatagcggaacgtacactggcggcgcagtttaaccagccagaccatgagatcgtcgatcacttcacctatgtgtttatgggcgacggctgcctgatggaaggtatttcccacgaagtctgttcgctggcaggcacgctgggactgggcaagctgattggtttttacgatcacaacggtatttccatcgacggtgaaacagaaggctggtttaccgacgatacggcaaaacgttttgaagcctatcactggcatgtgatccatgaaatcgacggtcacgatccgcaggcggtgaaggaagcgatccttgaagcgcaaagcgtgaaagataagccgtcgctgattatctgccgtacggtgattggctttggttcgccgaataaagcaggtaaggaagaggcgcacggcgcaccactgggggaagaagaagtggcgctggcacggcaaaaactgggctggcaccatccgccatttgagatccctaaaaagatttatcacgcctgggatgcccgtgaaaaaggcgaaaaagcgcagcagagctggaatgagaagtttgccgcctataaaaaggctcatccgcaactggcagaagagtttacccgacggatgagcggtggtttaccgaaggactgggagaaaacgactcagaaatatatcaatgagttacaggcaaatccggcgaaaatcgctacccgtaaggcttcgcaaaatacgcttaacgcttacgggccgatgctgcctgagttgctcggcggttcggcggatctggctcccagcaacctgaccatctggaaaggttctgtttcgctgaaggaagatccagcgggcaactacattcactacggggtgcgtgaatttggcatgaccgctatcgccaacggcatcgcgcaccacggcggctttgtgccgtataccgcgacgttcctgatgtttgttgaatacgcccgtaacgccgcgcggatggcggcactgatgaaagcgcggcagattatggtttatacccacgactcaattggcctgggcgaagatggtccgacgcaccaggctgttgagcaactggccagcctgcgcttaacgccaaatttcagcacctggcgaccgtgcgatcaggtggaagcggcggtgggctggaagctggcggttgagcgccacaacggaccgacggcactgatcctctcaaggcagaatctggcccaggtggaacgtacgccggatcaggttaaagagattgctcgtggcggttatgtgctgaaagacagcggcggtaagccagatattattctgattgccaccggttcagagatggaaattaccctgcaagcggcagagaaattagcaggagaaggtcgcaatgtacgcgtagtttccctgccctcgaccgatattttcgacgcccaggatgaggaatatcgggagtcggtgttgccttctaacgttgcggctcgcgtggcggtggaagcaggtattgccgattactggtacaagtatgttggtctgaaaggggcaattgtcgggatgacgggttacggggaatctgctccggcggataagctgttcccgttctttggctttaccgccgagaatattgtggcaaaagcgcataaggtgctgggagtgaaaggtgcctgatggtgatcgccggatgctgattgccggatgcgacgctgacgcgtcttatccggcctacagcgtcttatccggcctacatgtccccgcaattttgtttaacgggtgatccacaacgtgggccaggcgtctggcccatgccagttatcgcaggtgggttctgcggcataacgcaccaggcgaaaacgctgaccgtcaaagcgccagcgcgcctgaatgccacaatcgcttaatccgcgccctttcgctaaggtcaccagttcacgcgatttctcatcaaatgttgcgttcatcagttccagttcattcgtctcctgaccgttgttgaacggcaaacgcaaccgaaccgggcgcgaggctagtggctttttacgcgacacaatccatgccaaatcaatggtgttataggcccctgcctcacagctaatcatcatcagcgctttatcatcagtcagcgcagtgacattcacctcacgacgtaacggatcaagcgagcagcgcagaccattcatccgccagtttccataatccagcaaatcgttgcgttcttcgagtgagagtggcgtcggcgttgggttaaccaccgcgacctctttcagcgcaggcgcgggcggtacgctgagcggcggttcgtcccctttcttgatccacgcggtttcactgccaacgcgcttttgctgagcatcaataaacaacaacgccgcttttaagccactcagagaaatggtctgattgccgtcgcgtaaggtgatcgccttcccttcctgaatcatctgcaaaaacgcggtgatggttgcnnnnnnnnnncggttactaataaccatggtgaaatccgccacttgtcaccacttaacgccaacggctcaccatctaacagcagccgtggcgctatctctccttcagacgcatccggcgacttcaacccgccgcgctcaatacgtaaaacggcatcggtatgcgccccggcgctgcggctcagggtcatcaccagtccattatgatcacccgtattgcgcgccacgcagaagttttggttattacaggtgacctgccagtcggaaaacgcccgttgcgctggtgccgcccacaccaaagacgtcggcaacaaagcgaaaaaaaagagaaggaaaatgcgatagcgcatggacggtacgaccccagaagttcaaacaaacagcacaagtcgtatcttcgttgcgcaggtagcgcggctcaatcagatttgtcggattgagccaataataaacaacgaaatattattgttatttttcagtccattaaatgtgacgtttgcaaatagttaagcaataacaccgtcttaccgtcacgtatctcgccggttttgatcatctccagcgcctggctgaacggcagctcgagcacttcaatatcttcatcttcaacaccgccaccggcgttagcgcgctgattgtcactgtattcggcgataaaaaagtggattagctcagtcacaccgccaggcgacatatacagttcaaataatttgcgcacttcgcccacttcatagcccgtctcttcaatcgcttctttacgaatgcacacttccggttcgtcgttatccagcagcccggcgcaggtttcaatcagctgcccgctttcattgccattaacccaggtagcgacacggaactgacgaatcagaaccacggtctttttcttcgcgttgtacaggaggatcgtcgcaccattaccgcgatcgtaaacttcacgtttatggcggataacttcgccatctttgcgcgtgagatcgtaagtaatgttgtgcagggtgaaatagttatcggagagaattttgtctttaatgagggtgatttgttgcgtcatagcgactccacagcgcgaaatgaacaattatcttacgctgtgaagtcgggtttgtctgcgcaggctatcagtgagatttgactgattttacccccagccagtcaataatgccctgtgccgcatgacgtccttctgccattgcggtaaccaccagatccgcaccacgcacggcgtcgccaccggcgaagattttcggattggtggtctggtaacggtactggctttccacatccgcgatgatgcggccccatttgtctaccgttacaccgtgcgactccagccacggcatcccgtgtggattgaagccaaacgccataatcaccgcatcggctggcatgacaaattcactgccctcaatcggtacaggtcgccgacgcccctgggcatccggctcgccaagacgcgtgcgcaggaaacgaattccgcaaacgtgaccttgttcattcagctcaagcgccaccggctggacgttaaattcgaagttggccccctcttcgcgggcgttcttcacctctttcttcgagcctggcatgttagcttcatcacgacgataagcgcaggtgacgttactcgcgccgtggcgcagcgcagtacgcacacagtccatcgcggtgtcgccgccgcccagtaccacgacgttaagtccggcggtattgatannnnnnnnnntccggtagctcttcgagccccatcacctgtttagtgttggcaatgaggaacggcagcgcgtcataaacgcccggcgcatcttcattgggtaaacccgctttcatggaacggtaagtgcctacgccaacgaagaccgcgtcgtattgttccaaaagcgaatccaaagagacatctttacccacttcacaattgagttcgaagtgaatccccatcgcgctgaagatttcccgacggcgtgccagcagggatttatccagtttgaaagaagtaatgccgaaagtgagcaagccaccaatttctggatggcgatcgtacaccgtcaccgccacgccattgcgggtcagaacatccgcacaggccagccctgccgggcctgccccgataatcgccacccgcttgtccactttggtgacatgacttaagtcaggacgccaacctttcgccaacgcctgatctgaaatatagcgttcaatgttgccgatagttacagcaccgtgctcatcgcgaatagtacaggcaccttcacacaaacggtcttgcggacaaacgcgtccggtaatttccggcagggtgttggtctggtgagaaagctcgacggcggcgtcgatgtttccggctttcaccagttcaatccactgcggaatatggttatgcagcgggcaggtccattcacaaacgctgtgctcgccgcacttaaggcagcgcgaggcttcccgttgtgcctggtcggcgcgaaatggcagataaatttcatcaaaaccggttttgcgcgcttcaatcgccagtttatccggctcgccacgcgcgggcgttgcctgcatttgttcgactttactcattaccggcatttcttgcgccgcggtactggcatgccacggttgatgttcctgacgcgcggtgcgcaagcggcgggatttcgccatgccggagagtgcgacgtcagtgaccagttgcagcgcgtccgccgggcaattctcaacacaggcaggaccgttttcgcgccccgcacaaaggtcgcatttatgcgccgtggcttttacttttcctgccgcgacgggtgtcaggacgatttgcatcgtaccaaaaggacaggccaccacgcaggatttacagccaatacacttttgctgattgacctgaatgctgtcatcaacgtggctgattgcgccattagggcagctacgggcgcagggcgcatcttcacaatggtgacaggtcactgcactacgttgctgttgatgtttgataaccgtaattcggggatgaaaatggtgttggctcaggacatgttgctcatcattgtgagccatgacacaggcgatttcacaagcatgacaacccagacattgctgactgttggccataataaaacgattcataacgaccttcttttttggttgtaaaaaccttattctttatatgagtgttgttattacccgacttacaggggaatcggcaatgttcatgtgcccagaataagtaactatttcgctataaactgtggcagatcaaataatcccatcactgactaaattgtgtttcagctaactggaacattaatgattttttgtggagaagacgcgtgtgattgttaaacgacccgtctcggccagtctggcccgggcctttttttacattgtgctgctgtcgattctttccacgggtatcgctctgctaactctggcgagcagtttgcgcgacgctgaggctatcaatattgccggatcgctacgtatgcagagttaccgcctgggctacgacttgcaaagtggcagtccacaactcaatgcacatcgccagttgtttcagcaggcactgcattcaccggtattaaccaatctcaacgtctggtatgtgccagaagcagtaaaaactcgctatgcgcatctgaatgccaactggctggagatgaataatcggctcagcaagggcgatttgccgtggtatcaggccaatattaataattatgttaatcagatagacctgttcgtgctggctttacagcactacgctgaacgcaaaatgctgctggtggtggcgatttccctggctggcggtatcggtattttcacgctggtcttttttactttgcgccgtatacgccatcaggtggttgccccgctgaatcagctggttaccgccagtcaacgtattgaacacgggcagttcgactcgccgccgctggataccagtctgccgaatgagcttggnnnnnnnnnngcaaaaacctttaaccagatgtcgagcgagctgcataaattgtacctttcgctggaggcgtcagtagaagaaaagacccgcgatctccacgaggccaagcgtcgtctggaggtgttgtatcaatgttcccaggcgctgaacaccagccagattgatgtgcattgtttccgccatattttgcagattgttcgcgataatgaagcggctgaatatctggagttaaatgtcggtgaaaactggcggattagcgaagggcaaccaaacccggaattgccgatgcagattttaccggtgacaatgcaagagacggtttacggcgaactgcactggcaaaatagtcacgtttcatcatcagaaccgctgcttaacagcgtttcgtcgatgctgggacgcggtttgtactttaatcaggcgcagaagcattttcagcagttattgttgatggaagaacgtgcaaccatcgcccgcgaattgcacgactcgctggctcaggtactttcttacttacgtatccagttgacgttactgaagcgttcgataccggaagataacgccaccgcacaaagtatcatggccgatttttcccaggcgttgaatgatgcttatcggcagttacgcgagctgttgactactttccgcctgacgctgcagcaggcggatctcccctccgcgttgagggaaatgctggatacgttacaaaatcaaaccagcgccaaactgaccctcgactgccgtctgccaaccctggcgctggatgcgcaaatgcaggtgcatttgttgcaaattattcgcgaagcggtgctgaatgcgatgaagcacgccaacgccagcgaaatcgccgtcagttgcgtcaccgcgccggacggcaatcacacggtttatatccgtgataacgggattggtatcggtgaaccgaaagaacccgaaggtcattatggtctgaatatcatgcgcgaacgcgcggaacggctgggtgggacgctgactttttcacaaccttccggcggcggcacgttagtgagtattagctttcgctccgcggagggtgaggaaagtcagctgatgtaatgcctcctactgaccaaagaatacttgcacttaaggttcagtataaaagggcatgataatttacattaactcctttttttctccacgattggctcgtaccttgccgctacagtgaagcaagtcaagcctacaacgatacgcagaaacacgaggtcctcttttaatggcgaatttctttattgatcgccccatttttgcctgggtgctggcaatcctgttgtgtctgacaggtaccctggcgattttctcattgcccgttgaacaataccccgatctcgcgccaccgaatgtgcgagtgaccgctaactatcccggcgcatcggcccagacgctggaaaacaccgtgacccaggttatcgagcaaaatatgaccggcctcgataatctcatgtatatgtcatctcagagcagtggcaccggtcaggcatctgtcactttaagttttaaagcaggcaccgatccggacgaagccgtgcagcaagtacaaaaccagctgcaatcagccatgcgaaagttaccgcaggcggtgcaaaatcagggcgtgacggtgcgtaaaaccggcgataccaatattctgaccattgctttcgtctctaccgatggttcgatggataaacaggatattgccgattatgttgccagtaatattcaggacccgttaagccgcgtgaatggcgtcggggatatcgatgcctatggttcgcaatattccatgcgtatctggctggacccggcgaaactcaacagtttccagatgacggctaaagatgtcactgatgccattgagtcacagaacgcgcagattgcggttgggcaacttggtggtacaccttccgtcgataagcaggcgctcaacgccaccattaacgcccagtcactgctgcaaacaccagaacagttccgcgatatcaccttgcgggtgaatcaagacggctcagaggtaaggctgggcgatgtcgccaccgtcgaaatgggggcggagaaatacgattatcttagccgcttcaatggtaagccagcctccgggctgggggtaaaactggcctccggcgcaaacgaaatggcgacagcggagctggtgctcaatcgtctcgacgagctggcgcagtacttcccgcacggactggaatacaaggtggcgtatgaaaccacctcgtttgttaaagcctccattgaagacgtggtgaaaacgctgctggaagctatcgctctggttttcctcgttatgtatctgttcctgcaaaacttccgcgccacgctgatacccactatcgccgtgccggtggtgttgatgggaaccttctccgtactttacgccttcggttacagcgtcaacaccttaaccatgttcgcgatggtgctggcgatcggtctgctggtggatgacgccatcgtggtggtggaaaacgtcgaacgtattatgagtgaggaaggactcactcctcgcgaagccacacgtaaatcgatggggcagatccagggggcactggtcgggattgcgatggttctttcggcggtatttgtaccaatggccttcttcggcggcaccaccggtgccatctatcgccagttctctattaccattgttgcggcgatggtgctgtcagtactggtagcgatgatcctcactccggctctgtgtgccacactacttaagccactgaaaaaaggtgagcatcacgggcaaaaaggcttttttgcctggtttaaccagatgtttaaccgcaacgccgaacgctacgaaaaaggggtggcgaaaattctccaccgtagcctgcgctggattgtgatttatgtcctgctgcttggcggcatggtgttcctgttcctgcgtttgccgacgtcgttcttaccgctggaagaccgtggcatgtttactacctcggtacaattgcccagcggttcaacccaacaacagaccctgaaagtcgttgagcaaatcgagaaatattacttcacccatgaaaaagacaacatcatgtcggtgtttgccactgttggttctggccccgggggtaacgggcaaaacgtggcgcgaatgtttatccgcctgaaagactggagcgaacgcgacagtaagaccggcacctcgtttgccattatcgagcgtgcaacaaaggcgtttaacaagattaaagaagctcgcgttatcgccagcagcccgccagcaattagcggtcttggtagttctgcgggttttgatatggagttgcaggaccacgctggagcaggtcacgatgcgctgatggcagcacgtaaccagttgctggcgctggcggcggaaaacccggagctaacccgtgtgcgccataacggcctcgacgacagtccgcagttgcagattgatatcgaccagcgtaaagctcaggcgctgggcgttgatatcgacgatattaacgacacactgcaaaccgcctggggttcgagctatgttaatgactttatggatcgcggtcgcgtgaagaaagtctatgtgcaggcagctgcgccgtatcgcatgctgccagatgacatcaatctctggtatgtccgaaataaagatggcggcatggtgcccttctctgctttcgcgacctcacgctgggagacaggctcgccgcgtctggaacgctataacggttattctgcggttgagattgttggggaagccgcaccgggggtcagtaccggtacggcgatggatattatggaatcgttagtgaagcagttgccaaacggctttggtctggagtggacggcgatgtcgtatcaggagcggctttccggcgcgcaggctccggcgctgtacgctatttccttgctggtggtattcctgtgtctggcggcgttgtatgaaagctggtcggtgccgttctcggtaatgctggtcgtgccgctgggggttatcggcgcgctgctggcaacctggatgcgcgggctggaaaacgacgtttacttccaggtgggcctgttaacggtcattggtttatcggcgaaaaacgccatcctgatcgtcgagtttgctaacgagatgaaccaaaaaggccacgacctgtttgaagcgacgctccacgcctgccgtcagcgtttacgcccgattctgatgacctcgctggcatttatcttcggcgtattgccaatggcaaccagcacgggtgccggttccggtggtcagcatgcggtgggtactggcgtaatgggcgggatgatttcggccactattctggctatttacttcgtgccgctgttctttgtactggtgcgccgccgcttcccgctgaagccgcgcccggaataagcaataaaaaaggcgacatgctaatgtgtcgcctttttcaactttccgattaagaacctgctcagcgctgagagatcccctcataatttccccaaagcgtaaccatgtgtgaataaattttgagctagtagggttgcagccacgagtaagtcttcccttgttattgtg

SEQ ID NO: 177 - DNA, 49570 bp, Escherichia coli
  source 1..49570: mol_type = genomic DNA
gcgccagcgggatgctgcgctcgccttcaaccggtatccacagtacgcgtttgagcttgtggcgcacatggctggtttcccaggtcaccccgctattacccgttaacggggcaacacaaacgaatgttgtttccagcggacgaccaagactatccacagggatagttttaagttccacgcccagagcggcaaaatcttgctcaggtttactccctgcgctggcacctagccagatctccagtaacacgccaatccagcccttatcgcgttttaaattctctggcgtaacaagcccggcaagtgccgccagttctcccaatgtataaccagaaagttgctgtgcttgcgctaacaactgttcttcagtttcgggaggagagagcagtgggcgaggttgggacatgtcatgataccttgatnnnnnnnnnnaacaaacagcaattatgtgccgaatattcgcagtgtaactttttccacatgtgttgttcaattccctgatttatattgctttttaggctgccggtaatcgagttgcgcaacactgcaacgagttttccaaatctggtcactgaaaataaacaggatcttacaccatgttatccacagaaagctgggataactgtgaaaaacctccactactgtttccatttacagccttgacgtgcgacgaaactccagtttttagtggttcagtgcttaacttagtggcacattctgtggataaatacggcattggttgatctttcgccaacccgtaaatgagaggtgtgacctgggtcacgaattactctttttcattactcaaattacatgtaatgcattgactaataatgaatattttaaaatgtctatatcgggcttattcagaatgctccgggttttcccgtagtaattccgtagttcttcacaactctatccacagaaaaggtgaataaaaacggctatccaccccttcctctgtttataactctgcacataactgtgagttattcaattgttattagtgtgtaatgccctgcagagagtggtttaccgtcttcctggagtatgaaacaatcattcgtatataaagctttattttgaggtagtccggtgattgatgacgatggctaccgcccaaacgtaggtatcgtgatttgtaatcgccaggggcaggtaatgtgggcccggcgatttggtcagcactcctggcaatttccgcaaggcggaatcaaccccggagaatccgcagagcaggcgatgtaccgtgaattgtttgaagaagtaggattaagccgcaaagacgttcgaatccttgcttcaacgcgtaactggttgcgctacaaattaccgaaacgtttggtgcgttgggacacgaagccggtttgtatcggccaaaaacaaaaatggtttctcttgcagctggtgagcggcgatgcagaaatcaatatgcaaaccagcagtacaccagagtttgacggctggcgatgggtaagttactggtatccggtcagacaggtggtgtcatttaaacgtgatgtctaccgtagggtaatgaaagagttcgcgagtgtggtgatgtcactgcaggaaaatacgccaaaaccacaaaacgcatctgcttatcgacgtaaaagaggttaagtcacgccaattatgctcactcgcctgcgcgaaatagtcgaaaaggtagccagcgcaccacgcctgaatgaggcgttaaatattctggttaccgacatctgtcttgcgatggataccgaggtctgttcggtctacctggccgatcatgatcgacgttgttactacctgatggcgacccgggggctgaaaaaaccacgcggtcgcactgtaacgctcgcgtttgatgaagggatcgtcggcctggttggcaggctggcggaaccgataaaccttgcagatgcgcaaaagcaccccagcttcaaatacatcccctccgtaaaagaagaacgtttccgcgcgtttttaggcgtaccaattattcaacgtcgccagttgcttggtgtactggtggtacagcaacgagagttgcgccagtatgacgaaagtgaagaatccttcctggtgacgcttgccacccagatggcagctattctttctcagtcgcagttgactgccctgtttgggcaatatcgccagacgcgaatccgcgcattaccggcagcacctggtgtggcgattgccgaaggctggcaggatgccacgttacctttaatggaacaggtgtatcaggcatcaacgctggatccggctctggaacgcgaacgactgaccggggcgctggaagaagcggcaaacgagtttcgccgctacagcaaacgctttgccgccggagcacaaaaagaaacggcggctattttcgatctttactcgcacctgctttcggacacccggctgcgtcgcgaattgtttgccgaggttgataaaggctcggtggcagagtgggcggtaaaaacggtcattgaaaaatttgccgaacagtttgccgcgctaagcgataactatctcaaagagcgggctcgcgatttacgtgcgctgggtcagcgattgctgtttcatcttgatgacgctaatcaagggccgaacgcctggccggaacgtttcattctggtggcagatgaactgtcagcgacaactcttgctgagctgccccaggatcgcttagtgggtgttgtcgtgcgcgatggcgcagccaactcccatgctgcaatcatggtacgtgcgctggggatccctaccgtgatgggcgcggatattcagccttcggtgctgcatcgtcggacgctgatcgtcgatggttatcgcggtgaattgctggtcgatccggagccggtactgctgcaagaatatcagcggctaattagtgaagagattgagcttagccgtctggcggaagatgacgtcaatttacccgcgcagttaaaaagcggtgagcgtataaaagtcatgctcaatgctggtttaagcccggaacatgaagaaaaactgggcagccgtattgatggcatcggtctttatcgcactgaaatcccattcatgctgcaaagtggtttcccgtcggaagaagaacaggtggcgcagtatcaggggatgctgcaaatgttcaatgataaacccgtcaccttgcgtacgctggatgtcggagcagataagcagctgccttacatgccgatcagcgaagagaatccatgcctgggttggcgtgggattcgcattacgctcgatcagccggagatcttcttgatccaggtgcgggcgatgctgcgtgctaatgccgctacgggcaacctgaatattctgttgccgatggtcacaagcctcgatgaagttgatgaagcacgccgcctgattgaacgtgccggacgtgaagtcgaggagatgatcggttacgaaattcccaaaccacgtatcggcatcatgctggaagtgccgtcaatggtatttatgctgccgcatctggcaaagcgggtcgatttnnnnnnnnnnaccaacgatctgactcaatacattctggccgttgatcgcaacaatacccgggtggcgaacatttatgacagtcttcatcctgcaatgttacgagctctggcgatgatcgcccgggaagcggaaatacatggaatcgatctccgtttgtgcggtgaaatggcgggcgatcccatgtgcgtggcaatcctcattgggcttgggtatcgccatctgtctatgaacggacgttctgtagcgcgggtaaaatacctgctgcggcgcattgattatgccgacgcagaaaatcttgcgcagcgtagtctggaagcgcaactggcgaccgaagttcgccatcaggttgcagcctttatggagcgtcgcggcatgggcgggctgattcgcggagggttatagcgcggatcatatacatatcttttaacggtatccggcaaccagccaggtccccttgtgctattattcgcacctttggagcgcctgaaacctgcggcgcgcatttcaatcgctgttctctttcagcgaaataacaagaacttgtggtgacagatgaccagtagctatctgcattttccggagtttgatccggtcattttctcaataggacccgtggcgcttcactggtacggcctgatgtatctggtgggtttcatttttgcaatgtggctggcaacacgacgggcgaatcgtccgggcagtggctggaccaaaaatgaagttgaaaacttactctatgcgggcttcctcggcgtcttcctcggtggacgtattggttatgttctgttctacaatttcccgcagtttatggccgatccgctgtatctgttccgtgtctgggacggcggcatgtctttccacggcggcctgattggcgttatcgtggtgatgattatcttcgcccgccgtactaaacgttccttcttccaggtctctgattttatcgcaccactcattccgtttggtcttggtgccgggcgtctgggcaactttattaacggtgaattgtggggccgcgttgacccgaacttcccgtttgccatgctgttccctggctcccgtacagaagatattttgctgctgcaaaccaacccgcagtggcaatccattttcgatacttacggtgtgctgccgcgccacccatcacagctttacgagctgttgctggaaggtgtagtgctgtttattatcctcaacctgtatattcgtaaaccgcgcccaatgggagctgtctcaggtttgttcctgattggttacggcgcgtttcgcatcattgttgagtttttccgccagcccgacgcgcagtttactggtgcctgggtgcagtacatcagcatgggacaaattctttccatcccgatgattgtcgcgggtgtgatcatgatggtctgggcatatcgtcgcagcccacagcaacacgtttcctgaggaaccatgaaacagtatttagaactgatgcaaaaagtgctcgacgaaggcacacagaaaaacgaccgtaccggaaccggaacgctttccatttttggtcatcagatgcgttttaacctgcaggatggattcccgctggtgacaactaaacgttgccacctgcgttccatcatccatgaactgctgtggtttctgcagggcgacactaacattgcttatctacacgaaaacaatgtcaccatctgggacgaatgggccgatgaaaacggcgacctcgggccagtgtatggtaaacagtggcgcgcctggccaacgccggatggtcgtcatattgaccagatcactacggtactgaaccagctgaaaaacgacccggattcgcgccgcattattgtttcagcgtggaacgtaggcgaactggataaaatggcgctggcaccgtgccatgcgttcttccagttctatgtggcagacggcaaactctcttgccagctttatcagcgctcctgtgacgttttcctcggcctgccgtttaacattgccagctacgcgttactggtgcatatgatggcgcagcagtgtgatctggaagtgggcgattttgtctggacggggggcgacacgcacctgtacagcaatcatatggatcaaactcatctgcaattaagccgcgaaccgcgtccgctgccgaagttgattatcaaacgtaaacccgaatccatcttcgactaccgtttcgaagactttgagattgaaggctacgatccacatccgggcattaaagcgccggtggctatctaattacgaaacatcctgccagagccgacgccagtgtgcgtcggttttttttaccctccgttaaattcttcgagacgccttcccgaaattttgcaacgtcctgcaacggcgtaaatagtccggaagatgcgccgaagaaatagaaactggccctcgtctttttttctcctcgctccatactgccggcatgaaaacacaacgtggttatacgctgattgaaacgctggtcgcgatgctgattttggtcatgctaagcgcaagtggactctatggctggcaatactggcagcagtcgcaacggctatggcaaaccgccagccaggcgcgggactatttgctctatttacgtgaagatgccaactggcataaccgcgaccacagtatcagcgttatcagggaggggacgttatggtgccttgtgagttccgctgctggggccaatacctgtcatggcagttcaccattggtctttgtgccacgctggcccgaagtcgaaatgagcgacctgacaccttcgcttgctttctttggcctgcgcaataccgcatgggccgggcatattcgcttcaaaaactcaacgggcgagtggtggctggtggtttcgccgtggggaagactccggctttgtcagcaaggagaaacagaaggatgcctgtaaaagagcaaggtttttctctgctggaagtgttgattgctatggcgatcagtagcgtattgttgctgggggctgcacgctttctgcctgcgttacagcgtgaaagtttaacgagcacccgtaagctggcgctggaagatgaaatctggctgcgggtatttaccgtcgcgaagcatctccagagggcgggttattgtcatggcagctgtaccggcgaagggctggaaattgtcggacagggtgactgtatcattgtgcagtgggatgcgaacagtaacggtatctgggatcgcgaaccggtaaaagagtctgaccagattggatttcgtctgaaggagcatgtgctggaaacgctacgcggtgcgacatcctgtgaaggtaagggctgggataaagtcactaatccggatgccatcattatcgacacttttcaggtcgtacgtcaggatgtcagcggcttctcgccggtgttgacggttaatatgcgtgctgccagtaagtctgaaccgcaaaccgtggtggatgccagctatagcgtgacaggattcaacctgtgaaccgcgaaaaaggtgtttcgtcactggctctggtcctgatgctgctggttttgggtagcttgctattgcaaggaatgagtcagcaggatcgcagttttgcctctcgcgtgagcatggaaagtcagtcattgcgccgccaggccatcgttcagtcggcgctggcgtggggaaaaatgcactcctggcagacgcagccagcagttcagtgctcgcagtacgctggaaccgatgcccaggtttgtttgcgtttactggcagataatgaagccttattgattgccggttatgaaggcgtttcgttgtggcgaacaggcgaagtcattgatggaaacattgttttttcgccacgcggctggagcgatttttgtccgctgaaagagagggcgttatgtcagcttccctgaagaatcaacaaggctttagcctgccggaggtaatggttgcgatggtgctgatggtgatgattgtcactgcgttatcgggtatccagcgaacattaatgaacagtctcgccagcagaaaccagtaccaacagctctggcggcatggttggcagcaaacgcaactgcgcgcgatttcgccacctgccaactggcaggtcaaccgaatgcagacatcgcaggcgggatgtgtcagcatcagcgttacgctagtttcacccgggggcagagaaggcgagatgacccgcctgcattgcccgaatcgtcagtagtcaggagccgctatgttaagggtctaccattccaatcgtctggacgtgctggaagcgttgatggagtttattgtcgaacgcgaacggctggacgatcctttcgaaccagagatgattctggtgcaaagtaccggtatggcgcagtggctgcaaatgaccctgtcgcaaaagtttggtattgcggcaaacattgattttccgctgccagcgagctttatctgggatatgttcgtccgggtgttaccggaaatccccaaagagagcgcctttaacaaacagagcatgagctggaaactgatgactctgctgccgcaattgttggagcgcgaagactttaccctgttgcggcattatctgactgacgatagcgacaagcgaaaactgttccagctttcttcaaaagcggcggacctgtttgaccagtatctggtctatcgtccggactggctggcacagtgggaaacaggacatttggttgaagggctgggagaagcacaggcctggcaagcgccgttgtggaaggcgttggtggaatatacccatcaactcgggcaaccgcgctggcaccgcgccaatctctatcagcgctttatcgaaacgctggagtccgcgacgacctgcccgccggggctaccttcgcgcgtctttatatgcggtatttccgcgttaccgcctgtttatctccaggcgctacaggcgctgggtaaacatattgaaatccatctcctgtttaccaacccctgccgttattactggggcgacattaaagatcctgcttatctggcgaaactactgactcgccagcgccgacacagttttgaagatcgcgaattgccgctatttcgcgatagcgaaaatgccggacagctctttaacagcgatggtgaacaggatgtcggcaacccgctgctggcctcatgggggaagcttgggcgcgactacatttatctcctttctgacctggagagcagccaggagctggacgcttttgtcgatgtgacgccagacaacctgctgcataacattcagtctgacattctggaactggaaaaccgcgccgttgcgggtgtgaacatcgaagagttttcccgtagcgataacaaacgcccgcttgatccactggatagcagtatcaccttccacgtttgccatagcccgcagcgtgaagttgaagttttacacgatcgcttgctggcgatgctggaggaagacccgacacttactccgcgcgacatcatcgtgatggtggctgacatcgacagctacagtccgtttattcaggctgtgtttggtagcgcacctgcggatcgttacctgccttacgccatttccgaccgtcgggcgcggcagtcacatccggtactggaagcgtttatcagcctgttatcactgcctgacagtcgctttgtgtcagaggatgtgctggcgctgctggatgtgccggtgctggcggcgcggtttgacatcaccgaagaagggctgcgttatttacgccagtgggtcaacgaatccggcattcgctgggggatagatgacgataacgttcgcgagctggaactccccgccaccggtcaacacacctggcggtttggcctgacgcgtatgttgctgggctacgcgatggagagcgcgcagggcgagtggcaatcggttctaccttatgatgaatcgagcggcttaattgcagaactggtggggcatctggcttcactgctaatgcagctaaacatctggcgtcgcgggctggcgcaggagcgtccgctggaagagtggttgccggtttgtcgcgatatgctcaacgccttcttcctgccggatgcggaaaccgaagcggcgatgacgctgatcgaacaacaatggcaggcgattatcgccgaaggtttaggtgcgcagtatggcgacgcggtgccgctgtcactattgcgtgatgaactggcacagcgcctggatcaggaacgtatcagtcagcgttttctcgccggaccggttaacatttgtactctgatgccaatgcgttccatcccattcaaagtggtttgcctgctgggaatgaacgacggcgtttatccacgccagcttgcgccattgggctttgacctgatgagccagaaaccgaagcgtggcgaccgtagccgtcgcgatgacgaccgctatctgttcctggaagcgttaatttccgcgcagcaaaaactctatatcagctatatcgggcgttccattcaggataacagtgaacgtttcccgtcggtactggtgcaggaactgatcgactacatcggacaaagtcattatctaccgggcgatgaggcgctcaactgtgatgaaagcgaggcaagggtaaaatcgcatcttacttgccttcatacccgaatgccgtttgatccgcaaaactaccagccaggcgaacgacaaagttatgctcgtgaatggctacctgcggccagccaggctggtaaagcacattctgaatttgttcagccgctgccgtttaccttaccggaaaccgtgccgctggaaacgctacaacgattctgggcacatccggtgcgggcatttttccagatgcgtttgcaggtgaacttccgtaccgaagacagcgaaatccccgacaccgagccatttattctggaagggcttagccgttatcaaatcaatcagcagttattgaatgcactggttgagcaggatgatgccgaacgcttgttccgccgcttccgggcggcaggggatttaccgtatggcgcttttggtgaaattttctgggaaacacagtgccaggagatgcagcagcttgccgacagagtcattgcctgtcgccagccggggcagagtatggaaattgatctcgcctgcaacggtgtgcagataactggctggttgccgcaggtgcagccggatggcctgttgcgctggcgtccctctttattaagtgtggcccagggaatgcaactttggctggaacaccttgtctactgtgccagcggtggtaatggtgaaagtcgcctttttctacgcaaagacggcgagtggcgttttccgccgcttgcagccgaacaggctttgcattacctctcacaactgattgaggggtatcgtgaaggaatgtccgcgccattgctggtgttacctgaaagtggcggcgcgtggctaaaaacctgttatgacgcgcaaaacgatgccatgctggatgacgattccacgttgcaaaaagcccgtacgaaattccttcaggcttacgaaggcaacatgatggtgcgtggcgaaggtgatgatatctggtatcaacggctctggcggcaattaacaccagagacaatggaggccatcgttgaacagtcgcaacgtttcctgttaccgctgtttcgctttaatcagtcatgagtgctgtataaaaattgcgcaattcattcgcttacattatgatgcgcaccagtcacggactgatggatatatagacataggctgactcgtgcagcacaagattaaattctggcagatgatttgcgttaacctgttgaatctggccagaaaataaagttgattatgaggtccgtgaatgccccgcagcacctggttcaaagcattattgttgtttgttgccctttgggcacccttaagtcaggcagaaacgggatggcagccgattcaggaaaccatccgtaaaagtgataaagataaccgccagtatcaggctatacgtctggataacggtatggtggtcttgctggtttctgatccgcaggcagttaaatcgctctcggcgctggtggtgcccgttgggtcgctggaagatcccgaggcgtaccaggggctggcacattaccttgaacatatgagtctgatggggtcgaaaaagtacccgcaggctgacagtctggccgaatatctcaaaatgcacggcggtagtcacaatgccagcactgcgccgtatcgcacggctttctatctggaagttgagaacgacgccttgcctggtgcggtagaccgcctggccgatgctattgctgaacctttgctcgacaagaaatatgccgaacgtgagcgtaatgcggtgaacgctgaattaaccatggcgcgtacgcgtgacgggatgcgcatggcacaggtcagcgcagaaaccattaacccggcacaccccggttcaaagttttctggtggtaacctcgaaactttaagcgataaacctggtaatccggtgcagcaggcgctgaaagatttccacgagaagtactattccgccaatctgatgaaggcggttatttacagcaataaaccgctgccggagttggcaaaaatggcggcggacacctttggtcgcgtgccgaacaaagagagcaaaaaaccggaaatcaccgtgccggtagtcaccgacgcgcaaaagggcattatcattcattacgtcccggcactgccgcgtaaagttctgcgcgttgagtttcgcatcgataacaactcagcgaagttccgtagtaaaacggatgaattgattacctatctgattggtaatcgcagcccaggtacactttccgactggctgcaaaagcagggattagttgagggcattagcgccaactccgatcctatcgtcaacggcaacagcggcgtattagcgatctctgcgtctttaaccgataaaggcctggctaatcgcgatcaggttgtggcggcaatttttagctatctcaatctgttacgtgaaaaaggcattgataaacaatacttcgatgaactggcgaatgtgctggatatcgacttccgttatccgtcgatcacccgtgatatggattacgtcgaatggctggcagataccatgattcgcgttccggttgagcatacgctggatgcagtcaatattgccgatcggtacgatgctaaagcagtaaaagaacgtctggcgatgatgacgccgcagaatgcgcgtatctggtatatcagcccgaaagagccgcacaataaaacggcttattttgtcgatgcgccgtatcaggtcgataaaatcagcgaacaaactttcgctgactggcagcaaaaagctgccaatattgcgctctccttaccggagcttaacccctatattcctgacgatttctcgctgattaagtcagagaagaaatatgaccatccagagctgattgttgatgagtcgaatctgcgcgtggtgtatgcgccaagccgttatttttccagcgaacccaaagctgatgtcagcctgattttgcgtaatccgaaagccatggacagcgcccgcaatcaggtgatgtttgcgctcaatgattatctcgcagggctggcgcttgatcagttaagcaaccaggcgtcggttggtggcataagtttttccaccaacgctaacaacggccttatggttaatgctaatggttacacccagcgtctgccgcagctgttccaggcattgctcgaggggtactttagctataccgctacggaagatcagcttgagcaggcgaagtcctggtataaccagatgatggattccgcagaaaagggtaaagcgtttgagcaggcgattatgcccgcgcagatgctctcgcaagtgccgtacttctcgcgagatgaacggcgtaaaattttgccctccattacgttgaaagaggtgctggcctatcgcgacgccttaaaatcaggggctcgaccagagtttatggttatcggcaacatgaccgaggcccaggcaacaacgctggcacgcgatgtgcaaaaacagttgggcgctgatggttcagagtggtgtcgaaacaaagatgtagtggtcgataaaaaacaatccgtcatctttgaaaaagccggtaacagcaccgactccgcactggcagcggtatttgtaccgactggctacgatgaatacaccagctcagcctatagctctctgttggggcagatcgtacagccgtggttctacaatcagttgcgtaccgaagaacaattgggctatgccgtgtttgcgtttccaatgagcgtggggcgtcagtggggcatgggcttccttttgcaaagcaatgataaacagccttcattcttgtgggagcgttacaaggcgtttttcccaaccgcagaggcaaaattgcgagcgatgaagccagatgagtttgcgcaaatccagcaggcggtaattacccagatgctgcaggcaccgcaaacgctcggcgaagaagcatcgaagttaagtaaagatttcgatcgcggcaatatgcgcttcgattcgcgtgataaaatcgtggcccagataaaactgctgacgccgcaaaaacttgctgatttcttccatcaggcggtggtcgagccgcaaggcatggctatcctgtcgcagatttccggcagccagaacgggaaagccgaatatgtgcatcctgaaggctggaaagtgtgggagaacgtcagcgcgttgcagcaaacaatgcccctgatgagtgaaaagaatgagtgatgtcgccgagacactagatcctttgcgcttgcccttacagggcgagcgcctgattgaagcctctgccggcacaggcaaaacctttacgattgcggcgctctatttgcgcctgttacttggactaggcggttccgccgcctttccccgcccgctgaccgttgaagaactgctggtggtcacctttaccgaggctgccacggcagaattgcgcggtcgtatccgtagcaatatccacgagttgcgcatcgcctgtctgcgtgaaaccaccgacaatccactgtacgaacgcctgctggaagagatcgacgataaagcgcaagccgcgcagtggttgttgttagccgaacggcagatggatgaagcggcagtctttactattcacggtttttgccagcgcatgctcaacctgaatgcctttgaatccggtatgctgtttgagcagcagctgattgaagatgagtctctgctacgctaccaggcctgcgccgatttctggcgtcgccactgctacccgctgccgcgtgaaattgccctggtggtctttgaaacctggaaagggccgcaggcgttgctgcgcgatattaatcgttatctgcaaggcgaagcaccggttatcaaagcaccgccgcccgatgatgaaacgctggcttcccgccacgcgcaaattgtggcgcgtattgatacggtaaaacagcagtggcgcgacgcagtgggtgaactggatgcgctgatcgaatcttctggtattgatcgacgcaagtttaaccgtagcaatcaggctaaatggatcgagaagatcagcgcttgggcagaagaagagaccaacagttatcagttaccggagtcgctggaaaaattctctcagcgtttcttagaagatcgcacgaaagccgggggggaaaccccgcgacatccactgtttgaggcgatcgaacaactgcttgcagaaccattgtcgatccgtgatctggtgataacccgcgcattggctgagatccgcgaaacagtagcgcgtgaaaaacgccgccgtggcgaattgggttttgatgacatgttaagtcggctcgattccgcgctgcgtagcgaaagcggcgaggtgttggcagcggcgatccgtacgcgattcccggtggcaatgattgatgaatttcaggataccgacccccagcagtaccgaatttttcgccgtatctggcaccatcagccggaaaccgcattgttgctgattggcgacccgaaacaggccatatatgcattccggggtgcggatatcttcacttatatgaaggcgcgtagcgaagttcacgcccactacactttagacaccaactggcgttccgcaccaggaatggtgaacagtgtgaacaagcttttcagccagactgatgacgcgttcatgtttcgcgaaataccgtttattccagtgaaatcagccgggaaaaatcaggcgttacgttttgtgtttaaaggtgaaacgcagcctgcgatgaaaatgtggctgatggaaggcgaaagctgcggcgttggcgactatcaaagtaccatggcgcaggtatgtgctgcgcaaatccgcgactggctacaagccggacagcggggcgaagcgttgctgatgaacggcgacgacgcgcgtccggtgcgtgcttcggacatcagtgtgctggtgcgcagccgccaggaggccgcccaggtgcgcgacgccttaacgttgctggaaatcccttccgtttacctttcgaaccgcgacagtgtttttgaaactctggaagcgcaggaaatgctttggttgttgcaggcggtgatgacgcccgaacgtgagaacaccctgcgtagtgcgctggcaacgtcaatgatggggctgaacgcgctggatatcgaaacgctgaacaatgacgaacatgcgtgggatgtggtagtcgaagagttcgatggttatcggcaaatctggcgcaaacgtggcgttatgccgatgctgcgggcgctgatgtcggcgcgtaacattgctgaaaacttgctggcaacggcaggcggtgagcggcgtcttaccgatatcttgcatatcagcgaactgctacaagaagccggaacgcagctggaaagtgaacatgcgctggtacgctggttatcgcaacatatcctcgagccagacagtaatgcctccagccaacaaatgcgtctcgaaagtgataaacatctggtgcagattgtcacgatccacaaatcgaaagggctggaatatccattggtctggctgccgtttatcaccaatttccgcgtccaggatcaggcgttttatcacgatcgccactcgtttgaggcagttttggatcttaacgctgcgccagaaagcgtcgacctcgcggaggtcgaacgtctggcggaagatctgcgtttgctttacgtggcgctgacgcgttcggtttggcattgcagtctcggcgttgcaccgctggtgcgccgtcgtggcgataaaaaaggtgacaccgacgtccaccaaagtgcgctcgggcgtttgctgcaaaaaggggaaccgcaagatgcggcagggcttcgcacctgtattgaagcgttatgcgatgatgatattgcctggcaaacggcacaaactggtgataaccagccctggcaggttaatgatgctttaactgcagaactgaatgcgaggacactacaacgattgcccggcgataactggcgtgtcaccagctactccggcttgcagcagcgtggtcacggtatcgctcaggatctgatgccacggctggatgttgatgccgcaggcgtggtcagcgtcgttgaagaaccgacgttaacaccgcatcagttcccgcgcggtgcgtcaccggggacattcttgcacagtttgtttgaagacctcgattttacccagccggttgacccgaactgggtacaggaaaaactggaactcggcggctttgaatcgcagtgggaaccggtgttgaccgagtggatcacggctgtcctccaggcacctctcaatgaaacgggtgttagcctgagtcagctttccgaccgcgataaacaggtggagatggagttttacctgccgattagcgaaccgctcatcgccagccagcttgatgcactaattcgccagtttgacccgctatccgctggctgcccgccgctggagttcatgcaggtacgcggcatgttaaaaggctttatcgacctggtattccgccacgaagggcgttattacctgctcgactataaatccaactggctgggtgaagacagttcggcttacacccaacaggctatggcagcagcgatgcaggcacaccgctatgatctgcaatatcagctttataccctggcgctgcatcgttatctgcgccatcgcattgctgattacgactatgatcgtcactttggcggcgttatctatctgttcctgcgtggcgttgataaagaacatccgcaacaagggatttacacaacccgacccaacgccgggttgattgccctgatggatgagatgtttgccggtatgaccctggaggaggcgtaatgaaattgcaaaagcaattactggaagctgtggagcacaaacagctacgcccgctggatgtgcaatttgccctgaccgtggcgggagatgaacatcctgccgtcaccctcgcggcggcactgttaagtcatgatgccggagagggacacgtctgtttgccgctttcacgactggaaaataacgaggcgtcgcatccgctgttggcgacctgtgtcagtgaaatcggtgagctacaaaattgggaagaatgcttgctggcttctcaagcggtcagcaggggagatgaacccacgccgatgatcctctgtggcgatcgtctttatttgaatcgcatgtggtgtaacgagcggacggtagcgcgcttcttcaatgaggtgaatcatgccattgaggttgatgaagctctactggcgcaaaccctggacaaactttttccagtaagcgatgaaattaactggcaaaaagttgcagcggcagtggcgctgacgcggcggatctcggtgatttccggcggcccaggcaccggtaaaacgaccaccgtggcgaagttactggcagcgttaattcaaatggccgacggcgaacgctgccgtatccgtctggctgcaccaacgggtaaagctgccgcgcgcttaaccgaatctctcggcaaggctttgcgacagttaccgctgaccgatgaacaaaagaaacgcattccggaagatgccagtactttgcaccgattgctgggtgcgcagccgggtagccagcgtttacgtcatcatgccggtaacccgctgcatcttgatgtgctggtggtagatgaagcgtcaatgatcgatctgcctatgatgtcgagactgatcgacgccttgcccgatcatgcgcgagtgatctttctcggcgatcgtgatcaactggcctcggttgaggctggggctgtgctgggcgatatctgcgcttatgccaatgccggctttaccgccgagcgtgccgggcagctaagccgcctgacgggaactcacgttccggcaggaactggcacagaagcggcatctttgcgcgacagtctctgcctgctgcaaaaaagctatcgtttcggcagtgattctggcattggtcagttagctgcggcgatcaaccgtggtgataaaacggcagtgaaaaccgtttttcagcaggattttactgatatcgaaaaacggcttttacagagcggagaagattatattgcgatgcttgaggaagctcttgcgggttatggacgttatctggatctgctgcaagcgcgtgccgagccggatttaatcattcaggcgttcaatgagtaccaacttttgtgcgccctgcgggaagggccgtttggcgtggctggactgaatgagcgaattgagcagtttatgcaacagaagcgcaaaattcatcgtcatccgcactctcgttggtacgaaggtcgaccggtaatgattgcccgtaatgacagcgcgcttgggttgtttaatggcgatatcggtattgcgctggatcgcgggcaggggacgcgcgtctggtttgcgatgccggacggcaatattaagtctgtgcaaccgagtcgcttgccagagcacgaaactacgtgggcgatgacggtacataaatcgcagggatcggagttcgaccatgcggcgttgattttaccgagccaacgcacgccggtagtaacgcgagagctggtatacaccgcggtgacccgcgcgcgtcgccgtctgtcgctgtatgccgatgagcgtatattaagtgcggcaatcgccactcgtactgagcggcgcagtggtctggcggcgttgtttagttcgcgggaataaacgtaattgccggatgcgacgcacgagtgttacgcatgtcgcatccgacaattttcatcgcttaccctaaatccgccatcaacactttggatttacgctggtagttgtacaactgctttttgctctcgggcagtaaatcaatatccaccggggtaaatccacgttcctggaaccagtgaatactgcgcgtggtcagcacaaacaatttgcttaagccgctctgcttcgcctgagcggtaatgcgttccagcagaacctcgccccgtgatgaactgcggtaatccgggtgaactgccacacaggccatttccccaatcttctcttccgggaacggatagagcgcggcgcaggcaatagtcgtgttatcgcgctgaataatggtgaatttgtcgatttccatctccagctgctcgcgagaacggcgcaccagaataccttgctgctccagcgggcgaatcaactccagaataccgccaatatcgttgattgttgcgcgacgaatctgctcggcgctttccatcacaatctgcgtaccgataccgtcgcgtgagaacaactcttgcaacagcgcgccatcttcctgataactgattaaatgacagcgacgcacgccgctgcggcaggctttcactgcgccacgcaaaaagcgcaccgtaccggagttgtaatcgcctttctcttcctgggcttctacccgcgcttgcgcttcgttagggaaaagttctgagacaatatcaccgtcgtcattagtaacgccctgggaagagcaaaaaccaatcatcttttcagctttcagtttgatggctagttgagtggcaatctcttccgaggtcagattaaagctctcgccagtgactgaaacagcgaccggccccattagcactattgcaccgctgtccagttgacgatggatcgcgtcttcatcaatccgccggatacgcccgctatggcagtaatccacgccgtcatcgacgcccagcggctgggcaataataaaattgccactaacgacgttgatatgcgcgccctgtagcggcgtgttattgagactcatcgacaggcgagcagtaatatccagttgcaatgttcccgcagcctgcttcaccagttccagtgttttggcgtcggtcacacgtatattcttgtgatacagcggttcgtggtgatgcgcagccagatttgcgtcgatctgcggacgtgcgccatagaccaccaccagacggatgccgaggctgtgcaacaacccgatatcattaacgatactggagaaattctcatgctcaatggcttcaccgccgagcatgatgacaaacgtttttccccggtgggtattgatatagggaaccgaatggcggaatccctcgaccaactcggttttacgttcctttaccacggcacacccctttgcattattattcgaaattattgtatttttattctgttttttcgcagggtgcaagtgtaaattttatgcgagagcgacttttttatcagtaatgccgtgaatataaaaagaatgtttaccgtttattagatgacagattatgcgtctttcgctaaagtttccggtcaaattagtcgtttacttgttacacagcttagatttcttttgctcgggagaggcatgtcaggatccaacactgcaatcagccgtcgtcgtttactgcaaggcgcgggcgctatgtggctattgagcgtaagtcaggtcagcctggctgcggttagccaggtcgtggcggtgcgcgtctggcctgcgtccagctacacccgcgtgacggtagaatcaaatcgtcagctgaaatataagcagttcgcgttgagtaacccggaacgcgtggtggtggatatcgaagatgtaaacctgaactcggtactcaaggggatggcggcacaaattcgtgcagacgacccgttcatcaagtcggcgcgcgtcgggcaatttgacccgcagaccgtacggatggtttttgaattaaagcaaaacgtaaaaccgcagctgtttgcccttgcgccggtcgccgggtttaaagagcgtctggtgatggacctctatccggccaatgcacaggatatgcaggacccgctgctggcgctgctggaggattacaacaaaggcgacctcgaaaagcaggtgccgccagcacaaagtggtccacaaccgggtaaagcagggcgcgatcgtcctattgttattatgcttgaccctggccacggcggcgaagactccggtgcggtggggaaatacaaaacgcgcgaaaaagacgtggtattgcaaatagctcgccgtctgcgctctctgatcgagaaagagggcaatatgaaggtgtacatgacgcgcaatgaagacatcttcattccgttgcaagtgcgcgtagcaaaagcccagaaacagcgtgccgacctgtttgtctctatccatgccgacgcctttaccagtcgccagccgagcggttcctcagtgtttgcgctctcaaccaaaggcgcaaccagtactgcggcaaaatatctggcacagacccagaacgcctcggacttgattggtggcgtgagcaaaagcggtgaccgctatgtcgaccacaccatgttcgatatggtgcagtcgctgaccattgccgacagccttaagtttggtaaagcggtgctgaataagctcggtaaaatcaacaagctgcataaaaatcaggttgaacaggccgggtttgccgtgctgaaagcgcctgatattccctccattctggtcgaaacggcgtttatcagtaacgttgaggaagagcgtaaactgaaaacggcgactttccagcaggaagttgcggagtctattcttgcgggaattaaagcgtattttgccgatggggcgacgctggcgagaaggggatgataaaaaggcgctgaatggcgctttttttatgggagagcagaaacaaaaaaacacccgttagggtgttcaataattggttgcgggggccggatttgaaccgacgaccttcgggttatgagcccgacgagctaccaggctgctccaccccgcgtcaccgtattgcttttacttcatcaaatttgattggttgcgggggccggatttgaaccgacgaccttcgggttatgagcccgacgagctaccaggctgctccaccccgcgtcaccgtactgctttacttcatcaaattttaattggttgcgggggccggatttgaaccgacgaccttcgggttatgagcccgacgagctaccaggctgctccaccccgcgtccgtggatgcgcactatactccgctcgcgttttcatgcaaccttttttttaccccgatcacggatttggcatgattttgaacaaaaacaaaccactaaagcctattttttgtgcaaaatttgcgtcagggagaggctgctcatttcattaaacgcggcggtttgttatcttcgttgcgccttattttttaacctgaagaagagaacaatgaaaggacgttgggtaaagtaccttcttatgggcacggttgtggcaatgcttgccgcctgctcttccaaaccaaccgatcgcggacagcaatataaagacgggaaatttacccagcctttctctctggtgaaccagccagatgccgttggcgcgccgattaacgccggtgattttgccgagcaaattaaccatatccgtaattcgtcaccgcgtctgtatggcaaccagagtaatgtttataacgcggtgcaagagtggctgcgcgcaggcggtgatacccgcaatatgcgtcagttcggcattgatgcctggcagatggaaggtgccgacaactatggtaacgtgcagtttacaggctattacacgccggtaattcaggcgcgccatacccgccagggcgagttccagtatccgatttaccgtatgccgccaaaacgtggtcgtctgccatctcgtgcggagatctacgcaggggcgctgagtgataaatatattctcgcttacagcaactccctgatggataacttcattatggatgtgcagggtagcgggtatatcgactttggtgatggcagtccgcttaactttttcagctatgcagggaaaaacggtcatgcctatcgcagcattggtaaggtgctgatcgaccgtggcgaagtgaaaaaagaagatatgtcgatgcaggcgattcgtcattggggcgaaacacacagtgaagccgaggttcgcgagctgctggaacagaacccgtctttcgtcttctttaaaccgcaatcttttgcaccggtgaaaggggcaagtgcggtgccgctggttggccgtgcttctgttgcctccgatcgttcaattattccgccaggtactaccttgctggcagaagtgccgctgctggataataacggcaaatttaacggtcagtacgaattgcgtctgatggtggcgttggatgtcgggggcgcaatcaaaggccaacacttcgatatctatcaagggatcgggccggaagccggacaccgcgcaggttggtacaaccactatggacgtgtctgggtgctgaaaaccgccccgggcgcaggtaacgtctttagcggctgatgtgatattctgtatgccgtttttacggatatgacagggtgaggggtaacctcacatcctgattattgactaagtgcgcgttgttcatgccggatgcggcgtgaacgccttatccggcccacaaatcatgcaaatccaaaatattgcaggagttatgtaggcctgataagcgtagcgcatcaggcatttatgcgtttagggtgagggaaaacctcaccctttttaattctgaggtgctatgtctgtggtaattagtgatgcatggcgtcagcgttttggtggcacagcgcgtctgtatggtgaaaaagcgttgcaactgtttgctgacgcgcatatttgtgtggtcggtatcggtggtgtcggttcctgggcggcggaagcgctggcgcgcacggggattggcgcaatcacgcttatcgatatggatgatgtgtgcgtcaccaataccaatcggcaaattcatgccctgcgcgataacgttgggctggcaaaagcgaaagtcatggcggaacgtattcgccagattaacccggagtgccgtgtaacggtggtggatgatttcgtgacgccggataacgtagcgcagtatatgagtgccggttattcgtacgtgattgatgccattgatagtgtacgacccaaagcggcgctgattgcttattgtcggcgcaataaaatcccgctggtcacgaccggtggcgcgggtgggcagattgacccgacgcagattcaggttaccgatctggcgaaaacgattcaggacccgctggcggcgaagttgcgcgagcgcctgaaaagcgattttggcgtagtgaaaaacagtaaaggtaagctcggcgtggattgcgtgttttctactgaagcgctggtgtacccgcagtcagacggtacggtgtgtgcgatgaaagccacggcagaagggccgaagcggatggattgtgcatctggatttggcgcggcaacgatggtgaccgccacctttgggtttgttgcggtttctcatgcgctgaagaagatgatggcgaaagcggcgcgtcagggttaaacaatcaggtcggatgagacgcgaacgtcttatccgacccggttctgtgcttaaacctgcttcgtcgcagcgataatcgcctcgcttaacgcattcaacccctggctgcgtgaggcgctaagctgcccacgcaatcccagctcatcaaacaatgccagcggcgactgtgcctgcaattcggcggcggttttcccctcaacggcagtcaacagcaccgccagcaggccgcgcactatacgtccttcgctgtcgccaaagaagtgcattttaccgttttcagccacggtatatcccagccagacgcggttttcgcatccggcaatctctttagcctgcgcttttaactcgtctggcaaagccggaagctgtttccccagcatgatcaactggcgatatttatcttcccattgcgacaacggtgcgaaggtattgcgtaacgtttctgcggttacggttgtgccgaacggatgtccggcgaattgcgggtttgtcattaatccaccaataattccagcgcgcggtcaacggcattcaccagcgcatccacatcactctttgtattatatggcgcaaaagaggcgcgcagtgtgccggttacgcctaattctgccagtagcggctgagcgcaatgctgcccggcccgcagggcaataccgtactccgccagcagcgtcaccatatcgctatgatgaacgccagcaaaatcaaaggccagcaggctggaatcctggcagcggaatgaacgaaagccgggacgtttcgccagcgcatcttccgccagcgttgctaagctacggctccagctttcggcctggttgatatcgtaatctgccagccattccagcgccgcgcttaatcctatgacaccagcgacatttggcgttccagcttccagtttccacggcgcagattgagtcgtgaagccgtcaaaactcacttcgtgaatcattttgccgccacccagccagggcgacatcgcttccagcagttctgatttgccatacagcacgccgatacccgtcgggccatacagtttgtgaccagagaaagcatagaaatcgatatctagttgctgaacatctgcggggaaatgcaccgccccctgagcaccatcaaccatcaccaccatcccggctgaatgagcaaaggtaatcgctcgcgccagatccgggcaaccgccagtaacgttcgacatctgacccaacgccagaatccgactacggggagtaatcagttctggcaacaaatcgacatccggcagtcgctgcgcattaagcggcaatttcaccactttggctccagtttgttgggcgaccatcagccaggggacgaggttggcgtggtgttctgccacgctgacaataatctcatcgcccagttgcagacgcggacgcgcatagcattgtgcaaccatgttgatggattcagtggtgccgcgcgtccagacgatagttttatcatccggtgcattcagtaattgcgccactttctctcgtgcagcttcataacgcgcggtcaggcgttgggcttcggcaaactggctgcgatggacgtttccggcgctcaggctgtaaaactgtcgggtggcttcaaccacggcttcaggtttaagcgcggtcgcggcgctgtcgagatagacgcccgcatcctgtagagcgggaaactgggcgcgaaactgcgcgggattaaaaacgttcatggtactcctcggcttgatgcaccgatcgtgacgcaaaattcactttgatacaaggagagtgctaaccatcagaattatctggatatcctggcgaagccgcgtaagtaacatatgctgaatagtgttaggcgttaattttagcctgttaatcaatactattaagatttattaatcgctttaaggagaagatgatgaaaaagactgccgcaattatttctgcctgtatgctgacttttgccctgagcgcctgttccggttcgaactatgtgatgcacaccaatgacggacgtaccatcgtctctgacggcaaaccacagactgataacgataccggtatgatttcgtataaagacgctaatggcaacaaacagcagatcaaccgtactgacgtgaaagagatggtcgaactggatcagtaattcgcgatcgcaaggtaaaaaaaagcaccgcaattaggcggtgctacattaatcactatggacagacagggtaaatgtacaggaagtgaaaaaaggtagctttgctaccatggtctgaatcgcagaccaattgcaaacacaacaacacaacatcacaaccgtaagccaaaagttcaccagaacacgcattccgataaaacttttcgttccggctcaggaagtgccgccactataggtatttgctggtagaagctcaacggacaatttataatggctcagattaaaaaaactaataggttacacagtgtgatctaattgttaaattcatttaacatcaaagtttaaaagccatgtctaaacgattaccaccgctaaatgccttacgagtttttgatgccgcagcacgccatttaagtttcactcgcgcagcagaagagctttttgtgacccaggccgcagtaagtcatcaaatcaagtctcttgaggattttctggggctaaaactgttccgccgccgtaatcgttcactcctgctgaccgaggaaggtcaaagctatttcctcgatatcaaagagatattttcgcaattaaccgaagcgacgcgtaaactccaggcccgtagcgccaagggggcgttgacggtcagtttactccccagtttcgccattcattggttggttccgcgactttccagctttaattcagcttatccgggaattgacgttcgaatccaggcggttgatcgtcaggaagataagctggcggatgatgttgatgtggcgatattttatggtcggggcaactggccggggctacgggtggaaaaactttacgccgaatatttattgccggtgtgttcgccgctactgctgactggcgaaaaacccttgaagaccccggaagatctggctaaacatacgttattacatgatgcttcgcgccgtgactggcagacatatacccgacaattggggttaaatcatatcaacgttcagcaagggccaatttttagccatagcgccatggtgctgcaagcggctattcacgggcagggagtggcgctggcaaataacgtgatggcgcaatctgaaattgaagccggacgtcttgtttgcccgtttaatgatgttctggtcagtaaaaacgctttttatctggtttgtcatgacagccaggcagaactgggtaaaatagccgcctttcgccaatggatcctggcgaaagccgctgctgaacaagaaaaattccgctttcgttatgaacaataatttacgtagggtacgaccatgaccagccgttttatgctgattttcgccgccattagcggcttcatttttgtggctctgggcgcttttggcgcgcatgtgttaagtaaaaccatgggcgccgttgagatgggctggatccagaccggcctcgaataccaggcgtttcatacgctggcgatcttaggtctggcggtggcaatgcagcgtcgcatcagtatctggttttactggagtagcgttttcctcgcgttaggcacggtgttgttcagcggcagcctttattgcctggcgctgtcccatctgcgtttgtgggcgtttgtcactccggttggcggcgtgagcttcctcgcgggctgggcgttaatgttagttggtgctatccgtttaaagcgcaagggcgtaagtcatgaataaggttgtattgctgtgccgtccgggctttgaaaaagagtgcgccgcagaaattaccgataaagccggccagcgggaaattttcggttttgcccgcgtgaaagagaatgcgggttatgtcatttatgaatgttatcaacctgatgatggcgataagttaatccgtgagctgccgttcagttcattaatttttgcccgccagtggtttgtggtgggggaactcctgcagcatttgccgccagaagatcgtattacccccattgtcggcatgttacagggcgtagtagagaagggcggtgaactgcgtgttgaagttgccgataccaacgaaagcaaagagttactgaaattctgccgtaaatttactgttccgctacgcgctgccttgcgcgatgccggggtgctggcgaactatgaaacgccgaagcgtccggttgtgcatgtattctttattgcaccaggctgctgctataccggttactcatacagcaacaataattcgccgttctatatgggcattccgcgcctgaaatttccggcagatgcgccgagtcgttccacgctcaaactggaagaggcatttcatgtgtttattcctgcggatgagtgggatgaacgcctggcgaacgggatgtgggcggtggatttaggcgcttgccctggcggctggacctaccaactggtgaagcgcaacatgtgggtttattccgtcgacaacggcccgatggcgcaaagtctgatggataccggacaggtgacgtggctgcgggaagacggtttcaaattccgtccgacgcgcagcaatatctcctggatggtatgcgatatggttgaaaaaccggcgaaagttgcggcattgatggcgcagtggctggttaatggctggtgccgtgaaaccattttcaacctcaaactgccgatgaaaaaacgctacgaagaagtgtcacacaatctggcgtatattcaggcacagcttgatgaacatggcataaatgctcagattcaggcgcggcagttgtatcacgatcgcgaagaagtgacggtgcacgtccgccgcatctgggctgcggtgggtggtcgtcgcgacgagcgataacaggcaaggccggggcgtcgtcttcggcctgctaccctttccgtcaggctgttaccaaagaagttgcaacctggcgctcatcagaaataatgtgcgttacctcatccagatgcccgatgcgggcttcccctgaacgattaaatttacttttatcaatcaataacaacgattgcgcggcacgttttaatagcatcgatttgtaatcagcgttgatggcattggagtcccacagtgcgccgctgctatcgatcccttcacaagaaaaaataaacagatcgatttccagcgatttaagttgggaaatcagcgagggattgacgtaacagccatatttgcgctcaagtgtgccgccggaactgatcagttgaatgcgttcgcgtttaccgagttcatggcaaatcggatggctattggtgaagacctgaatgttgatgtcaggcaactggcgtgccagataccagcaagttgaactggcgtctaaggctatcaccatcccttcttcaatccacgcgagcgcctcgcgcgcgatatctgctttatgcgcataatggcttttcagccggatgtgaaagggatcgccactgtcttgattttgacggtggatatatttagcgcgtccatgattgcgcagaattttaccctgcgtctgtaattcattgagatcgcgacgaatggtttctttactgacctttagctgttcagagagagcttccgtggtcaggctggtatggttcagcagcaggtcgactatcgcttgctggcgtgccgctttcatatttttcaccccatcattcgataaccgcccgcgtcatgcgggcgtaccggtatgagattacggtgttacccctttttttaaaagaatattcccgtacttcgctcgttcgcctgtgataacgatcgcaaaggctttttgcgcccgttcataaaacgcaaaacgattgatgcggatgatgtcaggacacggggcttgtagtgaaagcgcattacggtaacgtcgttctacttcaggatcgagagtgtcaccttctaccgccgccatcatcaccagcggcggtgcataactgtccagttcaaataacgggataatcgcctggagcaagtcgctcaccaacaggccatcagcgcggatcacctgcggtcccatcgaatgggcgggaaagtgagcatcggaaaaaataatttcatctccatgtcccatctctgccagcactttcaatagttcgggagaaattaacggcgaaattgttttcagcatttcacacttcctctataaattcaggttcagtttgcgggtagaaataacggtactgataatgaatctgtgcgcgggcttcttccgggctgttaaattcccctacgccataccaaccgaacagcgcagctcctgcgacggtcgtttcggcgtcgtcgagaacttttaccggaatatcaagcatattggctttaatctgattccacaatgtgttgcgacttcctccaccgactaacaataattcagaggccttaaagtgcccgattttttccagcaactgtagattgcgctgtaattgcgcagttaacccttccagcgccgcgcgatagaaatgcccccgcgtggtattaagcgtcactccttgccagcnnnnnnnnnngttctgacacgacaataaatcacactgcatttttacgccatccgcgccaggcgcgatcagacgagcttcttcaatcaacatttgccagggtgtttcagccgtccagaacagttttctcacccattccagcacgccggatgccagccattgcatacctgggttatacaaccctgcctggctatccagttcgcaggtggaaccggcgtactgacttaacagcgaagtatcaacctgggcgctacggaccattaaaatttcccatgtaccggaagagagcacgggttcattttggtcggcaccagcgccaaaaagggcgaactgggtatcgtgacctgcggaaatcaccggtatgccaacgggtaagccgagcattgctgcggcgctgttctgtagcgtaccaatctgttcacccgcttccaccagacgagggaagagtcggcgtggaataccggtggcttgtaaaatttgcggactgaaatcgcgttgctggatatccagcatctggctggttccggccatcgtgatatcagtagtgaattcgccggttaaacggtggttaatcagcgacgaaataaagagccaggcgtgcgcgcgttccagcagttgtggatgattttctttcaaccacaccaacttatataacgtattgaaactaaaggctccgacgccagaaatagcctgcaaccgctgtgcggagatcaactgttcaatattgtccataaccgctgctgttcgcggacatttccagctaatgatcggatagagcagattgccttgcttatctaccagagcgccatccacaccaaaggtggtgacggcgataccgcggatgtggcattcagtcagttcactattgatttgccgacagcaatcagcaaagcgttgcaaaatggcgtctaaagaccactggtgccaggtgttgttttccatcgcgatatcgctggcattaggcgttgaggcgcgggcaacaatttttccctgccgattaaccgcgatggccctgacattggtcgcgccacagtcgagtaccaggataacttcttgtttcataatcgctcctgcaatatagccggataacattgcttatccggctaaccactcttgcttgttcaggcccggtagccggagcgaccgggcatcacatcagggagtaatgtattaacgcttgtacaacgggccgtagttctggcaagcgcggtaatcctgaccttcaatatccatgccgtgcgcggcccaggcagaaggacgatatactttggtctcttcaacgttgtgcatacataccgggatacgcagcatggaggcgagagtgataaagtctgcgccaacgtggccgatggtcagaaccccgtggttagcgccccagttcgccattaccgaatacacatccgtaaacggccctttaccggtgaggcgcggtgcaaaccaggtggttggccaggttgagttggtgcgtttgttgaggatgtcatgcacatccttcggcaattccacgctccagccttccgcgatttgcagtaccggtcccaggcctttgatgatgttgacacgggtcatggtgaacgggacgccgccttcggtaaggaagcgggaagagtaaccgccgccacggaagtattcgtggatcgccgggcaccattcggtagcggcgaggcaagcgtcagcctctttctgagagatttcccagtgtggcttcatcgtcgggttaccttcgctgtcgcgttgtttacaggaaccgtccagcgcagcagaaccggagttgatcaaatggatgatgccgtgttcttccagtccatcgagtttatgccccgttacacgctcaattgcttctggtgaccagtaggtacgcacatcggcaaatacctgagcggtgccggtgagctggtgacccattagcattgccacgccgttaagactgtcgttttcggtcgccacgacaaagggttcgcgcacgccattccagtcaaatgaactgttaaggatcgcttcggcggtgtcaccattgggatattgatcggtccagtgacgttgcccctggaagcccgcagcgatggcgttgtagccaagtgattcttccacgcgaccaatatcggccagtttgctgttgccttgcatcatgtcgcggatacacatcgccatcagtaaactttcgcgcagaactgcgcggctttgctcggcattgcgttgatactgtttgttattttcatcttcgccatagcggaagtttttatcagcccaggccagtgccatttccagttcggcttcgtcgtaaatcttctgatcgatacggcgacgcagttcggtcatatccaccgcctggactttcattcccagccaggattcaaagaagttgtgatcaacaatggaaccggcgatacccatcgaaacgccgcccagcgacagatagcttttacctttcatgctggcgacggccaaaccggcgcgggcaaagcgcagcagtttttcttcaacatcggcaggaatcgatgtgtcatcggcatcctgaacgtcatgaccgtaaatggagaatgccgggatgcctttctggctgtgagctgccagagccgctgccaggtaaacagcgccgggacgttcagtgccgttaaagccccaaatggctttcgggcgggttggatccatgtcgatggtttcactgccatagcaccagcaaggcgttaccgtaatggtgaggcctacattctgactgctgaatttttcttcgcaagcagcggcttcagccatacccgcgatacaggtatcggaaatgacacactcgacggcagctccgcaggcatggcgcagtttctcggtcagcagtgcggccgtagctttcgccatattcattgtttgttcttcaagcgactcacgaacacccatgcgacgaccgtcaataaccgggcggataccaattttcggtaagctgatttttttcattacagattcctcactttattcggaaaatatgttcagttagttgccgtttgagaacggaaacgggcaaagataaagatgaccgcgaagcagagtgcggggatcagttcagcagtggggatgttgcccgccgcgtcactgacaaaacccatgaccggagtgacaataccgccgccaatgatggtcataacgatgaaggacgaaccgtatttggtgtcctggccgagattcttaatgcccagcgagaagattgttgggtactgaatcgacataaaggcgctgcataaagtcagggctattaagcccacatgaccgccagcgaaggctgagatcaggcacagtgccatagcgattaatgcgtaggcggccaggactttgtgtggtgcgaagcgactgatgagccaggtaccggtgaaacgaccaataaagaagcacaccatggttccggttaaatagttagcggcaaagccggcagtcatacctggaatttcttctacagcgtagcgaatcaaatagctccagcaggccgtttgtgcgccgacatagcagaattgcgctaataccgcccagcgccagtgacgaatacgcgccagacgagaaagcgatgcggagaacgatccttgtttggcgtcactgtgattatcactctgcaatgccgggaatttcgtcagcatgatcagcagggcgaccagtaacacgatagccacgatgatcatataaggtgtctgtaccgataataccaggctgtgtttatacgcactcaattgctctggagacattttatcgagaacgtcttgcgattgatgtggcacgttagacaaaataagactttgcccaaagacaaccgcgataattgcgccaaacgagttaaatgtttgcgcaagatttaagcggaagtgaccactgctttctggccctaataccgtaacaaaagggtttgcggcagtttccagacaacctaatccggctgcaataataaataggccaactaaaaataaggtgtagttcattatttctgcagcgggccagaataatgcagcgcccaaggcatataaaaataatccggtaataatccctgctttataactgagttttttcatcaatatcccagcagggattgggataatgaaataaccaaagtaaaaggccgattggatcaggccagcctggaaatttgtcagcgtaaaagcctgctggaattgaggtaataaaatgtcgttaaggttattggctaccgcccaaagaaaaaacagtgagcacagcagcgcgaatggaataatgtaacttctgctttgccctgcatctttatctaccgcacggtaactctgcgtttgtattgatgtgtttcccatagcatcctcttaggttcagaagcttaagcacgtaatcggttatgttttcaaaagtgcaaaaccagcgagttcgggcttcatatcagtgaatatttgcctgtctgaaatgaactcatggattcattttcaaataaaaaacgctctgtaatatgacggcggtcacacttattagctggaaggtgactttatgtgactaccatcactttaataatcgaaatttcatgcccgtttcagaaaataaatcataaaaaacacaaaccagatgaccgtattaattgtttatgccgaaaacgggcattcctggcttgggtgaatagaaaaatgaccgttttgataaatatttttaagagcggtcatttttaatggggttataaaaagagaacttgcagttatttactgtgattagttgaaccaggtcacaaaatataagcttgtgaatttctttcttgttaatcaggaagaagatggtgggtaattaaacggctaattcaatagtgtgaaaggaacaacattattgccctgttttgaatcagagagaggtagctaatggaacgaaataaacttgctcgtcagattattgacacttgcctggaaatgacccgcctgggactgaaccaggggacagcggggaacgtcagtgtacgttatcaggatgggatgctgattacgcctacaggcattccatatgaaaaactgacggagtcgcatattgtctttattgatggcaacggtaaacatgaggaaggaaagctcccctcaagcgaatggcgtttccatatggcggcctatcaaagcagaccggatgccaacgcggttgttcacaatcatgccgttcattgcacagcagtttccattcttaaccgaccgatccccgctattcactacatgattgcggcggcaggtggtaattctattccttgcgcgccttatgcgacctttggaacacgcgaactttctgaacatgttgcgctggctctcaaaaatcgtaaggcaactttgttacaacatcatgggcttatcgcttgtgaggtgaatctggaaaaagcgttatggctggcgcatgaagttgaagtgctggcgcaactttacctgacgaccctggcgattacggacccggtgccagtgctgagcgatgaagagattgccgtagtgctggagaaattcaaaacctatgggttacgaattgaagagtaatttcgtaaagcaacaaggagaaggatgatggctaacagaatgattctgaacgaaacggcatggtttggtcggggtgctgttggggctttaaccgatgaggtgaaacgccgtggttatcagaaggcgctgatcgtcaccgataaaacgctggtgcaatgcggcgtggtggcgaaagtgaccgataagatggatgctgcagggctggcatgggcgatttacgacggcgtagtgcccaacccaacaattactgtcgtcaaagaagggctcggtgtattccagaatagcggcgcggattacctgatcgctattggtggtggttctccacaggatacttgtaaagcgattggcattatcagcaacaacccggagtttgccgatgtgcgtagcctggaaggactttccccgaccaataaacctagtgtaccgattctggcaatccccaccacagcaggcactgcggcagaagtgaccattaactacgtgatcactgacgaagaaaaacggcgcaagtttgtttgcgttgatccgcatgatatcccgcaggtggcgtttattgacgctgacatgatggatggtatgcctccagcgctgaaagctgcgacgggtgtcgatgcgctcactcatgctattgaggggtatattacccgtggcgcgtgggcgctaaccgatgcactgcacattaaagcgattgaaatcattgctggggcgctgcgaggatcggttgctggtgataaggatgccggagaagaaatggcgctcgggcagtatgttgcgggtatgggcttctcgaatgttgggttagggttggtgcatggtatggcgcatccactgggcgcgttttacaacactccacacggtgttgcgaacgccatcctgttaccgcatgtcatgcgctataacgctgactttaccggtgagaagtaccgcgatatcgcgcgcgttatgggcgtgaaagtggaaggtatgagcctggaagaggcgcgtaatgccgctgttgaagcggtgtttgctctcaaccgtgatgtcggtattccgccacatttgcgtgatgttggtgtacgcaaggaagacattccggcactggcgcaggcggcactggatgatgtttgtaccggtggcaacccgcgtgaagcaacgcttgaggatattgtagagctttaccataccgcctggtaaatgcgctgatgtgataatgccggatacgacgtttgcggcgtatccggctcgccgttaccgtaccaaccgcaattgctgtaaattgccgtcgatatgcaaatcggtttgtaagcgggcaatatcgcggcacagaaacgccatctctttatgggtttctaattttttgcgccacttttcggcaaccgcatccagattctcatatattccttccagactctgaaactcgaccagcagctgcgtggcgctttttggtccgattcccacaacacccggtacctttgaactgctgatccccgcaagtccccagtaatcgggcaactgctgcggttgaacgccaaattctttatcgataaatggcgcatccagccaacgtttctggaagtaatcacgaatacgtaatgtcggtgaaagtaactgacagtagcctttatctgtcgaaacaatcgttgcctgatgcccggcctgtgtcactttgaccgccagcgtggcggctaagtcatcggcttcgttgccgctggttgaccagcacgggacgccgcgttgctcaaaggcggcgcgtaatgcaggcatctcgtcgtgcaactcttccggcattggcggtcgacccgctttgtaatctggtaaacgctgatgacgccagccgctactgcggttttcatcatcaaaaacggcgaccgcgtgggttggctggctgtgcataatgagctgatcgagcgcatgctggcaggtttcgacacagggcgatccctgaacggcatgaatgcgacgaataagattcagtgcatcgacaataagcaaatgaacagccacgataacccccttaaagatcaggcgataagggtaacattcgatgccggaacaggctacggctggatgagaaatcgggaagaggcctcgcaaaacgaggcctctggagagcgattaatcgcaggcaacgatcttcattgccaggccgccgcgagaggtttcgcggtacttggcgttcatatctttacctgtttcgtacatggtttcgataactttatcgaggcagacgcgcggctcgctggtacggcgtagcgccatacgtgcggcgttcaccgcttttactgccgcaatggcgttacgctcgatgcatggcacctggacctgtccggcgaccgggtcacacgtcagaccgaggttgtgctccatggcgatttccgccgcgatgcacacctgcgccgggcttgcacctaacagttctgccagaccagccgccgccattgagcacgccacaccaacttcaccctggcagccgacttcagcaccagaaattgacgcgttcatcttataaagagaaccaatggcactggctaccagcaggtaacgagccagtgagttagcgttcacttcgcggataaacttatcgtagtacgccagcacagccgggataatcccgcacgcaccgttagtcggcgcagtcaccacgcgaccgccagcggcgttctcttcgttcactgccagtgcaaacatgttgatccagtcaacaaccgccatcgggtcagtggtggttttatcctggctgaccagcatccggcgtagtgccgcagcacggcgtggtacgcgcagtttgccaggcaacacgccttcggtagaaataccgcgctcaataccgccgcgcatgacttcccagacgttcgccaggtgctgttccagctcttctttgctgtgcagcgccagctcgtttttcatcatcaggccagagagtgacagcccggtttcctgacaatgtttttgcagatcggctgctgaactgtacggataaggaacttcaaccggtgcgctatcctgctggccaaaatgttcttcatcaacgataaagccaccgccgatagagtagtaagtctggctgtaaatgactttatcgcccgccagtgcggtaatgcgcataccgttttcatgcagagaaaggttgtcggcatggaagttcatgcactgatcaaccgggaactccacttcatgctgaccgtttgccagcatcaggcgaccatgagtattcacatcctgaataaaaccggggatggaatcgatatccacggtatccggcaggttacccgccaggcccataataatggcgatatcagtgtggtggcctttaccggtcagagagagcgagccgtacacgtcaaccaccacgcgggtcacgtctttaagcaggttacgggcaatcagatcgtcggtaaattgtttacccgctttcattggtccaacggtatgagaactggaagggccaatgccgattttgaaaatatcgaatacgctaatcataggaaatacatcgcgttaaaacggaggaagcgccgcccgaaagcggcgcgaaaggacttagctgaacagagagtagaagattgcggagattgcaatcaggcccatcacgacaacgaatacgttgctgatgtgaccgctgtacttacgcattgccggtactttctgaattgcgtacatcggcatcaggaacaggatcatcgcgatgattgggccgcccagggtttcaatcatacccaggatgctcgggttcagggtggcaacaatccaggtcgttaccagcatgaacagcgcagtgatacggttcagcttgttgatttcgatagacttacctttaccacgcagagatttaatcaccataccgttgaagccttcacgtgcgcccaggtagtggccgaggaaggatttggtgatagcgataatcgcgataatcggagccatccacgcgataaccggtgcgttaaagtggttagccaggtaagacagaatcgagatgttctgctctttagccgcagccaggtctgccggagtcaggctcagtacgcagctgaagacgaagaacattacggtcagcaccatcatgatgtgtgcgaatgccaggatcttcgagcatttctgttctgccatatcgccgtactcttcacgcttcgcaacggcgaaagaagagatgatcggagagtggttgaacgagaacaccattaccggaattgccagccacagggtcatccacagaccgtttccggttgcagatgcagtgtccagagacagcgtttccagtgctgcgccgttccactgcgggatgaggtacagagccagcagcatcagtacgccaacaaacgggaataccagaatactcatcgctttaacgatcatctgctcaccgaagcgaacgatggtcatcatacccacgatcaggatcagcgacagaatcgcacgcggcggtggcgtcatacccagctggtgagacatgaagctttcaacggtattggtgattgccacgctataaaccagcaggatcgggtagatagcgaagaagtagagcagggtaatcagtttacctgcgccaataccaaagtgttcttctacaacctcggtgatgtcttcgcccgggtttttaccagacagtacgaagcgagtcaggccgcggtgagcaaaaaacgtcatcgggaacgcaaggatagccatgatgatcagcgggatcataccgccaacaccggcgttgattggcaggaacagcacgcccgcgccgattgccgtgccgtaaaggcccagcatccacatggtgtctgtcttgcgccaggcactacgagagtctttcgacgcaatcgtgctggtttgagtcgtttccatctatttctcctggaggaatgcaaataattcagcttttagccagttcagcccgggaaggtgcctgaccgtaaaaatgaaatctgtctatcggcgatggcttaatcatttaccgccgtaataatttgagggcggaaagatacacacaagttatgtatctatcagtgatcttgatcccaaatacaataatctacttggaagatagattatcccaacgctttactctgtaaatcaaaagtaaaagagaatttaagggcaatatttgcccattaaacgacatctgacttcttccggggcgcgcaatatatgtaggttgaactgaaaaaatcaatacttttagttaatcatggcgataatttctttttcatagcgataaaatacggtttatgaaaataaggaaacgtttgcgttgcaatataaattgtatgacatattaactgtgatgatatttgtcgcgtgagggtggtaagaaacattcatataacaaatgaaatgagttgatgagtaagtgaccaaaaacgagaaaacccggcaacaaacgtcaccgggggaggggagattacgtgcagatttcgtagcaagggatgtaggctgagcctggcaacttcatacgatgctgggcaacaaaaccctgtagcaggtcgtccatacgacgcataatctctttatcgccgttgattttgtaaggaccaaactcttcaatggcgcgaataccgacttcttttacgttacccgccacaataccggagaacgcacggcgcaggtcggcagccagcacttcaacaggttgatccgggtaaagcttcagattagccatattctcgtgagacggctcaaacggcatttgcaaatctggtgcaatgcgcattgaccagttaaagctgtaagcgtcaccagtgtcgcggcgattttctttcaccagcggcatcgattttttcatctgacgagcgacttcagcggcgtcatcaatgatgatgcggtaatggcggcgcgcgttttcacccagcgtatgtacgacaaactcgtccagtacgcggaagtagtcggcgctctctttcgggccggtgaggatcaatggtaaaacctgatctttgttggccgggttcattaaaattcccagcaaatacagcaactcttctgccgtacccacaccgccagggaagataatgataccgtgagcgatacggacaaacgcttccagacgtttttcgatatctggcatgatgatcaattcgttgaccagcgggttaggcggttcagcggcgataatcgacggctctgtcataccaataaaacgactgtctttgtaacgctgctgcgcgtgtccgaccgcagcacctttcatcggcgcttccatcgctcccggaccacagccggtgcagatattcagctcacgcaggcccagctggtttccgacgcgacgggcatacaaatactcgttttcgttaattgagtgaccgccccagcagaccaccatatttggcgcttcacccacatgcagcgcgcgagcgttacgcaagatggaaaagaccaggttagtgatgtggacggagttgtcgagattcaggttgggaaaacgaacggtattatggatttgcccgtaaacgaagagaatgtctcgcagaaccgcgaacaagttggcctgcaaagcgcgaataattcgcccatcgacaaaagcctcttccgggggattaatcagttccagctttacgccgcgttcacggcgcaggacgttaatatcgaaattttcaaaacgagacagcaattctttgctgttatcggtcaaactaccggagttcagtacggcaagtgaacagttgcgaaacagttgatagaggtcgctgctggcggtgcgtttaagcatatccacttccagctgcgacaacatatccatggagccaagcgggctaatatgtgtaatcaagaaaaactccttatgggacgaatatcgtcattccctttgattacaatagccctgcctgatgacctttcacaaccttctgcgtgaatccagcacgcaaaattgagaaaaaatttattgccgaaccagtcttgtggtcgatgggacaaaatcgctattactgcgccacgggttaatgtccagaccgccacgacgggtataacgtgcgtaaacgcttaatttctctggctggcagaagcgtaacaggtcattaaagatgcgttccacgcactgttcgtggaactcgttgtgatgacggaatgagaccaggtaacgcagcagtttttctctgtcaatttggcgtccacgatactgaatttggatcgaaccccaatctggttgatgggtgatcaggcagtttgatttcagcaggtggctgacaagcgtctcttccactactttttcaccgctggtggcattctccagatagtcagtagtgaattcatagttatcgatagtgatatcctggtcatcaatgcaggtgccattgaaatgacctatcggctggccttccagttcatcaagacgatataacgccacgctaaccttaccctgggcgcaagtgcttaagtcgcgctccagcgtctggcgcacctcatcccagttattaaaacgcgtctggttaaaactgttgagatagagcttaaaactcttcgactcaatcagatttacgctggtgtaatcaagttcaacatgaccgacagcgacctgcggcaaacctttcgcattcagccaggaaagttcatacagcgtccagatatccgtaccgtgaaaaggcaggttatccgctttcagacccagcgggtcgcgattcaggctgcgtggaacgccttgcagtaggctggcgtcataggtatcccggtaatcggttgattttccaagagtcaggcccgcaagtgcctgatggtttgcataagaagacatgtttcaccgtcataaaccagataaactaaacgacaagtgtatctggtttaagtgaagagagaaattagtggacgatttgaccgcacaagccctgaaagattttactgcacgctactgcgatgcgtggcatgaagagcataaaagctggccgttaagtgaggaactgtacggtgttccttcaccgtgcattatttcaactaccgaagatgccgtatactggcaaccccagccgtttaccggggaacaaaatgtaaacgcggttgaacgcgcttttgatattgtgatacaacccacaattcataccttttatacgactcagtttgccggggatatgcacgcgcagtttggcgatatcaaactgacattgctgcaaacctggagtgaagacgacttccgtcgggtgcaggaaaatctgattggtcatctggtgactcagaaaaggctaaaactgccgcccacgctatttatcgcgacgctggaagaagagttagaggtcatctcggtgtgtaatctctccggtgaagtgtgcaaagagacgctgggaacacgtaaacggacgcatttagcctcaaatcttgcggaattccttaatcaacttaagcctcttctgtaatccaaataccccatctggttgtgagagatctcttacagactctgtaggagatcgccaggaaataagcgaatacttaaaaagataagaatcgttattttcatttaaaatcaaaatgttgattgttaattcttaacttttatatgaaattttccttaaggcattgtctgtaagcgccttgtaagacttcgcgaaaaagacgattctatcttcgtcgacagggagtcagacaacgaagcgaacatcaggatgatgacacttctgcaggacacaccaggatggtgtttcagggaaaggcttctggatgaagcgaagaggatgacgcaggacgcgttaaaggacacctccaggatggagaatgagaaccggtcaggatgattcggtgggtcaggaaggccagggacacttcaggatgaagtatcacatcggggtggtgtgagcaggaagcaatagttcaggatgaacgattggccgcaaggccagaggaaaagttgtcaaggatgagcagggagcaacaaaagtagctggaatgctgcgaaacgaaccgggagcgctgtgaatacagtgctccctttttttattcctgctatccttcgcggcagtttttcttattgaggttgctttatgaccactcatgaccgcgttcgtctccagttgcaggcgcttgaagcgttactgcgtgaacatcagcactggcgaaacgatgaaccccagccgcatcaatttaatagtacccaaccgttctttatggacaccatggaaccactggagtggttgcagtgggtgctgatcccgcgaatgcacgatttgttagataacaaacagccgttaccgggcgcttttgccgttgcaccctattatgaaatggcgctggcgacggaccatccgcaacgcgcgcttattctggctgagctggaaaaactggatgctctttttgcggatgatgcgagctaatgctggaaatactctatcaggatgaatggctggttgcggtaaataaaccctccggctggctggttcaccgcagctggctggatcgcgacgagaaagtagtggtcatgcaaaccgtgcgtgatcagattggccagcacgtttttaccgctcatcgtctggaccgacccacttctggtgtgttgttgatgggattatccagcgaggccggacggctgctggcacaacagtttgaacagcaccaaatccagaaacgttaccatgcgattgtgcgcggctggttgatggaagaagcagttctggattatccactggtggaagaactggacaaaatcgctgataaatttgcccgcgaagataaaggctcgcagccagcagtgacgcattatcgcggtctggcgaccgtagaaatgccggtagcgaccggacgttacccgaccacgcgctacggcctggtggaactggagccgaaaaccggacgcaaacatcagcttcgccgacatcttgcccatttgcgtcatccgattattggcgatagcaaacatggcgatttacgccagaatcgcagcggtgctgagcattttggcctccagcggttaatgctacatgccagtcagttgtcattgacgcatccttttactggcgagccgctgactattcacgcgggcctggacgacacctggatgcaggcgttatcacaatttggctggcgcggtctgcttcctgaaaatgaaagggttgagttcagtgcgccatcgggtcaggatggagagataagttcctaatccagggagaaaacggtatggcggaaattggtatttttgtcggcaccatgtacggaaattcgctgttagtggcggaagaagcagaagcaattctgaccgcacagggccacaaagcaacggtatttgaagatcctgaattaagcgactggctgccttatcaggataagtatgttctggtggttacgtccacgaccgggcagggcgaccttcctgatagcattgtgccgctctttcagggaatcaaagatagtctgggcttccagccgaatctgcgttatggcgtgattgcgctcggcgacagcagttatgtaaatttctgcaatggcggcaaacagttcgatgccttgttgcaggaacagagcgctcagcgggttggcgaaatactgttgattgacgccagtgagaacccggaaccggaaacggaatcaaatccgtgggtcgaacagtggggcacgctgttgtcctgatatgttcagcgagcggtaaatgtcgttttagcggtgctgaatcgaatcttttcaggcaaatgccagtaaaaactgcttcatagcgcggatttttactggcgtttgcctggagtcaagcgatccatttcatactcttctttatttcttcgttttaacccttcctttctcgttcttgttttcatttccgtgaagtggattccaccgtccagggctaatgccaaaatcgggcctcattgaacgcattaatgttgtgttgttgcacggtgagccgctatggcgcgctttttatactgctattgccagatataaacacgcgccgtattcggcgaacgacctataaaaacggcaaaaaacaccctacgtcacctctgatttcctggctatgtcgcagtccagagtgagcgtggctaacgcgaattttcaggagtgcaacaatgagttctttaagtcaggctgcgagcagtgtggaaaaacgcacgaatgctcgttactggatagtggtgatgttgtttatcgtcacatccttcaactacggcgaccgcgctacgctttctattgccggttcggaaatggccaaagatatcggccttgatcccgtgggaatgggctatgtgttctctgccttctcatgggcttatgttatcgggcagatccctggtggctggttgctggaccgttttggttcaaaacgcgtctacttctggtcgatctttatctggtcgatgtttaccttgctgcaaggcttcgtcgatatctttagtggattcggcattatcgttgccctgtttactctgcgcttcctggtcgggcttgctgaagcgccatctttccccggcaacagtcgcattgttgcggcctggtttccggcgcaggaaaggggaacggcggtgtcgatttttaactccgctcaatacttcgcaacggtgatcttcgcgccgattatgggctggctgacgcatgaagtgggctggtcacacgtcttcttctttatgggcggtctggggattgtcatcagctttatctggttgaaagtcatccacgagccaaatcaacatccgggggtaaatcagaaagagctggagtatatcgccgcgggtggcgcgctgatcaatatggatcagcaaaacactaaagttaaagtgccgttcagcgtgaagtgggggcagatcaaacagctgctcgggtcacggatgatgatcggcgtttatatcggtcagtactgtatcaacgccctgacttacttctttattacctggttcccggtttatctggtgcaggcacgcgggatgtcgattctgaaagcgggctttgtggcttccgttccggcggtttgcggttttatcggcggtgtgctgggtgggattatttccgactggctgatgcgccgcacgggatcgctgaacattgcgcgtaaaacaccgatcgtaatgggcatgttgctgtcgatggtgatggtgttctgcaactacgtcaacgttgagtggatgatcatcggctttatggcgctggccttcttcggtaagggcatcggggcgctgggttgggcagtaatggcagataccgcgccaaaagagatcagcggtctttccggtggcctgttcaacatgttcggtaacatttctggcatcgtcacgccaatcgcaattggttatatcgttggcacgactggctcctttaatggggcgctgatttatgttggtgttcatgccttaatcgcggtactgagctacctggtgctggtgggcgatatcaagcgtatcgagctgaaacctgtcgcggggcaataagatgacgacacaatccagtcctgttattactgatatgaaagtcattccggtcgccgggcacgatagcatgttgcttaatattggtggggcacataacgcatatttcacccgcaatattgtggtactcaccgataacgccgggcataccggcattggtgaagcgccgggcggagaggtgatttatcaaacactggtcgatgctattccgatggttctgggccaggaagttgcgcgcctgaataa

SEQ ID NO: 178 - DNA, 47870 bp, Escherichia coli
  source 1..47870: mol_type = genomic DNA
caataaaacagcatgtcattcatatttttttagcatattgtgcaattattttgaggaagtgtagaaattttgtactcaaaatttgtaagtaaaataaaaaagccggggcgacccggcaaaaacaaaaatcactgcatattattcgctgacaaaccagtcatcggcgctttcccacgtttcctggagaatttcgctaatgcgctgtttatcttcttttgttgcgccaataaccgataaattattcgctgcggcataacgtaccgatacgtggccttcattatcaggaaacgcatactgaatacggcgggaaagttcgccagccagggcgtcaatagccccagctggcaatggagaagttttcgctatggtgacttcaattcgcataatagccccctgttgaatatactggttatttatacaggtaaaataacctaatgacaacaggaagctacaatttttattgtttaacggaccagcgtaccgtttccccggcgaggaatggcaccagggtgtcatcagtcagtgcgatgctttcagcaacctgttgctcttcacgtaccagttcgatgaatgtgtcgttgaccggcaagccatagaactgcgggccgtttacagaacagaatgcttcaaagtgctgcagagcattcatctcttcaaagacggtagcgtaactgcccagcgcggttggggcgttgaagcagcccgcgcagccgcaactgctctctttgcgatgacgtgcatgtggcgcagaatccgtaccgaggaatactcgattaaaaccgctggcgaccagttcacgcaatgcctgttggtgaatattgcgtttgaggatgggtaaacaatacaggtgcggacgcacgccaccaaccagcatatggttgcggttaaacatcagatgctgcggagtgatggtggcagccagccgttcatttccgtcacggacatagtcggcagcatctttggtggtgatgtgctcaaaaacgactttcagcgcagtcaggcgctggcgcagaggttccatcacgctttctataaagcgcgcttcacgatcaaaaatgtcgatatctgcatgtgtcacttcaccatgcaccagtagcggcataccgattttttccatgcgctcaagtaccggcatgattgcgtcaattgacgtcacgccgtggctggagttagtggttgcgtttgccggataaagttttgcagcggtgaacacgccttcgttaaatccgcgctccagctcattaggatccagcgaatctgttaaataacaggtcatcaatggggtgaaattgtgcccggcaggtacggcatcaagaatacgttggcgatacgccacggcagcctcaactgtggtcacgggcggagccagattgggcattacgatagcccgtccataaatttcgctggtatacggcacgacagtttttaacatgtcgccatcgcggaggtgaaggtgccagtcgtctgggcggcggatctttaatacctgggatggtgcagtcattaatctctatgctccggctgaagggatgtttttgccggacacaaaggataagcggaaacgttttcctttgcacgaaaaataaagggcgcgaatgcgccctcgtcattaatccgtaaacggaatgacaatttcgcctggcttcacttcaatgcctttcgccagttttttcgccattgcttcgccctgactgccatcttcgcgcaggacgtaagcaggttgctggttaaagtaattgcgtaatgcctggttcaaatagggaagcaacgtttgcatcaccgtttgcattttttccggttgtaccgtcgcatcgaccacttccatctctttcaggaagatcgcacctttttctttatcaaacacgggcagcgctttcagcttcagtttcatggtcgctttctgactaccgaacagggagttcatgtccagattggcgtctccggttagggtaaccttattcggctcttcgcgaccaatttggctggtcaagtttgtcagaacaatatgggcgtcagccacgccgggtaaaccgatatcttttgagaaattattatgtttcgcaagcgactggttaatttcttgttcggtgatggtgtattgggtgagttgattacagccaacgagcaggccactgacgatcaatgcagcggcaaataaaaacttgttcatggtagtcctcgacatgaaatctgcgtcaatatcctgacacaacgcagcatgtgtcaccagcgataaactcgccagcagaaaaaactgaaaacggcggcaacccgcgaatacaggctgccgcggcgggtcaggattaaatcgccattgatgataacaaattgatttgtgtctgtttcgccatattatcgcggtaatcagcaacgcggcttggccagttgattccggctaccagcgtcagattacgcagtagcggaaatagctgaatatcatcttccgaaagttcgccattcacggcgttcggtttgacgatcagtttgtccagcgcacgcaaatcatcgctgatattcttaatcagaccgtcagagtgggccagcaggtcggcaaaattacccgcgctggcctctttcttgtcgacgaaatatttgcgcgcggcgggagtagaaaactcatcaaatgccgatttggcaaaacgcggcaacagcagtttgttggcgtagccattgaccttgcgcagccactcttcaatggcaggggaacgtttgccggtcagtaacggtttgccgtcgagtttatcgacatagtgaacgatatccatgctttctggcatatagcggctgtcatctttttgcagaatgggaacctgtttttgaccgaccatccgggtgggtgtttctgcgtcgtcgttgagcagaacatgtaattcgacggggatatttttcaggccgaaaatcatgcgggctttgaggcagtaagggcagtgatcgtaaatgtatagcttcacgtgactcctccatttggctgtcagttcactttcagtatggaggagtcaggggggagtatcaaatcaggcgtcgcgttccagcaaacgacgcgcggcgcgtttctgactaaactgccaacccagcgcaaggaaagtgaagatgccaataattcccagcatcatccacggaagctctggctggtgcgccgatttgcccaggtcaaacagccagccaccaccgatataaccaatagcgccgccaatcgccagacccagacggctaaaccccatatagctgccgcgagctcttgcgtccgccagcgaagcacttaaggtttcacgcgcaggctcggcaatgatcgacccgatataaaacagacaaatcagggtgaaaagttgttgcaggccgctgaccatgcccaccggcatcatgcttaatgacattatcaacagcccagccatcaaccggtgttccagacgaaaatgcttttcactccagcgggcgatagggtagagcaacgttaacgacagacacgcttcaatggcatacatccatttaacggcagagggtgcgccagccacgtcgttgaccataattggcagcatcagcatcacttgtacagccagcatgtagtaacccgccagcgtcaggacataggtgacaaaacgcttgtcacgcatcacgcgggtcatgccttcgcgaacgggcgtgcgtacggtggagagtttccatgccggtaacaaccacgcattgaacgccgcacacagcacaaacaaaacggcccctgtggcgcagaccaggcgaaagtcgtattgcaacagccagctccccaacaatgcgccaatgaccgcaccggcactgtcctgcatcatcaacagcgagaaaaaacgaccacgttgttgtggacggattagtttcaccaccagcgccgaacgcggcggatcaaacaacgtgccgccgagtcccgagagcaggcatgaaaaccacaatagccacggttcgtgggcgatacccattgtggcgaatccggcggcgcgcatcagcataccggtaacaatcatcggtttggcaccaaagcggtcggcaattgcgccgccgaaaatacccagaccttgctgaataaactggcgtagaccgagagcaataccgaccatgacggcggcccagcccatttgatcaacgaagcggatagagatcagcgggaagacaacaaagaaccccagcacgaccagcatattatcgatgagcaggaaatatttacccaggttcctcgcctgcgatacgcgggacatttcccctcccgggaaataaaagatgagcactttctattctgcattgccgctaagacttttcccatcacttcggggacaatatttttttatcaaaacgtcgctttgatagagagtttttatcaaatatgtgaataatgcagaaaatggcattttggacttttcacagggtctggttgcgcaggtatagtaatacttacagcgtattaaagacgttacgggaaggagtaggtatagaatgtttggctatcgcagtaacgtgccaaaagtgcgcttaaccacagaccgactggtcgtgcgtctggtgcatgatcgtgatgcctggcgtctggcggattattacgcagagaatcgccatttcctcaagccctgggagccagtgcgcgacgaaagccactgctatccatcaggctggcaggccaggctggggatgattaacgaatttcataaacaaggttcagctttctactttggtttattcgacccggacgaaaaagagattattggcgttgccaatttttccaatgttgttcgcggctcttttcatgcctgctatctcggttattcgattgggcaaaaatggcagggcaaaggactcatgtttgaagccctgaccgcagccattcgttatatgcagcgcacccaacatattcatcgcattatggctaattatatgccgcacaataaacgcagcggtgatttactggcgcgactgggttttgaaaaagaaggctatgcgaaagactatctgttgattgatggacaatggcgcgatcacgtactgacggcattaactaccccagactggacgcccggccgctaaggagaatctcatgaaatatcaacttactgccctggaagctcgtgtgattggttgcttgctggaaaagcaggtgaccacgccggagcaatacccgctctcagtcaatggtgtagtcacggcctgtaatcagaaaacgaaccgtgaaccggtcatgaatctgagtgaatctgaagtgcaggaacagctggataatctggtcaaacgtcattatctacgcacagtgagcggttttggtaatcgggtcaccaaatatgagcaacgtttttgtaattcagaatttggcgatctgaaactgagcgccgcagaagtggcgttaatcaccacgttgttattgcgtggtgcccagacgccgggtgaactgcgcagccgcgccgcgcgaatgtatgaattcagcgatatggcggaagtggagtcgacgctggaacaactggcgaatcgcgaagatggtccttttgtggtgcgtctggcccgcgaaccgggtaaacgtgaaagccgctacatgcatctttttagcggtgaggtagaggatcagccgtcggtaacggatatgtcgagcgcggttgacggtgatttacaggcccgcgtcgaagccctggaaatcgaagtggcagaactgaaacagcgtcttgattcgttgctggcccacctgggagattaaagtgaaaaaattacgtatcggcgtagtgggattaggcggcattgctcaaaaagcgtggttaccggtgctggcggcaaggctggataacgaatcggcataaggaatgcgccagcttnnnnnnnnnngcgtctgactggacgttacaaggagcctggtcgcctacgcgcgcgaaagccctgccaatttgtgaaagctggcgcattccttatgccgattcgttatccagccttgccgccagttgcgatgcggtttttgtacattccagcaccgccagtcactttgacgtggtcagtacgttactcaatgcgggggtacatgtctgtgtcgataaaccgctggcagaaaatctgcgcgatgctgaacggctggtggaactggcggcgcggaaaaaactgacgttgatggtcggttttaaccgtcgtttcgcaccactctacggtgagttaaaaacgcaactcgccaccgcagcctcgctaagaatggataaacatcgtagcaatagcgtcgggccacacgatctttatttcacgttgctggatgattatctgcatgtggtggataccgcgctgtggttgtcgggcggcaaagcctctctggatggcggtacgctactgactaacgacgctggcgaaatgctgtttgccgagcaccatttttcggccggtcctttgcagatcaccacctgtatgcatcgccgtgccggaagtcagcgtgaaaccgtgcaggccgtgactgacggtgcgctcatcgacattacggatatgcgcgaatggcgtgaggagcgcgggcagggcgtagtgcataaaccgattcctggttggcagagtacgcttgagcaacgtggatttgtcggctgtgcgcggcacttcattgaatgtgtgcaaaatcagacagttccgcaaaccgccggcgaacaggcagtgctggcgcaacgtatcgttgacaagatctggcgcgatgcgatgagtgaataaaccctgtaacatctggcggtagcaattcaccataatccaggtagactattcgcctctttcagcgcctgccttgcaggcgttttgcccgtgggtctggattagaacaccgatgaatttattaaaatcgctggccgccgtcagctcgatgaccatgttttcgcgtgtgcttggcttcgcacgagacgcaattgtcgccagaatctttggcgcagggatggcaaccgacgcctttttcgtcgcttttaaacttcctaacttgttacgccgtatctttgccgaaggggcattttcccaggcatttgtaccgattctggcggaatataaaagtaagcagggtgaagacgccacgcgggtctttgtctcttatgtttctggcctgctgacacttgcgctggcggttgtgacggtcgctggcatgctcgccgcaccgtgggtgatcatggtgaccgcgccaggcttcgctgacacagctgacaaatttgccctgaccagccagctactaaagattacctttccctatatcttgctgatctccctggcgtcgctggtgggagcgattctgaatacgtggaaccgcttctcgattccggcgtttgcgccaacactgcttaacatcagcatgattggtttcgcgctgtttgccgcaccgtactttaacccaccggtgctggcgctggcgtgggctgttacggtcggcggcgtcctgcagctggtgtatcagctaccgcacctgaagaagatcggcatgctggtcctgccgcgcattaacttccacgatgccggagcaatgcgcgtggtgaaacagatgggaccggcgatccttggcgtctctgtgagccagatctccttaatcatcaacaccatttttgcctcgtttcttgcttccggttcggtgtcttggatgtattacgccgaccgcttaatggagtttccgtccggtgtgctgggcgtggcgcttggcaccattttgctgccgtcgctgtcgaaaagttttgccagtggcaatcatgatgaatacaaccgtttgatggactgggggctgcgtctttgtttcctgttggcgctgccgagtgcggttgcgttgggcattctttcaggtccgttgaccgtttcgctgttccagtacggtaaatttaccgcgtttgatgcgctgatgacccagcgggcgttaattgcctactcggtgggtttgattggcctgattgtagtgaaagtgttggctcctggcttttattcccgccaggacattaaaacgccagtgaaaattgccatcgttacgctgattttaacgcaattgatgaacctggcgtttatcggtccgttgaaacatgccgggctgtcactttctattggtctggcggcgtgtctgaatgcttcgctgctttactggcagttgcgtaagcagaaaatctttaccccgcaacctggctggatggcgtttctgttgcgtctggtggtggcggtactggtgatgtctggcgtgcttttaggtatgttacatatcatgccggagtggtcattgggtaccatgccctggcgcttgctgcgtttaatggcggtcgtgctggcggggattgccgcgtacttcgctgcactggcggtactgggcttcaaagttaaagaatttgcccgccggacggtgtaacaatgcattccggcctgcattgcaggccggagataatcttcagatcgaaatctttttactgccgcgatgggttgttgaggtctgaccgttcgccccatatagcgtcggttcctgatgcggtttcaacatttccagcgcctgttgattgcgctcaatctgtccttccagtaaccagccgttatgttgattcatttggcgtagttgctgcgttttcacagtaatttcctgccagcgttgactaatatcagcgctatttgctgtattgggttctttcctgcgtaactgttcgaggtaatccagcgtcgccagcagtgagcttttttgttctgtaatccattgcaactggctgccgttgatctgccccatagagagatgttgctgttcttgatccattaccgttttgagatcgttaagcacagcggacatctggtcgaggatctctgcaagacgtgtcatacgatcagttactctgcaagtcttgctgcgcttcgttgatcagcgcatcggcaattttgccggtgtccatttttagttcaccgttacgaatcgccagttttaacgcttcgacacgttcaagattgatatcactgctgccgggttgcatcagttttgcttgcgcgtcgcttaacgtcacactggtgctggtggaggcggttgtttttgccgcccggctgttcgttaccggcgcgtcagtggtttcgcgcggttgaacggtgcttacaggcttcagaggcgaagtgcgatcaatactcatggtttattcctcattgagggcgcttttatcatgtgttgcttatttatcggcaagggacgggtaatctttaacagcttacaggtttataagaatattcccatctgcatcaacaacgccgctgactacctgtcccgataccatgcgcacccgcgcattctgtgcgacggctgcattgttcagcgcctgaccttctgcgttggcgctaaacccatcaccgctggcgatcacattgacgcgttgtcccgcttttacccgccatgcctggcgaaactgggttaactggataggttgatcgggtgatagatcgcgcaggctaatggcatcaacaagttgattgatatccagcaccgtacgcggtggcagggtatccagccgtccgcgtttcagtttgacattgccagcttccagctttcctccccgcacaatgggcatcgcggcaaccacataatttcctgtggcctgtacattaacctgtaaatatcgtttgtcgttaccgcagcgagccaacacattcacattgccccacaggcgggaattattgctcatcgaaagcaatggctgctcgcacggcggcagtagactgggcgctgtacgaatagaaacacgaacctcatcacttatccctgcgagctgggcgctaaaaaaggtttgcaattgcgatgtgagattactcgccgcacttaacggactgaacagtatcgcgatgatcgccacgctacgttttattgccagcattttcgcccccagccatttctacaacgtgaattgtacctgtccgcaatggtcatcaacggcataaatagcgacccattttgcgtttattccgccgataacgcgcgcgtaaaggcatttaagctgatggcagaattttgatacctgcggaggagatatgctcgataagctcgacgccgccttacgttttcaacaagaggcgctcaatctgcgcgcacagcgtcaggaagtgctggcagcaaacatcgccaatgctgatacccctggttatcaggcgcgcgatatcgattttgccagtgaacttaaaaaagtcatgcaacgtggacgggatgcaaccagtgtggttgcactgacgatgacctcaacgcaacacattccggcgcaggcgctgacgcctcctaccgcagaactgcaataccgtattccggaccagccttcgcttgacggtaataccgtcgatatggatcgcgaacgcacccagtttgccgataacagcctgcaataccagatgagccttagcgcgttgagcgggcaaatcaaaggcatgatgaacgttttacagagcggaaattaacggatggcactgctgaatatttttgatatcgccgggtcggcgttaactgcccagtcccagcgcctgaacgtggcggccagtaatctggcgaatgctgatagcgtgaccggtcctgatggacagccatatcgggcaaaacaggtggtattccaggttaacgctgcaccaggtgctgcgacaggcggcgtaaaggttgccgatgttatagaaagtcaggccccggacaaactggtttatgaaccgggtaatccgctggcggatgcaaagggctacgtgaaaatgccaaacgttgatgtcgtcggggagatggttaacaccatgtcggcgtcacgcagctatcaggccaatgttgaagtgctcaacacggtgaaaagcatgatgctgaaaacccttacgctcggtcaataaaggagaaagctatgtccattgcggtaaccaccaccgatccgacaaataccggcgtcagtaccaccagcagtagttcgctcacgggcagcaacgccgcagatttacaaagcagttttctgactttgctggtggcgcagctgaaaaaccaggacccgaccaatccaatggaaaacaacgagctgacgtcgcaattggcacaaatcagcacggtcagcgggattgaaaaactcaataccacgctcggatctatttccggacagattgataacagccagtcgttacaggccagtaacctgattggtcacggcgtgatgatccccggcaccactgttcttgcgggaaccggcagtgaagaaggggctgtgaccacgaccacgccgtttggtgttgagctgcaacaggcggcagacaaagttacggccaccatcaccgataaaaatggcgcggttgtgcgcaccattgatattggtgaactgaccgccggagtccacagtttcacctgggacggtacgttgactgacggcagcactgcgccgaacggttcttacaacgtagcgattagcgccagtaacggtggtacacaactggttgcccagccgctgcagtttgctctggtgcagggtgtgatccgcggcaacaacggtaatacgctggatctcggcacttacggcaccaccaccctcgacgaagtacggcagataatttaagccttcacatttcaggagtcagtcatggccttttctcaagcggttagcggattaaacgctgccgccaccaacctcgatgttattggcaacaatatcgccaactccgccacatacggctttaaatcaggcacggcctcttttgccgatatgtttgccggttcgaaagtgggactgggggtaaaagttgccggtatcactcaggactttaccgatggcacgaccaccaacaccgggcgtggtctggacgttgctatcagccagaacggttttttccgtctggtagacagcaacggttcggtgttctacagccgtaacggacaatttaagctggatgaaaaccgtaacctggtgaatatgcaaggtttacagctgaccggttacccggcaaccggtacgccgccgactattcagcaaggggcgaatccgactaacatttcgatcccgaataccctgatggcagcgaaaactaccaccacggcgtcgatgcagatcaacctgaattccagtgatccgcttcctactgttacgccattcagcgccagcaatgcggatagctataacaaaaaaggttcggtgactgttttcgacagtcagggtaatgctcatgacatgagcgtctactttgtgaagaccggggataataactggcaggtctacacccaggatagcagtgatccaacaggtacagccgagcctgcaatgaagctggtgtttaatgccaatggcgttctgacctcaaatccaacagagaatattaccactggcgcaattaacggcgcagatcccgccacgtttagcctgagcttcctcaactccatgcagcaaaataccggcgctaacaacattgtggcaaccacccagaacggctacaaaccgggcgatctggtgagttatcaaatcaatgatgacggtacggttgtcggcaactattccaacgaacaaacccaactgctggggcagattgtactggcgaactttgccaacaacgaaggtctggcatccgaaggcgacaacgtctggtctgcgacgcaatcttctggcgtggcgctgttggggacagccgggacgggcaactttggtaccctgaccaacggtgcgctggaagcgtccaacgtcgatctcagtaaagaactggtcaatatgatcgttgcccagcgtaactatcagtctaacgcccagaccattaaaacccaggaccagatcctcaacacgctggttaacttacgctaatcgctgacgggatagctcaatggatcacgcaatttataccgcgatgggagcagccagccagacgctgaatcaacaggcggtaaccgccagtaatctggccaatgcctctacgcccggttttcgtgcgcagttaaacgccttgcgcgcagtgccggtggaagggctttcactgcctacgcgcacgctggtaacggcgtcaacaccgggtgcagacatgacgcccggcaagatggattacacctcgcgcccgctggacgttgcgttgcagcaggatggttggctggccgtgcagaccgctgacggcagcgaagggtatacgcgtaatggcagcattcaggttgatcccaccgggcaactgacaattcaggggcatccggtgataggcgaggcggggccaattgctgtgccggaaggggcggaaatcacgatagctgccgatggcacaatctcggcgctgaatccgggcgatccggcaaatacggttgcgccagtggggcgtctgaagctggtgaaagccacgggcagcgaagtgcagcgcggtgacgacggcatttttcgtttaagcgcagaaacccaggccacgcgtgggcctgtactgcaggcagatccaaccttgcgtgtgatgtcgggtgttctggaaggcagtaacgtcaatgccgttgcggcaatgagcgacatgattgccagcgcgcggcgttttgaaatgcagatgaaggtgatcagcagcgtcgatgataacgcaggccgtgccaaccaactgctgtcgatgagttaattgaaaggatacatgacaagtataagttgcccgatgcgcaagtttatcgggtctatgggggcaatcgcaatttatcgattttgcgagcacttgtaggccggataaggcgtttacgccgcatccggcaagaagacatatgcactttgtcactaatccactacaggacattttatgatcagttcattatggatcgccaaaacgggccttgacgcccagcaaaccaatatggacgtcattgccaacaacctggcaaacgtcagtactaacggttttaagcgtcagcgcgcggtgtttgaagatctgctttatcaaaccattcgtcagccgggggcacagtcttccgaacaaaccaccttaccctccggattacaaatcggcacgggggtacgcccggtcgccactgaacgcttacacagccagggcaacctgtcgcagaccaacaacagcaaagatgtcgcgattaaagggcagggctttttccaagtgatgttgccagatggctcatcagcctatacccgtgacggctctttccaggtggatcagaacgggcagttggtgacggctggtggttttcaggtgcagccagcgatcaccattccggcgaatgcgttaagtatcaccatcggtcgtgatggcgtggtcagcgtaacccaacaaggccaggcagctccggtccaggttgggcagctcaatctcaccacctttatgaatgataccggactggagagcattggcgaaaacctctacaccgaaacgcaatcctccggtgcaccgaacgaaagcacgccgggcctgaacggtgcgggactgctgtatcaagggtatgttgaaacgtctaacgtcaacgtggcggaagaactggtcaatatgattcaggtgcaacgcgcttacgaaatcaacagtaaagcggtgtccaccaccgatcagatgctgcaaaaactgacgcaactctaaggcataaccggtggcaggttcaccggtttattgatttttgaagatgatagccatgcaaaaaaacgctgcgcatacttatgccatttccagcttgttggtgctttcactaaccggctgcgcctggataccctccacgccgctggtacagggagcgaccagtgcacaaccggttcccggtccgactcccgtcgccaacggttctattttccagtctgctcagccgattaactatggctatcaaccgctgtttgaagatcgtcgaccacgcaatattggcgatacgctgaccatcgtgttgcaggagaacgtcagcgccagcaaaagctcctctgcgaatgccagccgtgacggtaaaactaattttggctttgatactgtgccgcgctatttgcaggggctgtttggtaacgctcgtgccgatgtcgaagcctccggtggtaacacgttcaacggaaaaggcggggccaatgccagcaatacctttagcggcacgttgacggtgacggttgaccaggtactggtcaacggcaacctgcatgtggtgggtgaaaaacagattgccattaatcagggtaccgaatttattcgcttctctggcgtggttaatccacgcaccatcagcggcagcaataccgtaccgtctactcaggtggcggatgcgcgcattgaatacgtaggcaatggctacattaacgaagcgcaaaatatgggctggttgcaacgtttcttccttaacctgtcgccaatgtaagtgaggctgtggtgattaaatttctctctgcattaattcttctactggttacgacggcggctcaggctgagcgtattcgcgatctcaccagtgttcagggggtaaggcaaaactcactgattggctatggcctggtggtggggctggatggaaccggtgaccagacgacccagacgccgtttaccacacaaacgcttaataacatgctctcacagctgggaattaccgttccgacgggcaccaatatgcagctaaaaaacgtcgctgcggtaatggtgacagcgtcacttcctccgtttggacgtcaggggcaaaccatcgatgtggtggtttcctccatgggtaatgccaaaagcttgcgtggaggtacgttgttgatgacaccgcttaagggcgttgacagtcaggtgtatgcgctggcgcagggcaatattctggttggcggcgcaggagcctccgctggcggtagcagtgttcaggtgaaccaactgaacggtggacggatcaccaatggtgcggttattgaacgtgaattgcccagccagtttggcgtcgggaatacccttaatttgcaacttaacgacgaagatttcagcatggcgcagcaaatcgctgacaccatcaaccgcgtgcgtggatatggcagcgccaccgcgttagatgcgcggactattcaggtgcgcgtaccaagtggcaacagttcccaggtccgtttccttgccgatatccagaatatgcaggttaatgtcaccccgcaggacgctaaagtagtgattaactcgcgcaccggttcggtggtgatgaatcgcgaagtgaccctcgacagctgcgcggtagcgcaggggaatctctcagttacagtcaatcgtcaggccaatgtcagccagccagatacaccgtttggtggcggacagaccgtggtaacgccacaaacgcagatcgacttacgccagagcggcggttcgctgcaaagcgtacgttccagcgccagcctcaataacgtggtgcgcgcgctcaatgcgctgggcgctacgccgatggatctgatgtctattttgcaatcaatgcaaagtgcgggatgtctgcgggcaaaactggaaatcatctgatgatcagcgacagcaaactactggcaagtgcggcctgggatgcgcaatcactcaacgaactaaaggcgaaagcgggcgaagatccggcggcaaatatccgtccggtggcccgccaggtggaagggatgttcgtgcagatgatgttgaaaagcatgcgcgacgctttaccaaaagatggcctgttcagcagcgagcacactcgcctgtataccagtatgtatgaccagcagattgcccaacagatgacggcgggcaaaggtctggggcttgcagagatgatggttaaacagatgacgccagaacaaccattgccagaggagcccacgccagcagcaccgatgaaattcccgctcgaaactgtggtgcgttatcaaaatcaggcgctttctcagctggtgcaaaaggccgtaccacgtaactacgatgattcgctgccgggtgacagtaaagcattcctcgcgcaactctcgctgcccgcccaactggcaagccagcaaagcggtgtgccacatcatttgatcctcgctcaggcggcgctggaatctggctgggggcaacgacaaatccgccgcgaaaacggcgagccgagctataacctgtttggtgtcaaagcctctggcaactggaaagggccagtcactgaaatcaccacgactgaatatgaaaatggcgaagcgaagaaagtaaaagcgaaatttcgggtctacagctcgtatctggaagcattgtcggattacgttgggttgttaacacgtaacccgcgctacgccgccgtgacgaccgccgcgagtgcggagcagggggcgcaggnnnnnnnnnnggggtatgctaccgatcctcactatgcccgtaaactcaccaacatgatccagcagatgaaatcgataagcgacaaggtgagcaaaacctacagcatgaacattgataatctgttctgaataactcaagtccggcgggtcgctgccgataatactctgtaattgaaggcttataaggaacctccatgtccagcttgatcaataacgccatgagcggactgaacgcggcccaggcggcgttaaatacggcaagtaataatatctccagctataacgttgccggatatacccgccaaaccactattatggcgcaggccaatagcacgttgggcgctggcggctgggttggcaatggtgtctacgtttctggtgtgcagcgtgagtatgatgcttttattaccaaccagttacgtgcggcgcagacgcaaagtagcggcctgactgcccgctatgagcagatgtcgaaaatcgacaatatgctctccaccagtacctcttcgctggcaacacagatgcaggatttcttcaccagcctgcaaacgctggtgagtaacgcggaagacccggcagcgcgccaggcgctgattgggaaatcagaagggttggtgaatcagtttaaaaccaccgatcaatatctgcgcgaccaggacaaacaggtcaatatcgcgataggtgccagcgttgatcagatcaacaattacgctaaacaaattgccagcctgaacgatcaaatctcgcgcctgacaggcgtgggggcaggggcgtcacctaacaatctgctggatcaacgcgatcaactggtgagcgaattaaaccagattgttggcgtagaagtcagcgttcaggatggcggtacttataacatcacgatggccaatggttactcactggttcagggaagtacggcgcggcaactggcggcagttccttccagcgccgacccttctcgtacgactgtcgcttacgttgatgggacggcaggcaatattgagatcccggagaaattactgaataccgggtcgctgggcggcattctgacattccgttctcaggatctggaccagacgcgtaatacgcttggacaactggcgctggcatttgccgaggctttcaacagccaacacaaagccggatttgatgccaacggcgatgctggtgaagatttctttgctatcggtaagcccgcggttctgcaaaacacgaaaaacacaggtgacgttgcgatcggtgccacggtaactgatgcctccgcggtactggcgactgattacaaaatctcgttcgataataatcagtggcaggtcacccgccttgccagtaataccacttttacggtgacgccggatgccaacggtaaagtggcatttgatggtctggagttgacgtttacaggaacgcctgctgttaacgacagcttcacgctgaaaccagtaagtgacgctatcgtcaacatggatgtattaatcaccgacgaagcgaaaatagcgatggcgagcgaagaagatgcgggtgatagcgataaccgcaacggtcaggccctgctggatctgcaaagcaacagtaaaacggtgggcggtgcgaaatcctttaacgacgcttatgcctcgttagtgagtgatatcggtaataaaaccgcgacgttgaaaaccagtagcgccacgcaaggtaatgtggtgacgcagctttccaatcagcagcagtcgatttccggtgtcaatctcgatgaggagtacggaaatctgcaacgttttcagcagtattacctggcgaatgcgcaggttctgcagacggcaaacgcgatttttgatgcgctgattaacattcgctaaggggagataaaatgcgtttcagtacccagatgatgtaccagcaaaacatgcgcggcatcaccaattctcaggcagaatggatgaagtacggcgagcagatgtcgacgggtaagcgagtcgttaacccttcagacgatcccattgctgcatcacaagctgttgttctctcccaggcacaggcgcaaaacagccagtacacgctggcacgtactttcgccactcaaaaagtgtcactggaagagagtgtacttagccaggtcaccactgctatccagaatgctcaggaaaaaattgtctacgccagcaatggcaccttgagtgacgatgaccgggcctcgctggctacggatattcaggggtttcgtgaccagttgctgaatctggcgaacaccactgacggtaatgggcgctacatttttgccggttataaaacagagactgcgccgtttagtgaggctaacggtgattatgtcggcggaacagaaagtattaagcaacaggtcgatgcttcgcgttcgatggtgataggacatacgggcgacaaaattttcgacagtattaccagtaacgcggtagcggaaccagacggtagcgcttctgaaaccaatctttttgccatgctggatagcgccatcgcagccctgaaaacgccggtcgcggatagcgaagcggataaagaaatcgccgctgcggcattggataaaaccaaccgtggactgaaaaactcgctgaataatgtccttaccgttcgcgcggaattaggcacgcagctgaacgaactggagtcgctggattccttaggtagcgatcgcgctttagggcaaacgcagcagatgagcgatctggttgatgtggactggaatgcaactatttcatcttacatcatgcagcaaacggcattgcaggcatcgtataaagcatttaccgatatgcagggattgtcgctcttccagctcaacaaataagctcgctttaaaacatatcatgaaactgggtatgttttgtctgcccgctctgggatcgccggggcgggcattttttttgcctattttgcattgttggttagcaaggatgccatttgatgaattttaatatgttgattcaaacatgaaataaaaaagccctggcagttaccagggcttgattactttgagctaattattactcaacaggttgcggacgcgcaggagcggcagaggcatgatgcgttgccgtatgaccacctgcggcacctttaccttcgaaggcaaaagtagggcgctgccagtcactgtgacgcggtgcctccggaacatattccggtgccggagcgcgcgtcattggcgcggtagcgtggttatgctcaacggtgatctctggttcaaccgcggctaccgtttcaacttctgctgcgacttcagcgacgactggcgcggcaggttgagcaacaacttcaggttcagcaaccacaacctcagcagtttcggcaacttcttcaatatctgccgtctcttcctgcggttcaaccaccggttctgcgtgttctgcgactttctgggctacggcaacatcagactcggtaatcacctgcggctgttcagttaccgcggcggcaatcacttcaggatgcgtcgtttcaaccacttccggttgcggttcggcaaccggtacgggggcttctacgacttcagccatttcttcaacaactggcgcgctaacaacaggttcgacagcggcggcgacagggacctcagtcaccatcggctgcacttgtacttcttcctgttcgcgctgctcttcaacctgtacatcttgcggacgtacaattggatagcggatccagactttgccagaggccagttccggagacgcgcacgctacggtcaacggcattggcgactgggttggataacgctcgtcacgatagcgacgacgacgctgaccactcacgcgcaggtgacgaggcgagcggcgagaacgacgcggcatgccaccgttgtcacggttatcagcattgttctcttcttgctgttctggtgcagtttgcgctacgactggcagcgggactttcaccagttctgtgcgtggagctggagcttcctgaacaattggtnnnnnnnnnntttcttcaaccaccggtgcgactaccgcttcttcggctacgctttgctcgtaacgcactttctgattgagctgacgctgtttacgacgcggctgaaccggacgtacacgttcttcctgttcggtttcctgaacagattgctcttcaacattcagcgccttcgcttcttgttgcgcctgacgtttatcatcgttacggcggcggctacgttcacgacgcggcgcttgctgctcgtcggtggtacgtgctttttccgttacctcagcttgctgacggctctcacgcgtctcggcagtctgctgctgtgcctggcgacgattacgacggttttcttcgcgattatcgctgccttcagtacgttcactacgggtgtcgcggcgctcattacggtcacggcggttgttctgacgaggcttgcgacgatcctgttgacgttccggtttcgcttctgctttcggtgctggttgctcggtcggtttggtttcttcactaccgctgaacagcgctttcagtgcgccgaagaagcggctcaacagcccaggttgtgcaggagttgctggtgttgccggtgcagctttcggtgctggggctacaacaggcgcggcaggttcagctggcgttggcgctggcggcacatccggcatggcaaaggttgccagcgcaggttgttccggacgcttacgttcagcgaactcttcttcagacggcagcgccatcgcttcttcatgcagcttcggcagcatgtagcttaaggttggggtttcttcccctttacgcacgcgcagcacgtggtagtgcggggtttccatctgatcgtttggcacaattacacagcgcacaccgtcctgacgagtttcaatggcatttaccgcagaacgtttttcattcagcaggtaagaagcgattggcacaggaacaatggcgtgaacttcctgggtgttctctttcagcgcttcttcttcgatcagacgcagaatagagagcgacagcgattcgttgtcacgcacggtgccagtaccagaacaacgcggacaaacgtgatgactggattcacccagtgatgggctcaggcgctgacgggacatttccagcaggccaaagcgagaaatatggctgatttgaatacgcgcacggtcctgacgcaccgcttcacgcagacggttttctaccgcacgctggtggcgtacaggcgtcatgtcgatgaagtcgataacaatcaggccgccgaggtcacgcaggcgcagctgacgagcaatctcatcggcagcttcgaggttggtgttaaacgcagtttcttcgatatcgccgccgcgggtcgcgcgtgcggagttgatgtcgatggcggttaacgcttcggtgctgtcgataacaatggaaccaccggacggcagacggacttcacgctggaaggcggattcgatctgcgactcgatctggtagtggctgaacagcgggatctcgccggtgtacagtttgattttgctgctgaaatccgggcgacctaatgcagcgatatgctgacgtgccagttcgagcactttcgggttatcgataaggatttcgccgatgtcctgacgtaagtaatcgcggaatgcgcgaacgattacgttgctctcctgatgaatcaggaacggagccgggcggctttcagcggcttttttgatggcttcccagtgtttcagacggaagcttaaatcccattgcagcgcctcagcagatttgccgacgccagcggtgcgcacgataagtcccatgccttccggcagttcaaggctcgccagtgcttcttttaattcggtacggtcgtcgccttcgatacggcgagaaatgccacccgcgcgcgggttgttcggcatcagaaccagatagctacccgccagactgataaaggtggttaatgccgcgcctttgttgccgcgctcttctttatcgatctgaacaatgacttcctgaccttcacgcaacacatctttaatgttgggacgaccatgagcactgtagttagcagggaaatattcgcgggcaatttcttttagtgggaggaaaccgtgacgttcagcgccgtaatcaacaaaagcagcttccagactcggttcaatgcgggtgattttacctttgtagatgtttgcctttttctgctcgtgccctggactttcgatatccaggtcatacagacgctgcccatctacaagggcaacgcgcaactcttcctgctgagttgcgttgattaacattcttttcatcgtaacttactcattattcttacattgacgactaagctgcgggcaaagtaacgcctttccgggtgtgaaccgatggcctcgtgtctagtcgcgtcgccaacctcacggttatcgtcagctcaaagaggcgcagagtgtcggttgcccgtttttcatgcggaaaaacagcgcaattatcaaagaaacagactgggtattactctccagaaatatttccatctaccggtaaggactgcaacccgcagcccgctaactgcctgaaagatcaatacgtcttacgccattgctgcgtggatgatcggtcgggcaaaatgggttattccgtaaaatttcttgttttaacaaggatggacacggaaacggcctcattattccactgcaagccttgttatagcaagatgacttttaccatttatcacccgcttactcacagttttttcacttcttgctggtgattggtttaataaccatcaataaagtgatcacgcagtgaagtaataaggtgcaaaagtaaatataagcatagaaaaatgagtggcgcgaatcctgttggctaattagaatcgccaaccatgaaaacagagactccatccgtaaaaattgttgctatcaccgctgacgaagcggggcaacgtatcgataactttttgcgtacccaattgaaaggcgtaccaaaaagtatgatttaccgtattttgcgtaaaggcgaagtgcgggtgaacaaaaaacgtattaagcctgaatataaactcgaagcgggtgatgaggtgcgtattccaccggttcgcgttgctgagcgggaagaagaggcggtttcgccacatctgcaaaaggtggcggcgctggcggacgtcatcttatatgaagatgatcacatcctggtgctgaataaaccttccggtacggcggtacatggcggcagtggtttaagcttcggcgttattgaaggtttgcgggcgttgcgccnnnnnnnnnncttgaactggttcatcgtcttgaccgggacacctcaggtgttttgctggtagcgaaaaaacgctcggcgttgcgttctctgcatgagcaattacgtgaaaaagggatgcaaaaagattacctggcgctggtgcgcggtcagtggcagtcgcatgtgaagagcgttcaagcaccgttactgaaaaatattctgcaaagcggcgaacgtatcgtgcgtgtgagtcaggaaggcaaaccgtcggaaacacgctttaaagtggaagaacgctatgcatttgccaccctggtgcgttgtagcccggtaacagggcgtactcaccagatccgtgtgcatacacaatatgcgggtcatccgattgcctttgacgatcgctacggtgaccgtgaatttgacaggcagctcactgaagcaggcacgggattaaatcgcctgttcctgcacgctgcagcgttgaagtttactcatccggggaccggtgaggtgatgcgtatcgaagctccgatggatgaaggtttgaagcgttgtttgcaaaagctgcgtaacgcgcgctaatacaagcatataaacctgataatgggcggttggcctgataaggcgtttacgccgcatcaggccgccagcaccgattgccggatgcgacgtaaccacatccggcgcaaaaaactatcccatcagcgggtttttcccttcccgacgtaacatctgacacagcgcgattagcggtaaaccaaccagcgtgttaggatcacgcccctctaaacgctcaaacagcgtaatgccaaatccttcactcttaaagctacccgcgcagtgcaggggatgctctttacgcacgtaattatcaatctccgcctcgctcaggtgacggaaatggacgtcaaaaggctccacttctgtttgcagatgcccattcgccgaattaaacaacgccagtccagtatagagggtgacgatattgccgctggctttgcgtaattgcagacgggcattttcttccgttaacggtttaccggtgatttcgccatcaagaacacatacctggtctgaaccaataattaaatgatccggataacgtgacgccagagattgcgctttttcttgtgccagtcgaagcaccaactgtcgcggtgattcgtcgctgcgtggggtttcgtcgacctctggtgctgcacattcaaaagagatttgcagtttttccagaagagcgcgacgccatggcgaggtggaggctaaaataagtttaggcatatttttttccatcagatatagcgtattgatgatagccattttaaactatgcgcttcgttttgcaggttgatgttcgttatcagcactgaacgaaaataaagcagtaacccgcaatgtgtgcgaattattggcaaaaggcaaccacaggctgcctttttctttgactctatgacgttacaaagttaatatgcgcgccctatgcaaaaggtaaaattacccctgactctcgatccggttcgtacggctcaaaaacgccttgattaccagggtatctatacccctgatcaggttgagcgcgtcgccgaatccgtagtcagtgtggacagtgatgtggaatgctccatgtcgttcgctatcgataaccaacgtctcgcagtgttaaacggcgatgcgaaggtgacggtaacgctcgagtgtcagcgttgcgggaagccgtttactcatcaggtctacacaacgtattgttttagtcctgtgcgttcagacgaacaggctgaagcactgccggaagcgtatgaaccgattgaggttaacgaattcggtgaaatcgatctgcttgcaatggttgaagatgaaatcatcctcgccttgccggtagttccggtgcatgattctgaacactgtgaagtgtccgaagcggacatggtctttggtgaactgcctgaagaagcgcaaaagccaaacccatttgccgtattagccagcttaaagcgtaagtaattggtgctccccgttggatcggggataaaccgtaattgaggagtaaggtccatggccgtacaacagaataaaccaacccgttccaaacgtggcatgcgtcgttcccatgacgcgctgaccgcagtcaccagcctgtctgtagacaaaacttctggtgaaaaacacctgcgtcaccacatcactgccgacggttactaccgcggccgcaaggtcatcgctaagtaatcacgcgtctgcgtgatgaagcttagtgaggattttccccaggcaactggggaaagaccaaaccgggcggcgacgataccttgacacgtctaaccctggcgttagatgtcatgggaggggattttggcccttccgtgacagtgcctgcagcattgcaggcactgaattctaattcgcaactcactcttcttttagtcggcaatcccgacgccatcacgccattacttgctaaagctgactttgaacaacgttcgcgtctgcagattattcctgcgcagtcagttatcgccagtgatgcccggccttcgcaagctatccgcgccagtcgtgggagttcaatgcgcgtggccctggagctggtgaaagaaggtcgagcgcaagcctgtgtcagtgccggtaataccggggcactgatggggctggcaaaattattactcaagcccctggaggggattgagcgtccggcgctggtgacggtattaccacatcagcaaaagggcaaaacggtggtccttgacttaggggccaacgtcgattgtgacagtacaatgttggtgcaatttgccattatgggctcagttctggctgaagaggtggtggaaattcccaatcctcgcgtggcgttgctcaatattggtgaagaagaagtaaagggtctcgacagtattcgggatgcctcagcggtgcttaaaacaatcccttctatcaattatatcggctatcttgaagccaatgagttgttaactggcaagacagatgtgctggtttgtgacggctttacaggaaatgtcacattaaagacgatggagggtgttgtcaggatgttcctttctctgctgaaatctcagggtgaagggaaaaaacggtcgtggtggctactgttattaaagcgttggctacaaaagagcctgacgaggcgattcagtcacctcaaccccgaccagtataacggcgcctgtctgttaggattgcgcggcacggtgataaaaagtcatggtgcagccaatcagcgagcttttgcggtcgcgattgaacaggcagtgcaggcggtgcagcgacaagttcctcagcgaattgccgctcgcctggaatctgtatacccagctggttttgagctgctggacggtggcaaaagcggaactctgcggtagcaggacgctgccagcgaactcgcagtttgcaagtgacggtatataaccgaaaagtgactgagcgtacatgtatacgaagattattggtactggcagctatctgcccgaacaagtgcggacaaacgccgatttggaaaaaatggtggacacctctgacgagtggattgtcactcgtaccggtatccgcgaacgccacattgccgcgccaaacgaaaccgtttcaaccatgggctttgaagcggcgacacgcgcaattgagatggcgggcattgagaaagaccagattggcctgatcgttgtggcaacgacttctgctacgcacgctttcccgagcgcagcttgtcagattcaaagcatgctgggcattaaaggttgcccggcatttgacgttgcagcagcctgcgcaggtttcacctatgcattaagcgtagccgatcaatacgtgaaatctggggcggtgaagtatgctctggtcgtcggttccgatgtactggcgcgcacctgcgatccaaccgatcgtgggactattattatttttggcgatggcgcgggcgctgcggtgctggctgcctctgaagagccgggaatcatctccacccatctgcatgccgacggtagctatggtgagttgctgacgctggctaatgctgaccgtgtgaatccagagaattcaattcatctgacgatggcgggcaacgaagtcttcaaggttgcggtaacggaactggcgcacatcgttgatgagacgctggcggcaaataatcttgaccgttctcaactggactggctggttccgcatcaggctaacctgcgtattatcagtgcaacggcgaaaaaactcggtatgtctatggacaatgtcgtggtgacgctggatcgccacggtaatacctctgcggcctctgtcccgtgcgcgctggatgaagctgtacgcgacgggcgcattaagccggggcagttggttctgcttgaagcctttggcggtggattcacctggggctccgcgctggttcgtttctaggataaggattaaaacatgacgcaatttgcatttgtgttccctggacagggttctcaaaccgttggaatgctggctgatatggcggcgagctatccaattgtcgaagaaacgtttgctgaagcttctgcggcgctgggctacgacctgtgggcgctgacccagcaggggccagctgaagaactgaataaaacctggcaaacccagccagcgctgttgactgcatctgttgcgctgtatcgcgtatggcagcagcagggcggtaaagcaccggcaatgatggccggtcacagcctgggggaatactccgcgctggtttgcgctggcgtgattgatttcgctgatgcggtgcgtctggttgagatgcgcggtaagttcatgcaagaagccgtaccggaaggcactggcgctatggcggcaatcatcggtctggatgatgcgtctattgcgaaagcgtgtgaagaagctgcagaaggtcaggtcgtttctccggtaaactttaactctccgggacaggtggttattgccggtcataaagaagcggttgcgcgtgctggcgctgcctgtaaagcggcgggcacaaaacgcgcactgccgttaccagtgagcgtaccgtctcactgtgcgctgatgaaaccagcagccgacaaactggcagtagaattagcgaaaatcacctttaacgcaccaacagttcctgttgtgaataacgttgatgtgaaatgcgaaaccaatggtgatgccattcgtgacgcactggtacgtcagttgtataacccggttcagtggacgaagtctgttgagtacatggcagcgcaaggcgtagaacatctctatgaagtcggcccgggcaaagtgctaactggcctgacgaaacgcattgtcgacaccctgaccgcctcggcgctgaacgaaccttcagcgatggcagcggcgctcgagctttaaaagaggaaaatcatgaattttgaaggaaaaatcgcactggtaaccggtgcaagccgcggaattggccgcgcaattgctgaannnnnnnnnnctcgcagcccgtggcgcgaaagttattggcactgcgaccagtgaaaatggcgctcaggcgatcagtgattatttaggtgctaacggcaaaggtctgatgttgaatgtgaccgacccggcatctatcgaatctgttctggaaaaaattcgcgcagaatttggtgaagtggatatcctggtcaataatgccggtatcactcgtgataacctgttaatgcgaatgaaagatgaagagtggaacgatattatcgaaaccaacctttcatctgttttccgtctgtcaaaagcggtaatgcgcgctatgatgaaaaagcgtcatggtcgtattatcactatcggttctgtggttggtaccatgggaaatggcggtcaggccaactacgctgcggcgaaagcgggcttgatcggcttcagtaaatcactggcgcgcgaagttgcgtcacgcggtattactgtaaacgttgttgctccgggctttattgaaacggacatgacacgtgcgctgagcgatgaccagcgtgcgggtatcctggcgcaggttcctgcgggtcgcctcggcggcgcacaggaaatcgccaacgcggttgcattcctggcatccgacgaagcagcttacatcacgggtgaaactttgcatgtgaacggcgggatgtacatggtctgaccgcgatttgcacaaaatgctcatgttgcgcgcagtctgcgtggttatgagtaataattagtgcaaaatgatttgcgttattggggggtaaggcctcaaaataacgtaaaatcgtggtaagacctgccgggatttagttgcaaatttttcaacattttatacactacgaaaaccatcgcgaaagcgagttttgataggaaatttaagagtatgagcactatcgaagaacgcgttaagaaaattatcggcgaacagctgggcgttaagcaggaagaagttaccaacaatgcttctttcgttgaagacctgggcgcggattctcttgacaccgttgagctggtaatggctctggaagaagagtttgatactgagattccggacgaagaagctgagaaaatcaccaccgttcaggctgccattgattacatcaacggccaccaggcgtaagtgaacatctccaggcggtcgttcgaccgcctgagttttatctttttgtcccactagaatcattttttccctccctggaggacaaacgtgtctaagcgtcgggtagttgtgaccggactgggcatgttgtctcctgtcggcaataccgtagagtctacctggaaagctctgcttgccggtcagagtggcatcagcctaatcgaccatttcgatactagcgcctatgcaacgaaatttgctggcttagtaaaggattttaactgtgaggacattatctcgcgcaaagaacagcgcaagatggatgccttcattcaatatggaattgtcgctggcgttcaggccatgcaggattctggccttgaaataacggaagagaacgcaacccgcattggtgccgcaattggctccgggattggcggcctcggactgatcgaagaaaaccacacatctcgatgaacggtggtccacgtaagatcagcccattcttcgttccgtcaacgattgtgaacatggtggcaggtcatctgactatcatgtatggcctgcgtggcccaagcatctctatcgcgaccgcctgtacttccggcgtgcacaacattggtcatgctgcgcgtattatcgcgtatggcgatgctgacgtgatggttgcaggtggcgcagagaaagccagtacgccactgggcgttggtggttttggcgcggcacgtgcattatctacccgcaatgataacccgcaagcggcgagccgcccgtgggataaagagcgtgatggcttcgtactgggcgatggtgccggtatgctggtactagaagagtacgaacacgcgaaaaaacgcggtgcgaaaatttacgctgaactcgtcggctttggtatgagcagcgatgcttatcatatgacgtcaccgccagaaaatggcgcaggcgcagctctggcaatggcaaatgctctgcgtgatgcaggcattgaagcgagtcagattggctacgttaacgcgcacggtacttctacgccggctggcgataaagctgaagcgcaggcggtgaaaaccatcttcggtgaagctgcaagccgtgtgttggtaagctccacgaaatctatgaccggtcacctgttaggtgcggcgggtgcagtagaatctatctactccatcctggcgctgcgcgatcaggctgttccgccaaccatcaacctggataacccggatgaaggttgcgatctggatttcgtaccgcatgaagcacgtcaggtcagcggaatggaatacacgctgtgtaactccttcggcttcggtggcactaatggttctttgatctttaaaaagatctaagttgtcattttccacccatataaaaggtccgcttgcgggccttttttcttagcttttattccgacttgttccgtagtgaacatgctgccacactaacaattctctgataaggagccggtatgttcttaattaacggttataagcaggaatcgctggcagtaagcgatcgggcaacgcagtttggtgatggttgttttaccaccgccagagttatcgacggtaaagtcagtttgttatcggcgcatatccagcgactacaggatgcttgtcagcggttgatgattttctgtgacttctggcctcagcttgaacaagagatgaaaacgctggcagcagaacagcaaaatggtgtgctgaaagtcgtgatcagtcgcggtagtggcgggcgagggtacagcacattgaacagtggaccggcaacgcggattctctccgttacggtttatcctgcacattacgaccgtttgcgtaacgaagggatgacgttggcgctaagcccggtgcggctggggcgcaatcctcatcttgcaggtattaaacatcttaatcggcttgagcaagtattgatccgctctcatcttgagcagacaaacgctgatgaggcgctggtccttgacagcgaagggtgggttacggaatgctgtgcggctaatttgttctggcggaagggcaatgtagtttatacgccgcgactggatcaggcaggtgttaacggcattatgcgacaattctgtatccgtttgctggcacaatcctcttatcagcttgtcgaagtgcaagcctctctggaagaggcgttgcaggcagatgagatggttatttgtaatgcgttaatgccagtgatgcccgtacgtgcctgtggcgatgtctccttttcgtcagcaacgttatatgaatatttagccccactttgtgagcgcccgaattagtcatgaaaaaagtgttattgattatcttgttattgctggtggtactgggtatcgccgctggtgtgggcgtctggaaggttcgccatcttgccgacagcaaattgcttatcaaagaagagacgatatttaccctgaagccagggaccggacgtctggcgctcggtgaacagctttatgccgataagatcatcaatcgtccacgggtttttcaatggctgctgcgtatcgaaccggatctttctcactttaaagccgggacttaccgctttacaccgcagatgaccgtgcgcgagatgctgaagttgctggaaagcggtaaagaagcacagttccctctgcgactggtagaagggatgcgtctgagcgattacctcaagcaattgcgtgaggccccgtatatcaagcatacgctgagcgacgataagtacgccaccgtagcgcaggcacttgaactggaaaacccggagtggattgaaggttggttctggccagacacctggatgtataccgccaataccaccgatgtcgcgttactcaagcgagcgcacaagaaaatggtgaaagcggtcgatagcgcctgggaagggcgtgcggacggtctgccttataaagataaaaatcagctggtgacgatggcatcaattatcgaaaaagaaaccgccgttgccagtgaacgcgatcaggttgcatcggtatttatcaaccgtttacgcattggtatgcgcctgcagaccgacccaaccgtgatttacgggatgggagagcgttataatggcaaactttctcgtgcagacctggaaacgccgacagcgtataacacctataccattaccggtttgccgccgggtgcgatagctacgccgggggcggattcgctgaaggctgctgcgcatccggcaaaaacgccgtatctctattttgtggccgatggtaaaggtggtcacacgtttaataccaatcttgccagccataacaagtctgtgcaggattatctgaaagtgcttaaggaaaaaaatgcgcagtaagtatatcgtcattgaggggctggaaggcgcaggcaaaactaccgcgcgtaatgtggtggttgagacgcttgagcaactgggtatccgcgacatggttttcactcgggaacctggcggtacgcaacttgccgaaaagttaagaagcctggtgctggatatcaaatcggtaggcgatgaagtcattaccgataaagccgaagttctgatgttttatgccgcgcgcgttcaactggtagaaacggtcatcaaaccagctctggctaacggcacctgggtgattggcgatcgccacgatctctccactcaggcgtatcagggcggaggacgtggtattgaccaacatatgctggcaacactgcgtgatgctgttctcggggattttcgccccgacttaacgctctatctcgatgttaccccggaagttggcttaaaacgcgcgcgtgcgcgcggcgagctggatcgtattgagcaagagtctttcgatttctttaatcgcacccgcgcccgctatctggaactggctgcacaagataaaagtattcataccattgatgccacccagccgctggaggccgtgatggatgcaatccgcactaccgtgacccactgggttaaggagttggacgcatgagatggtatccatggttacgacctgatttcgaaaaactggtagccagctatcaggccggaagaggtcaccatgcgctactcattcaggcgttaccgggcatgggcgatgatgctttaatctacgccctgagccgttatttactctgccaacaaccgcagggccacaaaagttgcggtcactgtcgtggatgtcagttgatgcaggctggcacgcatcccgattactacaccctggctcccgaaaaagggaaaaatatgctgggcattgatgcggtacgtgaggtcaccgaaaagctgaatgagcacgcacgcctaggtggtgcgaaagttgtctgggtaaccgatgctgccttactaaccgacgccgcggctaacgcattgctgaaaacgcttgaagagccaccagcagaaacctggtttttcctggctacccgcgagcctgaacgtttactggcaacattacgtagtcgttgtcggttacattaccttgcgccgccgccggaacagtacgccgtgacctggctttcacgcgaagtgacaatgtcacaggatgcattacttgccgcattgcgcttaagcgccggttcgcctggcgcggcactggcgttgtttcagggagataactggcaggctcgtgaaacattgtgtcaggcgttggcatatagcgtgccatcgggcgactggtattcgctgctagcggcccttaatcatgaacaagctccggcgcgtttacactggctggcaacgttgctgatggatgcgctaaaacgccatcatggtgctgcgcaggtgaccaatgttgatgtgccgggcctggtcgccgaactggcaaaccatcttnnnnnnnnnngcaggctatactgggggatgtttgccacattcgtgaacagttaatgtctgttacaggcatcaaccgcgagcttctcatcaccgatcttttactgcgtattgagcattacctgcaaccgggcgttgtgctaccggttcctcatctttaagagagacatcatgtttttagtcgactcacactgccatctcgatggtctggattatgaatctttgcataaggacgtggatgacgttctggcgaaagccgccgcacgcgatgtgaaattttgtctggcagtcgccacaacgttaccgggttatttacacatgcgggatctggtaggcgaacgtgacaacgtcgtattttcttgtggcgtgcatccactcaaccagaatgatccctacgatgtagaagatttacgccgtctggcggcagaagagggtgtggttgcgctgggtgaaactgggctggattattattacacgccggaaactaaagtacgtcagcaagagtccttcatccatcatatccagattggtcgtgaactgaacaagccggttatcgtccatacccgtgacgcccgcgccgatacgctggcaattctgcgcgaagaaaaagtgacggattgcggtggcgtactacactgttttacagaggacagagaaacggcgggtaaattactggatctcggattttacatctccttttccggcattgtgaccttccgtaatgcggagcaactgcgcgatgctgcgcgttatgtccccctggatcgattactggtggaaactgactcaccttaccttgcgccggtaccgcatcgaggaaaagagaatcaacctgcgatggttcgtgacgttgcagaatacatggctgtgttgaaaggtgttgccgttgaagaactggcgcaggtaaccaccgataacttcgcccgtctgtttcacatcgacgcttcccgccttcaatccatccgttgaatgagtttttttaaagctcgtaattaatggctaaaacgagtaaagttcaccgccgaaaattgggcggtgaataaccgcgtttgaaatattgtgacatatgttttgtcaaaatgtgcaacttctccaatgatctgaagttgaaacgtgatagccgtcaaacaaattggcactgaattattttactctgtgtaataaataaagggcgcttagatgccctgtacacggcgaggctctccccccttgccacgcgtgagaacgtaaaaaaagcacccatactcaggagcactctcaattatgtttaagaatgcatttgctaacctgcaaaaggtcggtaaatcgctgatgctgccggtatccgtactgcctatcgcaggtattctgctgggcgtcggttccgcgaatttcagctggctgcccgccgttgtatcgcatgttatggcagaagcaggcggttccgtctttgcaaacatgccactgatttttgcgatcggtgtcgccctcggctttaccaataacgatggcgtatccgcgctggccgcagttgttgcctatggcatcatggttaaaaccatggccgtggttgcgccactggtactgcatttacctgctgaagaaatcgcctctaaacacctggcggatactggcgtactcggagggattatctccggtgcgatcgcagcgtacatgtttaaccgtttctaccgtattaagctgcctgagtatcttggcttctttgccggtaaacgctttgtgccgatcatttctggcctggctgccatctttactggcgttgtgctgtccttcatttggccgccgattggttctgcaatccagaccttctctcagtgggctgcttaccagaacccggtagttgcgtttggcatttacggtttcatcgaacgttgcctggtaccgtttggtctgcaccacatctggaacgtacctttccagatgcagattggtgaatacaccaacgcagcaggtcaggttttccacggcgacattccgcgttatatggcgggtgacccgactgcgggtaaactgtctggtggcttcctgttcaaaatgtacggtctgccagctgccgcaattgctatctggcactctgctaaaccagaaaaccgcgcgaaagtgggcggtattatgatttccgcggcgctgacctcgttcctgaccggtatcaccgagccgatcgagttctccttcatgttcgttgcgccgatcctgtacatcatccacgcgattctggcaggcctggcattcctaatctgtattcttctggggatgcgtgacggtacgtcgttctcgcacggtctgatcgacttcatcgttctgtctggtaacagcagcaaactgtggctgttcccgatcgtcggtatcggttatgcgattgtttactacaccatcttccgcgtgctgattaaagcactggatctgaaaacgccgggtcgtgaagacgcgactgaagatgcaaaagcgacaggtaccagcgaaatggcaccggctctggttgctgcatttggtggtaaagaaaacattactaacctcgacgcatgtattacccgtctgcgcgtcagcgttgctgatgtgtctaaagtggatcaggccggcctgaagaaactgggcgcagcgggcgtagtggttgctggttctggtgttcaggcgattttcggtactaaatccgataacctgaaaaccgagatggatgagtacatccgtaaccactaatccgtaagacgttggggagactaaggcagccagatggctgccttttttacaggtgttattcagaattgatacgtgctggtaatgctgaaattacgcggtgtgccgtagacgatagaaccttccacgttggtatcgtaggttttgtcgaacaggttattgacgttcccctgtaacgagaagtttttcgtcacctggtagcgggtgaagagatccaccagcgcgtagctaccttgctcggcgcggaaggtgccatacggtgtcacggtgtcggtatacacgcgattttgccagttaacaccaccgccgactgtcaactctggcatgacaggcaaccgatagctggtgaacattttaaccgtggtgcgtggcagattaggattaacggcgtttccttcgttatcctctgcaatatagcgcgttgcgccaaatgtcagctgccagttgtcggtaattgcgccgttgagttcaaattccacccctttactgactgtcccatccaccgctttataggcggtttcgccgttgctgccggggataggtgtaccggtggactgagcgacattatcctgctcaatacggaagatggctaacgtggtggtcagacggctattcatccagtccgatttcagacccagctcgtagttgttaccggtgattggagccagatatttgcctgaactgtcacgatcattttgcggctggaaaatagaggtatagctggcgtaggtcgaccagttgtcattgatgtcaaacaccagaccagcgtaaggcgtggtgtggtttttctccatgctgtaagtcagcgtatcaacccgccagttggtataacgtgcgccgaggatcagatgcagcggatcggcaagggtgactcgagtggcagcatataacgatttcatatgtgtggtatcgtcctgtgccaggctctgtggtgaccagtcggtttgtgggaaattgccattaaagttgtagaaactgccaatttcatccgggaagatgttggcccatgaactgaagtaacgattgttttgtttgctgtaactgccaccaaacattagattgtgctgacgaccaaacaattcataaataccgtcagcgaacaaatccagcgcatcaactttacgtttgccactgttccaaccggtgccgccgacataatcaaagccaggtccataattactgtatggcccaaccagcataccatccgctttgtttacataggcatcgacatacatcattttgctgtcaaattcgacttcagagtgggtggcattcagtgtcgcttgccaggtatcagcaaaccgctgcttcagggtcataaagaccttgttgatctctttatcgttgtacgcccagtcaggtgcggtactgcgtgcacgatcgtaactgttgctgctgccatcagtattccagcgcggtaaaccgccccaggtagggctattaacatcaatgcgctgatattcgtaaccggctgaaagcgtcgtaagatcgcctaaatcagcatcgacaatgcccgagaagaaggtcttttcactgttgtagcggtccagccatgagtcgttattctggtagccgccgacaattcgcgcgcggattttaccgtcttcggtgagtgggctttgtaaatccgccacataccgttctttgttccagctaccgtattccgccgagacatcgcctttaaattcacgactggtcgcgtgttttcgaaccatattaattgccgcagatggattacccgtcccggtcatgagtcctgtcgcgccacgcactacttctacgcgttcaaacagtgccatatcagaaagtgcgtcgcccagattccagcgcgattcaaaataggtggggataccatcaaccatatagttatcgatctggaatccgcgggaataataaagagcacgatcggaatccgcctgacttttgctgatccccagcgtgttttccatcacttcgcccagcgtttgtaactgctgatcttccatccgctgctggctaacaatagtgaccgactgaggaatatcacgttgagtcatctgcattttggtacccgcagaggtagacgttacgctgtaatcattttcgccatcatctggagctgtggctgaaccctcaacaatcaccgtttcttcagtggctggtgcagcaaaagcggcagaaggtaatagtgccaatgctatgcaaccggcaagtagtgagggtttggtgatggcttgatattgattatccctgttaaattgtgttgaaagcatttgaaatctcttggtttatgttgtcgtcaggctcatgccggaggagggtgatgagcggttatatttagtgtgcgaataattttgcttgtaaatgcaaatgagaaatatacgtattcatatttgtcgtgtaaaccaaacagagaatgtcttttcagcgcattcgcaggcagaaatgggaataatggcgatatatacggcagcaaaacgattttttgcttaagaaatcgtgagttaaggttgaaagagcaggtttaactcgaccatactctatactcgcagtgtggcgcggcgtagcatggcgcaacgcatggctatttgaaaaaggaaaatgtcgtggcagaagaaactatattcagcaaaattattcgtcgtgagatcccctccgatatcgtctaccaggatgatctggtaacggcgtttcgcgatatttcgccgcaagcgccaacgcatattctgatcattccgaatatcctcattccgactgtgaacgacgtgtcagctgagcatgagcaggcgctgggacgcatgatcaccgtagcggcaaaaattgctgagcaagaaggtattgccgaagatggctatcgtctgatcatgaataccaaccgccatggcggacaagaggtttaccacatccatatgcacttgttgggtggccgtccgctgggaccaatgctggcgcataaaggtctgtaacgatgagaaaaggatgctttgggctggtgtctctggcgttgttactgctggtgggctgtcgttcacatccggaaattccggtgaatgatgagcaatcgctggtgatggagtcatctttattggctgcgggcatcagtgcagaaaagcccgtcctttcgacgtctgatattcaaccttcagcatcctcaacgctttataacgaaaggcaagaacccattaccgttcattatcgtttttactggtatgacgccagagggctggagatgcatcctctggaaaggccacgcagcgttaccattcccgcacattctgcggtaacgctgtacggcagcgccaattttctgggggcgcacaaagtcagactttatctatatttgtaaggggtgaatcttgatgacaaaaatgagtcgctacgccttgattaccgcgctggcgatgtttctcgccgggtgtgtggggcaacgtgaacctgcaccggtagaagaagtgaaaccagcgccggaacaaccagccgagccacaacagcctgtccccacagtgccctcggtgccgacgatcccgcagcagccaggcccaattgagcacgaagatcaaactgcaccgcctgcgccgcatattcgccattatgactggaatggcgcaatgcagccgatggtcagtaagatgcttggggctgacggggtgactgcgggtagcgtcctgctggttgatagcgttaacaaccgtactaacggttcgctgaatgccgcagaagcgaccgaaacgctgcgaaatgcgctggctaataacggtaaatttaccctggtttccgcccagcagctgtcgatggctaagcaacagttaggtttgtcgccgcaggacagtttaggtacccgtagtaaagccataggcattgcccgcaatgtcggcgctcattacgtgctatactccagcgcctctggcaacgttaacgctccgaccctacaaatgcagctgatgctggtgcagacgggcgaaattatctggtcaggtaaaggtgccgtttcgcagcaataatcccatcacgcgcgacgaattgctgtcgcgctttttcccgcagtttcatcccgtcacgacgtttaatagtgggcttagtggcgggagttttctcattgaacaccagggccagcgttttgttgtgcgtcagccgcacgatcctgatgcgccgcagtccgcgttcttgcgccagtatcgggctttatcacaactacccgcatgcattgcaccgaagccgcatttatatctccgtgactggatggtagtcgactatctgcccggcgcggtaaaaacgtatttgccggataccaacgaactggcaggcttgctgtattatctacatcaacaaccacgttttggctggcgaataacgctgttgccgttactggaactgtactggcagcaaagcgatccggcgcggcggacagtgggttggctgcgaatgttaaaacgtctgcgcaaagcgcgggaaccacggcctttacgcttaagtccattgcatatggatgtccacgccggaaatttagtgcatagcgcgtcagggttaaaactcatcgactgggagtatgcaggagatggtgatatcgcgctggaactggcggcggtgtgggtggaaaatactgaacagcaccggcaattggtcaatgactatgccactcgcgcgaagatttatccggcgcaattatggcgtcaggtcaggcgatggtttccctggctgctgatgctcaaagcagggtggtttgagtaccgctggcgacaaaccggcgatcaacaatttatcaggctggccgatgacacctggcggcagctattaataaaacaataaggagagcagtgtgggtccagtaatgttggatgtcaaaggttacgaactggacgcggaagagcgtgaaatacttgcgcatccgctggtgggagggctgattctctttacgcgtaactatcatgatcctgcccagttacgtgaactggtgcgccagatccgcgcagcttcgcgcaatcatctggtggtggcggtagatcaggaaggtggacgcgtgcagcgttttcgtgaaggttttacccgcttgccagcggcgcaatcattcgctgcgctgtcaggaatggaagagggcggcaaactggcgcaagaggcgggttggctgatggccagcgaaatgatcgctatggatattgatatcagctttgcgccagtgctggatgtcgggcatatcagcgcggcgattggcgagcgttcttatcatgccgatccacaaaaagccctggcaattgccagccggtttattgatggtatgcatgaagccggaatgaaaacgaccgggaaacacttcccaggacacggtgcagtaacggcagactcacacaaagaaacaccgtgcgatccacgtccacaagcggagattcgcgctaaagatatgtcggtcttcagttccttaatccgcgaaaataaactcgacgccattatgcctgcgcatgtgatctacagtgatgttgattcgcgtccggcgagcggttctccctactggctgaaaaccgttttgcgtcaggaactgggttttgacggcgtgattttctctgacgatttatcgatggaaggtgccgcgattatgggcagttatgccgaacgcgggcaggcatcactggatgcgggttgcgatatgatcctggtctgcaataatcgtaaaggggccgtcagcgtgttagataatctgtcaccgatcaaggcagaacgtgttacacgtttgtatcataaaggttcattttcgcgacaggaactgatggactcggctcgctggaaagcgatcagcacccgtcnnnnnnnnnntcagttacacgaacgctggcaggaagagaaagcaggtcactaaccctggcttatgtgaggaagcgatgattatctatttacacggttttgactctaacagtccgggtaaccacgagaaagtcttacaattgcagtttattgacccggatgtacgcttgataagctacagtacgcggcatccgaaacatgatatgcagcatctgcttaaagaagtggacaaaatgttgcaactgaacgttgacgagcgtccgctaatttgcggcgttggcctgggcggatactgggcggaacggattggttttctttgcgatatccgccaggtgatcttcaaccctaatttgttcccttatgagaacatggaaggcaagattgatcgcccggaagagtatgccgatattgccactaagtgtgtgaccaacttccgcgagaagaatcgcgatcgttgtctggttattttgtcgcgtaatgatgaagcacttaacagccagcggacatctgaagagttgcatcattattacgagattgtctgggacgaagagcagacgcacaaattcaagaatatctccccgcatttacagcgcattaaagcgttcaaaaccctcgggtaaatgccctcgtcgcatcaggtaaccttaccggtacctgatgcgctccgaattctgtaagtcggataaggcgtccacgccgcatccgacagtcgagcatcaatgcctgatgcgatgctgcgcatcttatcaggacgaccaaacgccctcgatatacgcttcaccctatattactcttccgaatttgctcaaataataaacaataaactctattttttgatctcacccggtaaagtcgcctatcttttcagcaacaaaacttgattaacatcaattttggtatgaccaatgcaccattcatgttattctcaatagcgaagaacattttcattgctgtaacctgttgttaattaagagctatgttaataaccattaattaacaattggttaataaatttaagggggtcacgttgactacgccattgaaaaagattgtgattgtcggcggcggtgctggtgggctggaaatggcaacacagctggggcataagctgggacgtaagaaaaaagccaaaattacgctggtcgatcgtaaccacagccacctgtggaaaccgctgctgcacgaagtggcgactggctcgcttgatgaaggcgtcgatgcgttgagctatctggcccatgcgcgcaatcatggtttccagttccagctgggttccgtcattgatattgatcgtgaagcgaaaacaatcactattgcagaactgcgcgatgagaaaggtgaactgctggttccggaacgtaaaatcgcctatgacaccctggtaatggcgctgggtagcacctctaacgatttcaatacgccaggtgtcaaagagaactgcattttcctcgataacccgcaccaggcgcgtcgctttcaccaggagatgctgaatctcttcctgaaatactccgccaacctgggcgcaaatggcaaagtgaacattgcgattgtcggcggcggcgcgacgggtgtagaactctccgctgaattgcacaacgcggtcaagcaactgcacagctacggttacaaaggcctgaccaacgaagccctgaacgtaacgctggtagaagcgggagaacgtattttgcctgcattaccgccacgtatctctgctgcggcccacaacgagctaacgaaacttggcgttcgcgtgctgacgcaaaccatggtcaccagtgctgatgaaggcggcctgcacactaaagatggcgaatatattgaggctgatctgatggtgtgggcagccgggatcaaagcgccagacttcctgaaagctatcggtggtcttgaaactaaccgtatcaaccagctggtggtggaaccgacgctgcaaaccacccgcgatccagacatttacgctattggcgactgcgcgtcatgcccgcgtccggaagggggctttgttccgccgcgtgctcaggctgcacaccagatggcgacttgcgcaatgaacaacatactggcgcagatgaacggtaagccgctgaaaaattatcagtataaagatcatggttcgctggtatcgctgtcgaacttctccaccgtcggtagcctgatgggtaacctgacgcgcggctcaatgatgattgaaggacgaattgcgcgctttgtatatatctcgctataccgaatgcatcagattgcgctgcatggttactttaaaaccggattaatgatgctggtggggagtattaaccgcgttatccgtccgcgtttgaagttgcattaatcgacgtacactggcggatgtggcataaacgcctcatccgccctggacaaatggtacgagcggtaggcctgataagacgcgttaagcgtcgcatcaggcattccttcagactcctccgaatccttaagtatttccagccattcccgcgcttttcatcttctgtctgatagctgcttttctccttcgcttgcatgattggcataactgcaaagaaggaggtgttcccgtgaataaatcaatgttggcgggtatcgggattggtgtcgcagctgcgctgggcgtagcggcagtggccagtctgaacgtgtttgaacggggcccgcaatacgctcaggttgtttctgcaaccccaatcaaggaaacggttaaaacaccgcgtcaggagtgtcgcaacgtcacagtgacccatcgtcgaccggtgcaggatgaaaatcgcattaccgggtcggtgctcggcgctgttgctggcggcgtgatagggcatcagtttggtggtggtcgtggtaaagatgtcgccactgttgtgggggcgctgggtggtggatatgccggtaaccagatccagggctctctccaggaaagcgatacttacacgactacgcaacagcgttgtaaaacggtgtatgacaagtcagaaaaaatgctcggttatgatgtgacctataagattggcgatcagcagggcaaaatccgcatggaccgcgatccgggtacgcagatcccgctagatagtaatgggcaactgattttgaataacaaagtataacaaggctgtactctgcaatttggcccctcattcgctcaggctgaggggctttttttgcgacttatttcaccagttcgggccataaacgcaaagtcgttccggcaatctgcattagtttttccagcgatgcaccttcgcgtgcgctgatcgacatcccctgaataatacaattaaggaattctgccagatgtgtcacgtcacagtgggtcgggatttccccgcgcgcttgtcgttgacataaaaactgctgcaaagtgcgctcttgcatcgcatggcgtgatttcaacgtattggcgatatctcctgaatctggggagagggtggtgcagttgttgatcatgaagcagcctgccggggtgtctttgctggtaaagcagttggcgatggcagcaaaatagtcagccagcgcagactccacgcttttctcttcacaaaacagctgtgcttcatgcttagcggcaaaacgatcgatatagcggtcgagaacggcacgaaataacccctctttgttggtaaattccgcgtatagcgtgggcgctttggctccggtcgcttcgacgaggtccgcaagagaagtcgcttcataaccgtgttgccagaacaatttcatggccttatcaagcgcggcatccctgtcgaacacttttgggcggccacggcttttttttacacattgtgttgagtcagttgccatgatgccgttgtacctggtgactgtgaatgaaaggttattataaaaataatcacctccgttcaccagtccag

SEQ ID NO: 179 - DNA, 44826 bp, Escherichia coli
  source 1..44826: mol_type = genomic DNA
caaataatacatggctgattatacggaaataaataatttcccaccggaattaagtagcagcggtgacaagtattttcatctacgtaactattcggaatattcagaatatactagcggtttttttttgagtttgatgatttttatcaaatcatgacttttttcctgaaaagtcagtagatattcataggcaagtaaggttttatactttgctgacaggattcaggcctgtctcagactgacatggatgtaatgaacaaaagggaatggctatggaaaatgagcatcaatacagtggtgcccgatgttcagggcaagccgcatatgttgctaaacgtcaggagtgcgcaaaatgatgcgccaatcacttcaggctgttttacctgaaatttcaggcaataaaacgtcattgctgcgtaaatcggtatgcagcgatatcctcactctttttaattctcctcattcggcattaccgtcattacttgtttcaggcatgccagagtggcaagtgcataaccagagcgacaaacatctccagagctggtattgccgtcagctgcgttctgcactgttatttcatgagccacggattgcggcgttgcaggttaattttaaagaagcgtactgccacattctggcgatcagccttgagataatgctgtaccacgacggtgaaccgctaacgtttgatctggtctgggataatggcggttggtgtagtgcgatgctggagaatgtcagctaagcacaatctccagctcgcgcagttcacgccagaagcgttcggcaacgggattcatgcgggtattcattcggtatgcataggcctgaatcgggatcaccagttcgtcccgattcagtacaacgagcttcccgctgcgaatttcttgttggatggcgtactccggcagccaggcaatcccacagccgtcgagggcaacctgctttaaaagctcgctcatcgaagagacaaaaaaggtgctgaaacttaactcactgtggcgcgtcagggtgcgattaatcaatcgccccatgtaggagttgcggctgtaattcagtaacggaaagtgtggctgcgcgaggttaaaaagtgcttctccgtgttcgtcactggcgcagacagggaacaattgagattcaaataagcgaatgtggtcaaacggcgcttccagcaaatcttcgtcgtgaaaggaaaaaatacagtcactttgcccttcacgcagtttatcgaccgcttcatcgacatcaatagcttcaattgcccaggtaaagagcggcggcatctggctgataatggacggtaacagcccgaggaaaagagagtgtgcagcggctatcttgatttttcgttgcgcgtaatcgctgccgccacgcagctctgccagattgctctctaactgttgcaacagatggcggatctgcgaatggaagattttcccttgttctgagagttgcagcggcgttacctggcggttaaacaattcaacaccaatcgcctgttccagcgcacggatgcggcggctgaatgccggttgcgagacgttgcgactgactgccgcctgggaaaaattgcggcatttttccagggtcagaaaatcataaagccatttggtttcaatattatgcaaaatcgcaccacagtcatccattacgttttactctgtcagccgcccttgcgggcattctacgtccattcgggcggctgacaaccgtttaagccgtttcaaacgttcctttcacgcaggctttgccgtctttgaccatcagtttgccgcgagcgtatacctgctcaatgcgcagttctggcgtcatgaccagcaagtcagcatcattgcctggcagaatttcgcctttcccggtcaggttaaggaaaccggctacgctactggtgagcgggcgcagggcatcgctgatactgaaatcatagtctttgaccagcacctgcacggtttccagcaacgtttcaaaaccggcaacaccgatatgggttaaattcccttcgtcatcgaagaacggctggctaccgttgccgtcggagctgagggtgacgcgtgccagcggaatacccgcctgaacggcgcgggcaataccttcggcaggggcgaccggttcgtcaatgctgctggtgatatcgatagtgccgcctttgcgcgcgaactccagcgcctgctcaaacaacggaacgttgcggttaacgtgggtcggcagcaacttgctgatcggcacatcgcagttttccagcaggtcatagacaggctgtaacgcctttttgctgtcgcccatgtggaacacggtgacgccaggtttaccgccgagcaaaccgccaacgcgggattccgccgccatattagccaggtgataaacgtccggtgcggcagaacggtgatcagagatggcgcatttcacgccaatcacacgatcgataatcgccacgtctttttccacggaacctgtaatggtgcgggaagggacatgataagcgccggtcagcatccaggcgctgatgccttcttcattgagcgcacgggtcttggcgagcagggattccgggtggcgagagatagagtcggtgcccagcagaccaaccactgacgtgacgcccgcttccgtcaggcgacttagcgccacttctggcgtgcgcgtcgtgggacctgcttcgccgccaccaccaatcaaatggacgtgttgatcaataaaaccaggacagaggatctgcccgctgagatcgacaaccgtgcagtccggtacaatgtcagaagggatattgctggcaacggcgataattttgccgttagcgacgaggacatcgcaaattccccgatcttccggcgcatacaaatgcgctccctgcagcagggtaaaaccggctgcggtataatcaatcatgataactccttgttaaacaataagctgcataacccagatcgacagcaatgcgttaatcacgcagaccgtaatgatatgcgggtaatatttggcattcacttcggctgtccccaggcagcgaccgacattttgcaccgggttgcccattaaatacatcgcgggcagtaaaacggtgacatcgtgaccggttaatgcgccggcggtcgccagactggcggcaacaccgactgcgccgcccatactcattaatgcggctaaaaggacggttgccgcttcaccgggtaatccccacagcgccattacgggttcacagatatgccccacccagtcgagcaggccggtaattttcagcgcctgaatgatgacaaacgccatcaccacgtttggcagtaggttggtcgtggcgatagtaaagccacggcgcgcgccatcgataaacatatccatgacgtttttgtggacctgagttgtcatgcttgcgctccttgcgttgggttgcgacgttcttcgaagttaagccagacgcgcaaaatgttggctccgacaaatttaaacaccaggatgacggctaaaggtacgattacggacgtgcccagaaaggcaaacaccgcgacgccggaagagaagtagttggtgatgatggcgctaccgctggtttgatatgcggcgaaaatcactttatcgcgttcggtaatttcaccttcctgcgccagctctttggtcataccggcggcggcatcagtgttttgcaggttagcgatcagcgccagcgagcagatccctggaatgcccaacaacggttttagcacaggtgtcattaactgctgcgcggcgcgtaatccaccaagaccatcggtaattgaaataatccccagagagagaatgactgacggtgccagctccagcgcaaagagaaagccatctttagcccccgcgccacccgccccgcgaaatgaggtggtggctccgttcgcaccaggcagttgcccaaacgatccgttcagaacggaaaaatcaaaaacgcgccaccagctgtctgttccggaaaaaacaccggaaaaaaagattatggtgagaaaaaaagccagataccctttaatgcccactttttctgtcgccagctccccggctacagcatccccttgttgtgtcataacaatccccattgtttttttgtgtttgtgtgttgcttgagccaggaaaattcctggagcggaaaaaccttatcagccatgtgggtatggggaaaatgcaagtatgtttctggctatgcgttttttgcatagcggaaaaattatgctgtgtggaaaaggctctgcgcaggattgagttgcagaaaattcataaacccagtgacaatgacatcagtaaataaaaacagaaaatccagggacgaaaacgagatagcaaagtacaacgaaaaagagctggcggatacgagcaagtttttaagttttgtcctccgacacaaaccggaggcgattggtatcgtacttgaccgtgaaggatgggcggatatcgataagcttatactctgtgcccaaaaagcgggcaagcggttaacccgtgcattgctggataccgtggtcgctaccagtgataaaaaacgttttagttattccagtgatggtaggtgcatccgcgcggttcaggggcattcgacttcgcaggtcgccatttcctttgccgaaaaaacaccgccacagtttctctaccacggtacggcaagccgtttccttgacgagataaaaaaacaggggctgattgcaggggagcgtcattacgtacatctctctgctgatgaagcaacggcacgcaaagtgggagcaagacacggatcgccggttatcttaaccgtcaaagcacaggaaatggcgaaacgaggcatccctttctggcaagcggaaaacggggtctggctgacatcaacggttgctgttgagtttcttgagtggtaagggaaacactcctcatgaagtgaccacttgcagcttaaataattgtactgtgctgataagcgcagcaataaacaacgccgccgcgccgcagagagtggcgccggcaagcgccgatgttccattgccgagcatactggtcagcgccgggccgaggatttgtccaatgccgtaaatgagcgtcacaaagcctaaaagattgagatttcccggaacgctcagttggcgggcgatagtcatcaccagagatgtcgtgcccataaaggtaccgccaaaaccgatactactaatgataagcaagagaggagagtcgctggcgagagtaagcagcacactgatagcctgcaccagcaaattcgccgtcaggcaaggcaaagccccccaacgttttgctgcccatagccagccaaagcagcctggcacaattgataagccgactaacgtccagagatgggcggttaacaatggtgagcctgcatctttcgccatgagcggcaggtaagtcgcgacgatgatataaccaaatcccgcaaggccgtacagaatagccagtaaccaccagctcattatctgttgctccgtttttgccaatggcattggtgcgatggcgtgttttttcgagggcattaaaagcgtaagtgcaatcagcatcatgccagaaagcgccccggcgccttgccataacgtttgcgaggagaaggcaaaatgcaggcctgccagaacatattcgttgcccagtgcaatgccaatgccaacgccagaaaacaaagctgccagcacaaaaggatggcgcgtgtgctgcataatcagcgtcgaaccaaaaatcagcataccggcgctggcgacacccgccaggaagcgaatcaataacaccagaataaatggcggcaaccatgccattgcgaggatcaacaacccgctcgccagggcagaaaccaacagtaatgggcgcaggcgcgacggctggtgaaatgcgccaaacgaaaatagcagactgccagccagataccccgcatagttgccgctggcaatccacgagagctggctaaatgaaaacgccccttccgccatcatgacgggcaacataggcgtataaaggaagcgacctaatcccatacctaaggtcagaaccagcatcccgaaaagcgcggtgctgaaagaaaagcgttctacgggatgcgaggacgaaggcatgtttaaccttgtatgtcatttttgttgttaacaagttaataacaaaaaggtgaaatatgccagcctgttaatgcgatgatttaggggtaaagcgataaaaacgatttggttcgctaacgatataaatattaccagaggcatccatcgcaatcccttcggcctgtttgatgttatgcgacaaacctcgactacctttggttagtgatatttcaccgataacctcgccaaccagggttacttcctggagtgcgcgagattcatgagacagcaccagaagcgtatttttttgctggttaaattctgcgccggacacatcatctaaagtaaattgccgttgtagtgcctcgtctttgctgatgtgtaattcattgctacttaacagcccgttaactttgtagacctcaatcggatttttctctttaaaaaaccagaaagtgtgatcctggcgagaataagccaacccttcaaaaccgcaattggttggggagtcttgcagcgggatttttatttttttgaggatttttacttccgagtttggggtcagtgaaatcacataaatggcgtaatcgcgctcatcgctaatgacaaactgattatcgccaatgtattcgatcgtctcgagatccttaacaaaatccagaggaattgtgcggataaaatcaccattggtggtcatttcaacaatggcggcaggtttgttgatagtgctaaaaagagtattgctttgtgccgaccaggtcagcgaagagatattattcgttatgcctgcaatttctttgccgtcaatggtggcgtggtaattctgaaatgatgctgcatgattgcttttacgggcgcaagattgcacgaagaaagtacacactgccacaatggcaaaaagaatcacaataacggagatgcgtttacttaacgaaatactttttgtcacggtaatccctttaaggcaaatcaataagatatcgagaagtatacgtagcgaccttaatgaatccttaacgcggagaaacccggtaatgtgcaatgcagcgccagacaccatcctgctgacaataaattgactcagtcagcccagggatcacccattgtatttcctcgccggggggacaggtcagccaaatgcataacccgcagccgccgcgtaaatcacggggaatatcgctgacgcgaaaagtcatgcccgctgcctgcaacgctttgcgggtttgtatgacgccgactgtggagtgaaataaaaataaaaactctttcatcggcgtgtcctcactcgttgaccaattaccgccgcgccaattgcgccagcaaattgcgcatcaggatgggtatttaccggcattcccagatgagattccagcatccgggcaaacgtctggcaatgactaacgccaccagtaaacagaatcggcgcttcacaggagagacgagcaatgaaattggcactcctccgcgccatcgcgttaatcactccggcgagaatcgcttctggcgcgacgcccgctgagcgcaggctgatcacttctgattcggcaaacactgtgcacatactcgtgatggcgtgcggcgtgacattttcggtaatgctgtcgagttgctcgacgctggtgccaagcgtgcgcgagatcacctccaggaaacgcccggtgcccgccgcgcatttgtcattcatcaggaaatcgcacaggttaccgtcatcatcaagctgaatcactttgctgtcctgaccaccgatgtcgattaccgcgcgcgttgctggcgcaagaaaccgtgcgcccagcccatgacaggagatttccgtcacttgtttatcggcaaaatccaccagttgccgtccatagccggtgagcgtcagaaacggcgttgtctctaacccttcgcgcagagtttcccaggcttcagtaattgctgttgccggacgaaagggtgttggaacgaggaaacggcgcgtaatcacgccgtctgccagtaagatccctttggtggcggtagaaccagaatcaatgccaatcgaatatgtcactgccactccttacagcatctcaataaaggccgcgacacgggtactgagctgcccgacatctgaggtggaatagtctgtttcaatagcgatataaggaatgttgtgctgctgacgcacatgacgtttaatcgccagcgattccaccgcgtaggtatggcacgcctgcaaaatcacatcaactacgccatcgacctgatattcttccaccatctggctgagcatttgcaggcgctgatcgttcggcgaaacacaggagcagccaatcgccagatatttatccgccagcgcgtcgtagacatcgcccgtttccgccacgcattgctcggtcgctttcgccccagtgcagttttcataaccgacaacccagccgccattctcttcaattgcccgcaccactttttctgctgcgccgccaatcgggcagccggtgattaaaatgcgtggacgcgggtccagtcgctggccttcttcccactgctgacgaacgcgggcggtcattgcatccagttcattgatcaacgcctctttatcgaaccggaaggttgcgccgtagaccactttcagaatgtcgctgccgctaagcggcggaggatttaactgcccaagatgataaaaattggccagtgcgcgacgttcgcggtttttcagcgcaatggcatcgcgcagagcatcttcgctaatctcgtgcccaaaacgttcttctaccgttttttgcaagcgcagcatctcggctttccataacgcacgcgaggcatcgtccttaacgctgttcggcaactgcatcacatgaacgggcttaaactccgccatgtattcatacattttctttttgccgtcgcaggtggtttcaccgaccaccagatccgaaaagtagaagtaggggcatttatcggttttgccgaagccgtagctgcttttaatcagcgggcagaggttgcgcggcagatctttctccgcttcttcaatggtttcatcagaggtagaacagagcgaaaccacaaccgcaccggctgccatcgggatctcttgcggcataaaggtgcagtaagtgccaaccagcggaatgccgcgctccttgagatccatgacggtgagaaagcctttctggcgagcttcagagaactgatcgaaaatggcgggtagatcggtgataagtgacattattttccttccccgtaccacgggagataatgaaaagaggccacattattaccattcttttagtgtggtttatttgatctctctcgcggttagccacttagtttttcatggatttctaaaaattgctgagggggaacaaggccgggagctgcgacaacaaatataaaattagcccaatacaaccgccaaccagcgtaccgttgacacggataaactgcagatctttgccgatatttaactcgatttgccgcgacatatcccgcgcatcccagctttttactgtatcgctgatgtggcgcgtcaggaatgcggaaaactcaggcgcgacgcggtgcgcggcttgttccaggtgaccatttaacgatgcccgcaaggcatcatcggcaattaacgtttcgccaaaccattgacccgcccgcgcgatacgttctttcacacgagaatcttcactgttgatatccgctttcagccattcccgtaaatccccccacaattcactgagatagcggttaaaagcttcatcttctttcagataactttttacggcatcggctcgcgctgccatttccggatcgtttttcaacttgtcgatcagggcaaaagtggcgcgatcaaacgcatgacggatctgatgcgcacgatcacggctgatatcatcaagcaaagaattcaccgcgtcagaaaccaactccgcgctatgttcgcccaaccattcggtggggagaattttggctttcagtggatgctcactctccagccagcgaacaatctgctgggcaataaacttgcgcgatttatcgcgctggagaagggcgatcaactgtgcgatcagcgtatcgagcagcacctgatgacgatcgtttttggtcatactctccagcatcaacgcactggttccggaaagatcgaccttatcaatcgcccgatggaccgcgcgcttaagcaggcgctgaatacgtgcatcatcggtcagttcaagaaaaccgctcatgatctgcaacagatgctgaccaacgcggcgggcgttctccggctgactaaaccagttgccaatcaacaacgccggttcgtgacgtcgaatcaatgccaccagcgacagggtatcgagaaatttttcctgcacgaactggccgagattttcgccaatccggtctttattacgcgggataatcgccgtatgacgagaaatgatcggaatcggcacgcggcgaaacagcgccaccaccgcaaaccagtccgccagcgcgccgaccatcgccgcttcagcaatcgccttcacgccgctcacccaaaaattgggcggcaaaaacagcgtaacgacaaaggtagcagcggcgataagcagtaaagagagcgccaacattttggcgcgtctgagttcaatgagtttattcataacgttaagaatagagcctgacggcaggatcgcgcaaaaatcaccgctcctccgccagctcggcagcctgatgttggcgcacgcgattgagcaatcccgccagggtgaaaacgacgataacgcccgccacgacggctaacagatgaaacggcaagcgaccgccgttaaaccacagccagcggccgatttcgaccgagacagacatcaccatcaggatcaccatattcagcgatgcggagacggtccctttcggtaagttattggaaaaaagcgtaaagcggaataaagtcgggaagatcaaaccaatcccgaaagcatacaaactggtgcccagcaccgaccacagccagacgtgcggtgacagcagattgccgataatcaacagcgcgaggccgaccagttgaatgggtacagcacgccagataaagcgcggttcggtcggatctttaacgaaacgcgccacgatggcattcgcgacaatcaccgcgccgaacaccggaacctgtgtccaggcgaactgcgaagttgttaagccgcccgcgtcgatcaggatcaccggcgagacagccacccaactcatcattgggatatagcttaaagagatggttgctgcgccaaagaggaacagccgattgcaaaagacattacgaaaatcgcgaaagacgcttttggcgctaaatggaaccgcgccgcgcttcaccgtctctggcatcgccagcagtaagccaacaaatgagataaaacccataactgcaatgatggcaaaaaggactttccagtgcacaaagtgcatcagagctgcgccggaaagcgggccaataatcggcgcaatcagtacgatggaggtgataatcgccatcaacttgatcccttttgtctggccgaacgcctcctgcaccgtgacataaccaacggtggcaataaaacagatactggtgccctgaattgcacgcgcgataagaaactgtgtcatagacgttgtgaacattgtcgcagcgcaggcaagggtaaatattagcgccccggtaatcagcaccggcctgcggccaatcctgtcggaaagcggccccagcagccactgtaacgccataccgcccgcgagatagagactgacggctgccggggccagactgacatcggcattaaaatcacggaccacattaatgatccccggctggatcagatccgtcgacaggtacgcggcaaagtcatacaaaatcaacgccatcgggaaaaacagcgtggcggcatggcgggcaaaaaaacgtggcataacaaacaactccttgtccggagaaccccaacggggaaaacgaaattcaataccgtcggtaatgacgaaaggcaggcgagaaggacaaatgtactgaatttcatgtaatcaaccacactgcctgtgaacacacagacagagaaataccttctgactccaggtcagaatgtataacgattacaaatagtcatcagcacattacacctctttaattgatgggttgcatagaaaatatacaccttaagtgtaattaaaatttgcggttaatcaaaagagcgcggtggaaaggggaatatctgccgggtacaggaaatgtaaaacgcgagcctgtttccgaaaaaatgtatcgtttgcagaagaataaaaatagcctggaaagcgcctcggggaacgggaaattgccgggtgagaatggttttgttagccgctaaagtcgggccatcttatctacaggtgacggatcgccatgacaaacttctcgaccagcacgccgcatgacgcattatttaagtcctttctcacgcaccctggcaccgcgcgggattttatggagatccacttacctaaagatttacgtgaactgtgcgatctcgacagcttaaaactggaatccgccagctttgtcgatgaaaaattgcgggcgctacactccgatattctgtggtcggtaaagacccgtgaaggtgatggttatatttacgtagtgattgaacatcagagccgcgaggatattcatatggcgtttcgcctgatgcgatattccatggcggtgatgcagcgccatatcgagcatgataaacgccggccgctaccgctggttatcccgatgctgttttatcacggtagccgtagtccttacccctggtccctgtgctggctggacgaatttgccgccccgactaccgcacggaaactttatagcgcagcgttcccgctggtggatgtcactgtcgtgccagacgacgagattgtgcagcatcgcagagtcgccctgttggagttgatccaaaagcatattcgccagcgcgatctgatggggcttattgaccaactggtagtattactggttacagagtgtgctaatgacagccagataactgcgctgttaaattacattttactgactggcgatgaagcgcgttttaaggcgtttatcagcgaacttaccaggcgaatgccacaccacagggagcgaataatgacaattgcagagcgaattcataatgatggatggctgttgggaagggagagggggaggaaagaagggaaagtagaaggggaacggagcctcctccgattgttgttgcagaatggggccgatcctgaatggatacaacgatataccggactttcggcagagcaaatgcaggcattagatcagcccttgcctgaaagcaagcgcgaaccatggatcgagtactaatcagaggctgatgacaaacgcaaagcagcctgatgcgctacgcttatcaggtctacataatccattaaatatattgaacttttaatattttgtagacctggtaaggcgttcacatggcatctggcatgaacgaagcacactttgcctaagccatgccggaacgtggcgatgtcgctataaagataaaacgagtcacaggttattcgtgagagtaaatcaggggcctcggcactaattcgaatttattccattgcccgatacacggcatcgccaatttgctttagtgcttcgcgataggtttcgctgagcggcaaagcgcagttgatgcgcagacaattacggtatttgccggaagccgagaaaatcgagcctgccgccacctggattttcatgcagtatagctgccgcgcaacgcagaccatatcgacctgttcaggcaattctatccacagtaaaaatccgcctttcgggcgcgtaatacagatttcgcagggaaaatattcccgtatccagcaggtataaagcgccagattgcgctgataagtctgccgcatccgccggatatggcgatgatagtggccttccaacacaaacgttgccgccgccatttgcgtggacggcacattaaagctgctgatggcgtatttcatatgcatcagtttatcgtgataacgccccggtgcgacccaacccacgcgcaggcctggagcaatacttttactgaacgagctgcacaacagcactcgcccgtcgatatcccatgaatggatggtccgcgggcgcggatactccgttgccagttcgccgtagacatcatcttcaaaaatcacaatatcatgacgctgagcgagagagagaacggcccgtttgcgtgcgtccggcataataaatcccagcggattattacagtttggcaccagaatgatgcctttaatcggccactgttccagcgccagttccagtgcttcaacgctgatgccagtttctggatcggttgggatttcaatcactttcacgcccatgcctcgcagcatctgcatcgaaccgtaataacagggagattcgaccgcgacaatatcgcccggtttacacaccgccattaacgccagcgacatcgagttatggcagccgctggtgatgatgatgtcatcggnnnnnnnnnncggtgaccaccgagccgctgtcgagcatcaggcgggcaatctgctcccgcaacactcgctgaccggctaacaagtcataaccgagaacggtttgcagattatgctgcaccacccggcttagctcacgccacagcggtttcaggctgggcgtttcgacatccggcgtgcttttgcttaacggaacaatggaattgtcgctatgcgcctccagcatatccagcacctgatcccactgggtaatttccaccgggcgctgcaccggacgcgtcatcggcggtacaggcggctgggctttacgttgtgcgacaaaataacccgaacgcggctgcggagtgatgagcctcatcgtttccagcgtctgatacgcctgttgcacggtgctgatgctgacgccgtgctcctgacttaagctgcgcaccgacggcaatttctccccgtgacgatacagcccttgctcaatccgctcggcaagtagagtcgccagatgttgataacgcgtcatgctgtattccttattgggcccatacagaaagaaaaaccggtacagatgaggctaaaaaaccggatgcagatgctgttttaacctgtctgtatgttaaataaaactaatatttgcatctgtattgtgaactgccagaaggcggatgatgaagcctctgaaagatgaggaggcagcagatggaatttcacgaaaacaaagccaaaacgccgtttatcagacttgtgcaactctggcatgcggtgaggcgttggcggcggcaaatgcagacccgacgagtgttacagcagatgagtgatgaacggttgagggatattgggttacgcagggaggatgtggagtgaactatgggcggcgtgttggcaaatgctgcctgtctgcattcaaaattgctacaaaatccaaccataaaagtcgtttacaacatatttttctgatttacatacagataatgacctgagctgtctctctgggggtcatcatctatgcgtccgggggatctgtcacaaaaaggaatagaacaaaatcatcagcggtgaataaagcgattcgttttagatcacattaatgaaatttttgtatcaaaaattagttatcgcgctcacagttcataatgaaacaattctctgcaaatagataaccgaagcttcgttgctagtatcaattcgctaattatacacctgccagaggatacaatgaaaaatagaaatcgtatgatcgtgaactgtgttactgcttccctgatgtattattggagcttacctgcactggctgagcagtcgtcaagtgagataaagattgttcgcgatgaatacggcatgccgcatatttatgccaatgatacatggcacctattttatggctatggctatgtagtagcacaagatcgcctttttcagatggaaatggcacgtcgcagtactcaagggactgtcgcggaagtgcttggcaaagattttgtgaaatttgataaagatatccgtcgtaactactggccggatgctatccgggcgcaaattgctgccctttccccagaggatatgtccattctgcaaggctacgctgatggaatgaatgcctggattgataaggtaaataccaatccagagacgctcttaccaaaacagtttaatacatttggctttactcctaagcgctgggaaccgtttgatgtcgcgatgatatttgtgggcaccatggcaaaccgcttctctgatagcactagcgaaattgataatctggcactgctaacggctttaaaagataaatatggtgtatcacaaggcatggcggtatttaatcagttgaaatggctggtaaacccatcagcgccaaccactattgccgtacaagagagtaactacccacttaaatttaatcagcaaaactcgcaaacagcagctctgttgccacgctacgatttacctgcaccaatgcttgaccgaccagcaaaaggggcggatggcgcactgctggcgttaacagcagggaagaaccgggaaactattgctgcacaatttgcacagggtggtgccaatggtctggcggggtatccaacgaccagcaatatgtgggtgatcggcaaaagcaaagcccaggatgcgaaagcaatcatggtaaatggtccgcagtttggctggtatgcgcctgcgtatacttatggtattggtctgcacggtgctggttatgatgtcactggcaatacaccatttgcctatcctgggctggtttttggtcataatggtgtgatttcctggggatcaacggcaggtttcggcgatgatgtcgatatttttgctgaacggctgtcggcagagaaaccaggctactacttgcataatggtaagtgggtgaaaatgttaagccgtgaggaaaccattacggtgaaaaatggtcaggcagagacctttactgtctggcgtacggtgcatggcaacattctccaaactgaccagacgacacaaacggcttacgctaaatcccgcgcatgggatggtaaagaggtggcgtctttgctggcctggactcatcagatgaaggccaaaaattggcaggagtggacacagcaggcagcgaaacaagcactgaccatcaactggtactatgctgatgtaaacggcaatattggttatgttcatactggtgcttatccagatcgtcaatcaggccatgatccgcaattacccgttcctggtacgggaaaatgggactggaaagggctattgccttttgaaatgaaccctaaggtgtataaccccctgtcgggatatattgctaactggaacaattctccccaaaaagattatcccgcttcggatctgtttgcctttttgtggggggggggcagatcgcgttacggagatcgaccgactgcttgagcaaaagccacgcttaactgctgatcaggcatgggatgttattcgccaaaccagtcgtaaggatcttaacctgaggctttttttacctactctgcaagcagcgacatctggtttgacacagagcgatccgcgtcgtcagttggtggatacattaacacgttgggatggcatcaatttgcttaattatgatggtaaaacctggcagcagccaggctctgccatcctgaacgtttggctgaccagtatgttgaagcgtaccgtagtggctgccgtacctatgccatttgataagtggtacagcgccagtggctacgaaacaacccaggacggcccaactggttcgctgaatataagtgttggagcaaaaattttgtatgaggcggtgcagggagacaaatcaccaatcccacaggcggttgatctgtttgctgggaaaccacagcaggaggttgtgttggctgcgctggaagatacctgggagactctttccaaacgctatggcaataatgtgagtaactggaaaacacctgcaatggccttaacgttccgggcaaataatttctttggtgtaccgcaggccgcagtggaagaaacgcgtcatcaggcggagtatcaaaaccgtggaacagaaaacgatatgattgttttctcaccaacgacaagcgatcgtccggtgcttgcctgggatgtggtcgcacccggtcagagtgggtttattgctcccgatggaacagttgataagcactatgaagatcagctgaaaatgtacgaaaattttggtcgtaagtcgctctggttaacgaagcaggatgtggaggcgcataaggagtcgcaggaagtgttgcacgttcagagataattaagcccgaatgccctcatattctggaggaatatgagggtgataaagtctcaggtattgtgatgttggagggctggttactttttgagtcccgcaaacgctgaccgaatctcatcctccggcaactgaatcccgataaacaccatcgtgctatgcggtttttcatcgccccacgggcggtcccagtcggcgctgtagaggcgctggacgccctggaacagcaggcggttaggttcgccgtcaatccacagcatccctttgtaacgcagcagtttatccgccgattccagcagcaggttttccatcacccgggaaacttcgctgatatctaccgggtaatccagttccaccacaatcgacgaaatatcgttttgtttgtccgcgataaaatggaaacgcggtttggtgctgacgacgttttcttccagcataaaaccgttggtgttgaacagcagacccaggtcgatgtcgccgtgggtgacggtgtagaccggtgcgcgggcgttgatgcgcgccagacgttcacgcagtttttctgcttcgcctgcgacgtcggttttagtcagcagaatacggtcggcatagccaacctgggattgggcgatggtgaactggttcatctgctcatcggcatgtaccgcatccaccagcgcaatcacgccgtccagcaggtaacgctggcataaaatctcatgggagaaaaaggtctgaataatcgggccgggatcggccatgccggtgcattcaatgaccagacgatcgaactgaatattgcccttgtcgagattatccagcaggtcgagtagtgcgtcttccagctcgttggagcgcgaacagcagatgcagccgttggtcagcgttttgatctgcgtggcgcggtcgccaatcagttgatcatcaacggagacttcgccgaattcgttttcaatcacggcaatcttgtagccgtgttgttcgttaagaatatggcgcagcagggtggttttgcccgcgcctaaaaaaccggtgagtagggtaactgcaatcgggttcatgctctctccattaacaacagcgcataccgcctttaccatcgccgccgtagcgcgcgttctggcgttcgcggaagaattcttcatagctcatgtacggcttgtcgggatggttggtcttcatatgctcgacgtagttgtcgtagtctggaatgccaatcaacatcttcgccgcctggccgagatatttttttgcctgtcctaagttaccaaacatagttcactctgataagaacaaagccccgccgaagcggggctaaacacggttagtggtgcgaagagatcttcacgccgccttccgggattggaacgtacggtgtttctttgtcagtacgtttgtcgctgttacgcaccgcaagccaggttttgaaaccgtagaagatgatgctgtacaccacaatcaggaacagaatactcaggcctgcgttggtgtagttgttcacaacgatgtggttcatgttggcaatctgctgcgccgtcaggtcagtaccgttagcaatcttctctttgtactggcttgccatgtagaagaagccttccatctgcgggttggtgctgaacagtttcaggcccagcgcccaggtggtgcagataagcagccatacagccggaacaacagttacccagatgtattgggtgcgcttcatcttaatcagcacaacggtgcccagtaccagcgctacggctgccagcatctggttggaaataccgaacagcggccacaggctcttaacgccgcccagcggatcgaccacgccctgatacagcaggtagccccacagacccacacagcccgcagtaccgatgataccagcaaccagagagtcggtttttttcaggaacgggatgaagttacccagcaggtcctgcagcataaagcggccagaacgggtacccgcatccagcgcggtcaggatgaacagggcttcgaacagaataccgaagtgataccagaagcccatgtcagccatcggcagcactttgtggaacacgtgcgcgatacctaccgccagtgtcggcgcaccacctgcacggttcaggacagaaggctcaccaatgtctttcgcggtttgcaggatctgctctggcgaaatcacgaagccccaggagctgacggtcgctgccgcgtgtgcggtaacgtctttcaactgcgccatgatgatcggcgcgttctcgccacccatttcatgcaggttaggcatggtgatgccaaggccagcaggcggggtattcatcgcgaagtaaagacccggttcgatgatggacgcagcaaccagcgccataatcgccacgaaggactccatcagcattgcgccgtagccaatgaaacgcgcgtcggtttcgttagccagcagtttcggcgtcgtaccggaagagatcagcgcgtggaagccagataccgcaccacaggcgatggtgatgaacaggaacgggaacagagcgcctttccacagcgggccagtaccgtcaatgtactgggtcatcgcaggcattttcagttccgggttcagcaccacgatacccagcgccaggccgacgataacgccgattttcaggaaggttgccagatagtcgcgtggtgcgaggatcagccacaccggcagcagcgcggaaataaacgcatagccaatcagcgcgaaggtaatggtggtgtctttaaaggtcagtgccggaccccagtacgggtcgtgagcaatcacgccaccgaagtagatagaggcaaccagcagcacgataccaataacagagacttcacccacacgccccggacggataaagcgcatgtagatacccataaacagcgcaatcggtacggttgagcaaacggtgaagacaccccacggactttcggccagggctttaaccacaatcagcgccaggacggcgaggatgatgatcatgattaagaaacagccaaacagcgcgatagttcccggtactggccccatctcttctttgatcatctcaccgagagatgcgccgttacggcgagaggagataaacagcaccataaagtcctgtaccgcaccggccagcactacccccgccagcagccacagcgtgccgggcaggtagcccatctgcgcggcgagaaccggaccaaccagcggaccagcaccggcgatagcggcgaagtggtgaccaaacaacacgtaacggttggtcggaacatagttcagaccgtcgttgttaataaccgcaggcgtcgcgcgcgtggggtcgagtttcatcaccttctgggcgatgtacagactgtagtagcgataagccaccagatacaccgacacagaggcgaccacgatccacagggcgctgacgtgctccccccgacgtaatgcaactaccgcgaggcagaatgcaccgatgattccgagaatcacccagggtatgtgcttgaatagttttttcgtatccatagtaaaacctggcattttactcgtcgtcttttggcttacaggtgcggcagctgcgttcgttcacctctgtcacttactgttgcaagctcccggggattcactcacttgctgccttcctgcaaaccaaaatccatagagtaatttgttaatcataggccgaagccgttctaggtttgcgttgcgtttgaggaggtaaattgaccgctatcctgcagtgatgttgccagagatacgcgcgcgtaaagtaaggtaaataactgagtggttattttagggatgtaagcggtcaggaatggcggtgagcggttgggcaagaattattcatcgggtggatatgtgattgagatcacaataaaaatgccccttcgacgaatgcgtgaaggggctggagcttaaatcgcagcttccatttccagcatcaccggatggaaacggcgtttaaagtaaataagtccgtgaccttctgcactgaggatgatgtttttaatctccaccagatacaccagatgtgtgccaatcgcctgcacatcgcggatctctccttcaagactggccagcgaacctttcagcaccggctgcgccagcggacctttttgccagcatgagaggctaaaacgctcttccatcgccatgcctgtcatgcccgcgaagtggcgtgccatcagttcctgctcatggttgaggacgttgacgcacaacttaccgttgccctgaaaaaccgggttcatcgcactgttggcgttaatgcacaccatcagcgacggtggtgtatccgtgaccgagcagacggccgttgccgtaattccgcattgtccggcgtcgccctcggtggtgataatatttaccgctgccgacaggctggccattgcgtcacgaaagcgcaggcgttgttcatctaattgcatcttaacctcctgctgcgttatttcagcagcttatccagcatgttgatatcgtcgttgttgtgcaggtgcggcacagtccagccgttctggtcgtattccgacaggcagcgatcaaccatcgccatcatcttgtccatattgccggagctttgtgcctggcgcagacactgcaggcgaatctcatcctggctaccggagtagttgatttcatacagttcgtgacgaccaccaaactcgctgccaatggcatcccacatcagtttgaggatcttgatgcgctggacgtgatccataccgttcgaaccgcgcacatacttcgccagatactggtcgatctgcggattgttcaggtcacgggcactggaagggagatagatcaggccactggtaacgttgcgttcgataatgtttttgatcttcgcgtaggccattggtgccagtacgcgataggtttgcagtgcggcatgatccggtaaataagccccgttgacccacggcgtcgcttcagaacacatcgagtcactcaatgcccagaaggtgttgcgccacgccaccacttcaccgagatcggcctgcacaccacggaactccagggtgccggtacattcgagtgattttttcagcagtgccgtaatgaagtcgagtttcactgccaggcgcacacaggcttgcagcggatacatacgggcgaaaccgccttccatcgtccagcgacggcagcgatcaaaatcgcggtagatcagcacgttttcccatgggatcagcacgttatccatcaccagaatcgcatcgttctcatcgaagcggctggagagcgggtagtcatacggtgagccggtagcacccgcgaccatctcataagaggcgcgggagattaatttgacgccatcggcatccattggcgcaacgaacatcagtgcgaagtccgggttttcgcccattacttgtgccgagccgaagccaatcatgttgtagtgagtcagcgccgagttggtggcaaccactttcgcaccgctgacgataatcccggcgtcagtctctttttccagcttgatgtaaacgtcttttactttatcggtcggcaaatgacgatcgatcggtgggttaacaatcgcgtggttaaagtagaggccagtttcctgaatacgggtgtaccagttacgggcgttctgctcgaactgaccgtaaaagcccggattcgcgcccagtgcgcaaccgaaagcagctttgtagtctggggtacggcccatccagccatagctcaggcgtgaccactcagcgatggcgtcgcgttgctggcgcaggtcgtcggcacttttcgccacgcggaagaatttatgggtatagccgccgctgccggtgtcggtgttccagcacagagagtcctgcatctccggtttgtgcagtgcgtcgtacagctgggcaacagacgctgccgcattacgaaatgccggatgagtggtgacgtctttcactcgctcgccatagatatagatctcgcgaccatcctgcaggcttttcagatactcttccccggtgaacggacgttgggtactggcgcggaaatcttctggtttcatgtcgacctctacagtattaatcggaatacgattgttaattttgtgtgttgtttttgttattcaattgaagcttgcaggggcgattacgggaagacacttttgggacaatggctggtacttttcaggtcgggtacggttttgtgatcgaggtcgcttttagcgatttttgacgttactaaatccccttgctccaggcggagaaaggggaatagcaggtggtgcctggtttcccgttaagactaagggattttcacgtcacaggtacttttttggcacgataagcactgggcgagcaaccgactaagcgattaaaaaagcgcgcaaaataagctggatccttaaaaccgagttgccaggcaatattgttcactgcgttatcagaaaacagcagcagccgtttggcttctcgcagctgcctgtcgaaaatcaaccgttttggtggacggttggcaaagcggcggcagatgtccgtgaggcgtgattcggtgatatgcagttcgttagcgtaatccggtactgtccagtgctgatgaaaatggctttcaatcagcatattaaaacgctggaacagttttaattctccgcgcattccgctggcggcatggtcgtcgagttttgcattacgcagcagtagggtgaatactgcctgtgccagtaacgtcagggtgtgttcccgtccaggcagttgttctaccgattcccgctctatcagttgccaatagtgttccagcgccgccagttcgtcgggtttatctgccagtgacaggcaaatccccggcaggccgaaggtttcccgagtgcccggataaagaacttccagcaggggccagatcagatcttcccgtaccgtcaacacatgaccgtcggcgtcagactccgtaataaacgcatgaggtactgacggcggcgtcaggacaaacaggggcgcttccaccgagtagcgatgatcgtcaagttgtagctcaatctgtccgctattgaggaaatgcatctgaaagtactgttcgtggcgatgtggcagcatatggcggccaaaaaatgccgccatgcgggcgaacgactgataatgcacatcgtccgtgcccaggctttcatcgtactctttgctgatatcaatattggcaatctgacggtcacacatcgtcgttccttacggggtcgctcgcggacgggaggactgcattggaatcgcccagataatccccgcaccaatcaccagcagcgcggcaacaaaccacaatccactgttaaagctgccggtcaaatctttcaaccagccgatcataaacggacttaacgctgaaccaatgttgccagtggcgttgatcaccgcaataccgatcgctcgtgcccgcaggctgatggactgatccggtgttgtccagaaaatcgccattgcgctgaatgatccggtcgaagccataatgatccccagcatctggatcatgttgtgatcagttgccgaagccagtaaccaacctgcggcagcgaacaaataaggaagggcggtgtgatgccttcgttcctggcggcgatctgagtgacggctccagtagatcatcccgagaatggtacaaatctgcggtacggcggccagcaggccgatggtgatattactgctgccctgattaaaactttgcaggatctgcggtgtccagatgctgatcgcactaagtgtgttggtcaggcagaaatacgccagggtatacatcatcaccaccggagtgaagatctcccgccacatactgcgttgttgcatggcgtggtggctgatggctccctctggctgaaccagcgtcagacgatcgttatccatcatctcttgcaggcattttttgtcttctttcgtcagccacttagctttgtccggtgagtcatcaagccagaaccacaccatgacgccgagtaataccgacgggaagccttccagcaaaaacagccactgccagccttttaatgccatgacgccatccagcgacaaaatgtagccggaaacgatcgagcccaacgctgtcgttaccggcattgctaccataaacaaggcgttggcacgggcgcggaaataggccggaaaccagaaggttaaatacagcagaataccaggcagaaagccggcttcggtaatgccaaccagtatacgcagtacgtacaagctggtggggccagtggcaaacatggtggcagtagaggcgatgccccagagcaccatgatggtggcgatccagcgccgcgcaccgacaatactcagcataatgttgctgggaatgccgaagatgacataagcggcatagaacagggtggtagcgaggccaaacatggtggcgctcagaccgaggtcgcgtcccatcgtgagtccggcaaagccgatgttgatgcgatcaaggaacgagaagataaacagcacgaacagaaagacgatcaggcggcgaaatagcttcttaataaccgcctgttgtccggcagtcagcgctttatgctgattcgccggatcgatactctccggtatggcaggtgaggtgtcgctcatttttcttcctctaatgggatttttgtagggtacgacaaggtttatggcggatgcgcacaaacgccttatccggtccgcgatttggtacggctttttgccggatgcggcgtaaacgccttatccggcctacggtttggtgcgagtgtaggccggataagcgcagcgcatccggcattaatacacgccgggcttcacggcggtggcctgcgcaccaaaccgtgctgccagcgcttcagcggcgcgggcgagcagggtggtgtcaacgccgacggcgacaaacagcgcgcccagttccagatagcgttttgccagttgctcattggcgatcaggatccccggcgctttgcccgattcacggatctgcacgatcgcctgctcaatggcggcctgtacttccgggtgctgcggattaccggcataacccatatcggcgctcagatccgccgggccgataaacacgccgtcgaccccttccacgtccagaatctgcagtaagttcttcattgcctcacgcgtttcgatctgcaccagcacgcacatttgatcgttggctttttgcaggtaatcaggaatgcgattccagcgcgaggctcgggccagcgcactgcccacaccgcgaataccggcggggggataacgggtggcgcgtaccgcttcacgggcttcgtcagcgttttgtaccatcggcaccagcaaggtttgtgtgccgacgtccagcagttgtttgatttgcaccggatcgttccacgacggacgtactaccggctggctggggtagggcgcaatcgcctgtagctgggtgagcacggtttgcacgttattcggcgcgtgctcaccgtcgatcaataaccagtcgaatcctgctccggccagtaactccgcgctgtagctgctgctcagccccagccataatccgatctgcgggcggcctgctttcagcgccgctttaaaactgttttccatcgttctctccttaaacaaagcggcagctaatggaacccatgttgccgtaatcgacgtggaaggtgtcgcccttacgcgccggaaccgggcgggtgaacgaaccaccgagaatgatttgcccggcttccagttgtacgtcatagggtgcgagtttgttcgccagccaggccacgccgtttgccggatgattcagcacaccagcggcgacgccggtttcttcaatcacgccattgcgatacatcagggcggagatccaacgcagatccagttcgtctggtttgatcggacgaccgccgaggatcactccggcgttggcggcgttatcagaaatggtgtcgaacactttgcgcgggcgctgggtttccggatcgatgttgtggcagcgagcgtcgatcagctccagcgccgggatcacatagtccgtggcgttgtaaacgtcgaacagcgtgcagtttggcccacgcagcggttttgccagcacgaaagccagctccacttcaatgcgcggcacgataaagcgatcggtcgggatatcgctgccatcgtggaagaacatgtcatccagcagcgtgccgtaatccggttcgctgatctgcgagcttgcctgcatcgctttcgaggtcaggccgattttgtggcctttcagcgtgcgaccttcggcgattttcaggcgaacccattcgcgctgcaccgcgtaagcgtcttcgatggtgatctccgggtaatccagtgagatcgcgcggatctgttcgcgctgtttttctgcctgatccagacgctgggcgatcagggtgtgggtatgtttatcgaacatagcgatatcctgtggcattgccggatgcggctgcgccttatccggcctacggtgtacggtttggggttttgtaggcccggtaagcgcagcgccaccgggcaatctgcgcgctacttaaacaatgcgtgcacgttgttttgtttaaaattcagcgtcggatgcagctcttcaatctcaaacgacaacgccagcaggcggctctccatcagggcggcgaagtgcgttttaatcagttcaaacagcatttcacccgcctgctgacggctttccaggctgcgacctgcgccgattttcaacgtcatatgcacgaaggcataatcacgctgcccgtcggccatctgccaggtatcgacccaatgcacgcggctgcgaatacccgccagcggaaaaatacccgtggctgccagcgtcggattcactttggcgaacaaccccggcaggtcggcttcttcgcggatgttgtcactgcattcaacgataaagtgcggcataaaacgtccttacgcgggaagcgggaaaacagcgttaacctgaccggtgccagagcttgggaatagctcggtgataaactccaccttgccgtcgtatttatcccagccgagcatccccagcagcatcaccgtgtcgtgcatattgccttcgccgtagcagtagtcggcgtactccggcagcatattgcagaactctttgaactggccttcgcgccacagcttcaccacgcgctcgtccatctggcggtcgaactcgcgggtgtagctgttcatcccttcttccgctcgctgatcgtcaataaagcggtgcgataacgaaccgctggcaaggaccgccacggtgccgtcgtactgttcgatcgctttcagaatcgcctcgcccagcttgcggctgtcggcaaaatcgtgaacagtgcagaaagctgaaatggaaaccactttgaagtgcttgtcttcattcatgtagcgcattggcaccagcgtgccgtattccagtttcaggctgggaatgttgtgcgcttttgcccgcacgccgagctttaaggcttcatcggcaataagctgccccaactccgggttgccctcgtagttgtaggtcatatcgcggataaaatgcggtagctcgttgctggtgtagacgccttcaaaatggtctgcacagttgatgtgataagcactgttgaccagccagtgggtatcgaaaacgataatggtatcgacgcccatttcccggcaacgcttgctgatctctttatgcccgtcgatcgcgccctagcggcaaccgtggtttttccctggcagttcagagagatacatcgacggtacgtgcgtgatcttggcggctaacgctaacttacccatatcagactccccatttcggaattggatggtcgcccatggaaatgcagacgttcttcatttccgcgaacacttcgaagctgtactcaccgccttcacgcccggtgccggaggcttttacgccgccaaatggctggcgcaggtcacgcacgttctgggtgttgacgaacaccatgccagcttcaatgccacgcgccaggcgtaacactttgctgacatcctgtgtccagatgtacgacgcgaggccgtactccacgtcgtttgccagacgtaagccttcggcttcgtctttaaacggcagcaggcaggcgaccggcccgaaaatctcttcctgggcgactcgcatacggttatcaacgtctgccagcacggttgggcgcaggaagttgccgcctttcaggtgcgcaggcaggtcggacggtttatccgggccgcccgccagcagggttgcgccttcttcaatgccgagacggatatagccggagactttttcccagtgctgctggctaataagcgcgccaacctgggtattcggatcgttcggatcgcccacgcgcagacggttggcgcgttcggcaaagcgtttaacgaattccgggtagatgctttgctgaataaagatgcgcgaaccggcggtgcagcgttcgccgttgatcgagaagatggtgaacagggcggcgtccagcgcgcgttcaatatcggcatcttcaaaaatcagcaccggcgatttaccgcccagttccatggagtattttttcagcccggcgtttttcatgatgttgcgcccggtggccgtaccgccggtgaacgacacggcacgtacgtcatgatgacgaaccagcgcatcccctgcggttgcgccgtagccctgtaccacgttcagcacgcctgccggaataccggcttccagcgccagctcacccaggcggtcagcggtcagcggggagagttccgacattttcagtaccgcggtattgcccagcgccagacacggcgcgaccttccatgtggcggtcataaacggtacgttccacggcgataccagcgcacaaacgcccaccggctgcaccagcgtgtagttgagcatcttgtcgtcaaccggataggtcttgccgttcatctgctggcagacttccgcgaaaaattcaaagttgtgggaagcgcgtgggatcaacacatttttggtctgatggatcggcaggccggtgtccgcggtttccatcgcggcgatctctggcacgttctggtcgatcagatcgcccagacggcgcatcaggcgcgcgcgctctttcatcggcagattggcccatttcgggaacgcctctttcgctgccgctaccgcctgattgatctccgcttcaccgccggaggccacatccgccagcacttcacccgttgccggattggtagtctggaagtagtcgttacctgcaacatttttaccgttgatccaatgatttacttttttcatttcgctgtttcctcactcacaattcggttcaccaggcggcccacgccttctacttccaccaccacttcatcgccaggcaccacgtcagataagccttttggtgtgccggtggcgatcatgtcgcccggattcagggtcataaattcgcttaagtaggcgatcaggaagggcacgctgaagatcagatcggcggtggtgccttgctggcgtaactcgccgttgacgaaggtgcgaagggtcagattatgcgggtccgggatcgcctctttcggcacgatggttgaaagcatcggcgtcagtccgtcgcggcttttgacccgcaggttagggcggtagtagttttccagatagtcgcgaatggcgtagtcgttacacacggtgtagcccgcgacataatccatggcatcggcttcgctgacgttacgcgcctgtttgccaataactaccaccagctccgcttcatagtgcatgtattcaatattgtttggacgcacggaggtctggttatcgccagtgagggtatttggcgctttcaggaacaccagcggttcttccggtggcttaaattccagttcgctggcgtggtcggcgtagttcaggccgagggcaaacagcgtgccgtgcgggtgtggctgcgttgggaagctcttgcgcgtggtcacttcacgttcgtccactaccggattttccagcggcgggaaaccttctgcgagaacacgaacgcgatcgcctggctgtatttccacgcgcgcctgtggcgtgccgagcagaatggcgtcgcctggattcagcgtggcaaattcgctcagggcgctcagcaactgcgcggcgttacgttgtaaatcggcggtattccagtgatcggcaggacgcccgttgatctcggtatagatggtcagattatcgacattgctgagagccacggtttcgccaatggggcagaatccatcacgacattttgctttgattgccgggcggtaaaagctctcttccggcaggctgacgtcgttagccagcgcatatccggcgatgtactctgccgcatcttcttcacgtactttcgtcgccgtttttcccacaatcagcgcaacagtcgcaccgctcagtaccttttcaccctgtggaaagggaatcggttcaccgcaaccaatcaccgtattgcgcggtttaataaaccagaccgcagttttaggcggggctttgtagggggattgctggaacgcttcctgccatgcatcaagttggctgcgatggttcaacgctacggcgaagatagtgcctttcattaccactcctcggattcgatcatcttaatcattaatatgttaatgattacttttattcccgattgcgtagtttggcaaaagtaagtgatgtaaatgtgatctaattaacaaactatttacatttaaagataataaaatattaaatatcagcaagttaacaaaacatgctcaattttgataaaatgaagaattgcaggggaagcgcagtcccggtaacgtgatgattaactgtttctatattaatgattttgaatttttcaggggaaagataatgcacgactctctaaccattgcgttgctccaggcgcgagaagcggcgatgagttattttcgcccaatcgttaaacggcataatttgactgagcaacagtggcgcatcgtgcgtattctggcggaaagcccatcaatggattttcacgatctggcgtatcgcgcctgcattttgcgcccaagcctgaccgggatcctcacgcggatggaacgcgacggtttagtgttgcgattaaagccgatcaatgatcagcggaagctctatatctcgctaaccaaagaggggcaggcgctgtataaccgcgctcagacacagattgaagaagcctatcggcagattgaagctcagtttactgccgagaaaatgcaacagttaacccatctgttagaggaatttattgctctgggcaattcccgacaagaagccatcccgggcgataatgaataactttttagtatctgataaccagcgcctggtttttccatggatggcgggttacaccttttcataaagtttttgctttccaggccgaaaatcttgcatcggtccacaggaaagagaaaccatgttaaaacgtatcaagatcgtgaccagcttactgctggttttggccgtttttggccttttacaactgacatcaggcggtctgttctttaatgccttaaagaatgacaaagaaaatttcactgttttacaaaccattcgccagcagcaatccacgctgaatggcagctgggtcgcgttgttgcagacgcgtaacaccctcaaccgcgcgggtatccgctacatgatggatcagaataatattggtagcggttcaaccgttgctgagctgatgcagagtgccagtatttcgctgaaacaggcggaaaaaaactgggcggattacgaagcgttgccgcgtgacccgcgtcagagcaccgccgcagcggcagagatcaaacgtaattacgatatttatcacaatgcgctggcggagctgatccaactgttaggtgcaggcaaaatcaacgagttctttgatcagccgacccagggatatcaagacggtttcgagaagcagtatgtggcttacatggagcaaaacgatcggctctatgatatcgccgtcagcgataacaatgcctcctacagccaggcgatgtggattctggtgggcgtgatgatcgtcgtactggcggtcatcttcgccgtctggttcggtattaaagcctcgctggtagcgccaatgaatcgcctgattgacagcatccgtcatattgcaggcggcgatctggtgaaaccgattgaggtggatggctctaatgagatggggcaactggcagagagtttgcgccatatgcagggagagctgatgcgtaccgtcggtgatgtgcgcaacggggccaatgccatctatagcggtgccagcgaaatcgctaccggcaataacgatctctcttcgcgcaccgagcaacaggccgcttcgctggaagagacggcagccagcatggagcaactgaccgcaacggtgaaacagaacgccgagaatgcgcgccaggccagccatctggcgttaagtgcttctgaaacggcgcaacgcggcggcaaagtggtagataacgtggtgcagactatgcgcgatatctccaccagttcgcagaaaatcgccgatattatcagcgtaattgacggcattgccttccagaccaatattctggctttgaacgcggcggttgaggctgcgcgtgcgggtgagcaagggcgcggttttgcggtggtcgcgggagaagtgcgtaatctggcccagcgcagcgcccaggcggctcgtgaaattaaaagcctgattgaagactcggtggggaaagtggatgttggctctacgctggtcgaaagcgccggggaaacaatggcggagattgtcagcgccgtgacccgcgtgacggacattatgggcgaaattgcttctgcttctgatgagcagagccgtggtatcgatcaggttggcttagcggttgctgagatggaccgggtaactcaacagaacgccgcgctggtggaagagtctgccgcnnnnnnnnnnccgccgcgctggaagagcaggccagtcgcctgaccgaagcagtggcagtgttccggattcagcaacagcagcgtgaaacatcggctgtggtaaaaaccgtgacgccagctgcgccgcgtaaaatggccgtggcagatagcgaggagaactgggaaacattttaatcgccatgaaaatgcccgataagcaaaatgttatcgggcataaggagattaatctttacgtgggtcgttgatcggctgacgaaccaggaagatgtacgccagtgcccccgctgcggtgacgcaaccgcagatgattagtgccagacggaatgagtgggtggtatcaacaataaaaccagtaatgatcggcgcaaaagaggcgcagatgaagctggcaaagttctggatactgcccaccgacgcagtcatgcgagaagcaactgcgacgtggatcaagccccagcaggatgttccggcaaagtgaatacagaacagtgccatgccaatcagcagaaccgccgtcatggatgttgtcgcttgtggtactatcagcgtaaaggcggcagaacagaacatcccggcaataatgcagatcttacggcttttaatcggagccattccccctttgaccagccagtcagtaacgtaaccgttgaccagcatcccggcagccccaaacaggaaagggatagccgccatcaaccctgtgctttttaaatccaggttataggctgtttgcaggtaaccaggaagccaggccagatacagccacgcagtgtagttgatgccactgaatccgagcatcattccccacattgtacggttacggaacaggctgcgccattcggcaaaactgagcggatctcggcgggcattgacgctacctgcattgagataagcttgctcaacggcagtcagttctacgtgctcgcggttgcgatagagcatataccagccgatggcgagaaaaatccccagtacaccaatggtaataaacatcccgcgccagcccatcaccagcatcatcgccgccagaatcggtgggcttacggcaacgccaatggtagaagctgcgttgaagaagcccatcgggcgtccgcgctctttgatgttgaaccagtcgttaatgacttttacaccgcatgggttcatcggcgcttcaccaatccccataccgatacgcaccaacacgaactgcgtaaagttgtgcaccatgccagacattgcctggaacagtgaccagaagaacatccccagtcccagcatcaggcgtgggcctttacgatccaatagtgggccgcaaggaagttgcgcaatcccgtaagcgagtgaaaacacggagagcaaagcgccgatttcggtggcacttaatcccaattcttcacgaatcgttaaatttgctaccgacagcgaactgcggtcgagataattgattaccgccgcaaaaaataataacaacatggcggtggtttgaatgcgtttaattcgggtactgcgttgaactaatccatctggtggcacgggaatatctgccgacgaagatggagtaaatgaagaacgcggatcgagggtgatattttctttttccacgccggactcctgtatttataattttaattgtttacgtaattgtgaattacgcaaggttgacattaacggcaggttaaagttttaggactttactaccgctcacaaaaaaatttttagtcgactgattgtgagcataggtaagcgggaatttcccggtatttatcttttgataaaaccgtgcacccgctaatagtttgctgtttttaatccgtacttaatgagcataacgcgtgttctcattaatggatcgaatcattgattgtttagctgaattcaaatggttacggagcgcaagggtggcatcaaggtcactgcggcaaatcagagcgctgagaatggtcatatgctcatcgacggcaatgatattgcgctgtttaagatcgctttcgtcccattgatagtgaaaatgaaagatgactgagatgatctcaagcgattgatcaaaaaagatattgtcggcagctgaaagcagtaaggagtgaaaatctctgtcaagttgcgagaacatgcgaaagctattgccgatgttgtcacgcagtagccgatgacgttcgagcatggttttcgcctgcagccagcggggatcatgatcaggcaggttgagaaagtgctgaagtgaatgtgtttcgagcatttcgcgtagctcaaacagctgctcggcgtaggattgatcgaattgcttcatgctccactggccgcgtttttcgctttgaataagattataacggccgaattttaaaagatattctcttacaaccaccgggctgacacccgcggcccgagccagttgcagttcagaaaaagtttccccagggcgtaactgacgctggtttatcatcgtgaaaaaagcctgctcaaacactttgttttgttcactcattgaagcggtagtacaggcgaaaccgtcatcatggtcaggtttacgcgcaataacatagtcgtttccaacctgcgttaagacgccgcattcgcgtaagtggctgagaatatgacgcactgttgtgcggctgatgttgtacatttccgccagcgcactttgcgatggaagtggggaagggatatgaccccgcgccatatcatcaatgacctggttaatcacattgtggcgtaaattttgtgaacgactcatattttcctccttgtgagtccattaaaacccgatttaaaacatttttatgcgtgtgttttcacaaaacagattttccgttccgctgccatttttcattttcattgatatctaaggcaacaaaaaatggagagccgaatcatgtctacgatgaatgttttaatttgccagcagccgaaagaattagtctggaaacaacgcgagatacctattccgggtgacaatgaagcattaataaaaattaagtctgtcgggatttgcggtaccgatattcatgcctggggtggaaatcaaccattttttagttatccacgtgttttaggccatgaaatatgtggggagattgttgggctgggtaaaaatattgctgatcttaaaaatggtcagcaagttgctgtgatcccttatgttgcctgtcagcaatgcccggcgtgtaaaagcgggcgtaccaattgctgtgaaaaaatttcagtcattggcgtgcatcaggatggcggttttagtgagtatttgagcgtgccggtggcgaacattttgcccgcagacggtattgacccgcaggcggccgcattgattgaacctttcgctattagcgctcatgcggtgcgtcgcgcagccattgctcccggcgagcaggtgctggtggtcggggcggggccaatcggtctgggcgcggcggcaatcgctaaagccgatggcgcacaggtggtggtggcggataccagtccggcgcgccgtgaacatgtggcaacgcgtctggaattacctttactggacccgtcagccgaagattttgacgcgcagctacgggcgcagtttggtggttcgctggcgcagaaagtgatcgacgcgacaggtaatcaacatgcgatgaataacaccgtgaatttgattcgtcacggcggcacggtggtatttgtcggcctgtttaaaggtgagttgcagttctccgatccggaattccataaaaaagaaacgacgatgatgggcagccgcaacgccacgccggaagattttgctaaagtcggtcgactgatggcggaaggaaaaatcactgccgacatgatgttaacccatcgctatccgttcgccacgctggcagaaacctacgagcgcgatgtgattaacaatcgtgagttgattaagggtgtaattactttctgataaggcgagattattaaagttgccatgcagcgtccggggaagtgttgggcgctgttttttttctgtttctcaatgatgttttgtaggccggagaagatgtgtaggtcgcaccttatgcgacctacacatcagtcagaaattacccttcacgttccacaactttaatttccaccatgccgatcccgagcttacgcggcgagtgtccgaggatattcccttcgttggttgagacaggttccggcggcacaattaccagtgtgtcggcatcggttgggttatcgaaatgcagtgtggtggtggtcacttcattgcccagcacaagagtttgttcttcattgcctacgcgtaccggaataggacggctggcgttattgccgtatgctttggcggtaatcaccaggtcaaatttcttcggcagcggatgcttgtactcgatttttacttcatcgcccagctgcgcgttggaccagcggccccacgactctggacgggaaatcccactaaactgtttcacctcttctggcgcaccggcgacgttgaagatgaaactgtcggctttgtagcgaatatcgttatcaacaattttcagcgtatcgacattgcctttataacgcgccatgtcgatgaccgtacctttaaatgccgttttgccctgccatgttgttttgtcaacatgctgaacaatttgctgaccgccaagctgcccttgcgagacacaccagtcggtggagagtgccagttccggagcccagagttgtgccatcttatagcaacggtcaacccagacgaaattgtcgcgtggagcgaaatcggccagctggaaacgcagcggtgctgagtattcgctttccggcagcggttccacgcgtttgtctgaaacccgcaacagcagcggcaaacggaaatggctacccgagaaggcaatcatgtttttctgctggtcgatggtgaactctttcatctctttagggaatttccacaggcggatgatatccggcttccacgccaatgttttctctttgatattgaggaagatttccgacattgactgcccggataaactgctacgaccaagtccgagatagttatcgccaccgagaatgtccagcaccgtcgcgccgttatccatcgtgttacgcttcactgccagcgtctcttgctgcggcttgtcgccacgaatgacaaaaaacaggttattgcgatcctgcttattaaggtatttccacgccgtgttgttcatcgctaaatggtcagaagagacgacgatgacggtatctttaaaccacggtgacgctttgattttgttgataaacgccgcgatattctcctggctgcaacttaccgcgctgaatgactggttcggcttaccgtcaaaatcatattttttgcggttacaggtacgcgagataaaaccatccgggtgatgggtatcgactgtcagggtaaacagtgagaatcgctgacctgagcgggaaagctcttcaaactttttccacgcttcatcgagaacggtatcgtcgtagaatccccagtcgttgcgatagtgcgggtcggccaccacgcttttcagctcttctgagccgtataagtggtcgaagccatgcgacttcaggaacacatctttaccggcaaaacgcagattcgcgccctgcacgaaatagttctgataacccgagtttttcaggatatcgcccagacagatgttctgcgggaagaagctggagacagaggcggaggcgttgccttcaaagggggcaaacagcggtatgccgcactgagaagccaccatgcccgcaatcgtgtaatccgttcctggcagctgctgcgtgtggctgaaatccaggccttcatttttcaacgcgcccagttcaggcgtgagatccgggaaagcttcgttatcaaaataggtccgctcgagactttcgccgtagatataaaccaggttgagtttcgggtcagggatagttttcgacggctctttataataagccgcaaagtccgggtcgccatcgcgtgactgggatttcaccagttccgttatctgacgaaatgctgggctggcgtccaccgaacccagcgccagtaagagcgccagcaggctgtaaccaaaatggtgcggatgatggcgacgacggcgcaggatccagcccagcgcaccgaacaccgctgtcagccccagcacaatgccgatacccggcaggatgtatttgctgacgccagcaccggtcaggctgttggttaaggtatagagaaccgcgtcgttaataccatcgccagtaaaatagtcgctggcaaacagggtgatatttaaaacgacaaatagccccagcaccgttaatgtggctgcaaaccaccaggtgttacgtcccgctttccatgcgtaaatcagcacagaggcgagaaaaagggcgaaagagagtagttctgacaacgggcgatcctcactaaaccgggccgtttagccaacgtttaagctttttgagaagcacaatgtaatggcgtcgccatattgctgcaattctagtgtcaaaaaaatgcgatgttgttaggaattagtttataaacagacttttttgatcgcggtcgcttcccgtgtaacagggggaaaaccgtccaggagcagggaaaagggcaggagagagccgcgtcagccgggtaacagctaaaacgcggcgtttcgcggttcaggaaatgaagttcagcccctgctttaacaccagatcgcaggctttggttttcaccttttctgccagcggagttgttccgatgttatccagattgagttgctgaccatctttggttttcagcaaaccctgaataccgtccagatagttggtgtcttctttttgctcttcactgttcaggcccagcttttccagcacctggttcttgatgttttcggcatcggttaccgaagccagcttttgcttcgcgcagtattgcagaatgcctgcggcattgttcatgttatctgcgcttaaggcctggtttccgctgctaagcaagttagttaatgacgcgagcgaccaaccgccttcctgtgtcgtgctgttttggttgccaagttcgctggcggcgctggagagcgcatctttccaggacgcagcatgcaccccggtggaaattaatgcgctggcggcaatggcacagcacagaaggtgtttaatagttttcatcatcattactcaaggtggaattgtgtcgcagtataccgccagaaacggggattaatactctttacccgttacccggctacggtagctatcccagttgaagatcacccacaaactgttacccaggcgcatacggtccatcacgcgttcgcccagcaactttgtcatctcttccatattactgttggtcagcatcccggttgggcgtttggaagaagagcggcgatcgacgatctggttgatgatcactttttcgtatttcgattcggtctgcacgccgatctcatcgatcaccagcagatcaacgttgctcagatcgttaagcagttgttcttcgctggtaccgctattcctgaaggtatctttcatcgccgacataatatcggccacggtgatgatcaatacggatttaccgcgtagcagcagctcgttgcagattgccgccgccagatggtttttgccggttcctggcttaccagaaaagataaagctggcgatgttgccgtcaaactcttcgacatactggcgcgctttgcttaacgcattcatctgcccttcacactcaacgcgatagttctcaaaggagcagttctgatgcagtggacgaataccggagcggttaaaggtgcgctgcattttcatcgcccgattttcacgttcgagagcggcggagcggatcgccccttgttctttttgccaggccagtagttcttcacccgttttgaatgcgggtttgatatgggcaggcatcattttttgcaggcgttgcatcaggtcgccaacgtttttcatcgttaccctctgaatcctggtggaatttggctgtcaggttcactgaccgtattcacatctcgtttcggcagtccgccgttgctggcacgaccgatttgcaggctgcgcgccagtttttgttgccactgcacatggtgaaagactttaccttccgcctgccagtaggcaatgaatgaggccagttcttcggtggttaccggctctcttagcgccacgccccatagcgccgccaggcggataaagtcggcatcgggttgccagtccggatacatggcgaatttccccatgggtacagcaacgggagcggcttgcggttcctgatagagttgatcgtccagagcgacatcgcttcccggacgcgccagcttttcttccagcgccagcagttcagccaggcgtgcaggcgtgacggcataaaacgccggggcattgttagcaaatacagcaaccacaccgccttcagcttttgccagaacggtttggtgatcgtgtaccagggcgtcaataccaacgacgtccggggtcaaaactctggaagacatactgtttctcaaatatggaacgatgaacgagaagggagataacttttatagtaacacacggaggagaggaggctgtctctcatccgtgtgcttaagcgaggcaattttatacgcgagggcgcttgcggtacaaccataatccaggaatggaaagaccgatggataacgcaccaacaatcgatgaagctgtaagaaagttggttaacagggtaatcatcaacggttcgctgtaacctagctggctgatttttaccgccgaaatcattgcggtataagccgatatgcccgggaacatagggataacggccgccacggtaaacactttcggatgcgccagataccagcgcgaccattgaataccaatggtgccgaccagcatagaagccataaaggttgaccactcaatattcaacccgctggtcatcaagatcattcgggaaccatgacctatcgagccaagcagcgcacaccagcgtaacgcccgcacgggaacgttgaacaccatcgcaaagccgaccgcaggaatggcggcgaggatcatatcctgcgccaatgcaaacagaaattcgatcacacccatccgcgtagcccccaaatcgtcagtgccatcaccacgccgacgcaggtagccagtgtcagcagactggcgatcgcccagcgtgccagtccggtattgatgtggcctttaaacatatcggcgacggcattaatcaacggaaagcccggcaccagcagcagaacgctggcggccatcgcaatggtgggggtattgctgaaagtggggagttgcaaaagcaatccggaaatggtggtggcggcgaaagcggtaaggcaaaagttgatctgtggatgaagatgacgttgtgccagcagctggcggatatacatcgcggtcgtactggcaaagaaggtgatgacggcaccatcccagccaccgttattgagtttacagaaacaggcgcaagaaaggccaaccattaaggctaccagccatcttgggtaacgtaatggctgaatttggctaaatcgtttctctacgcctttgtaatccagcagatgatgctccgcaagaatcacaatgtgctggacttcagtcaccacatgcatattaatgccgcgatcgtgatttttacgtgtcgatgtcaggcattgcccatctttaatagttgtcagcactatggcgttcgaagagatagaactttcgacactgtccattcccagcgcccgacccagtcgtgaggaaagctcatcaaccaacgcgctttccgcaccatgttgcaaaagaaataatccacactggatacaaagccgtgttacggctcgctgttgctcagtttgcataactcgccctttgtcatagacgtgctgcgtattgttcagataatgagaatccatttgtatcatgaagcacggttgttttgcggtaggttaagatcaaaattgcgctgattaatcctggttatcgggagaagctcggtgataaaaagcgaattatctctcgccgcaaacaaactatcacatgaatattatcatcataatgaatttattgtttggcctttacgaatcaggataatagataac

SEQ ID NO: 180 - DNA, 44751 bp, Escherichia coli
  source 1..44751: mol_type = genomic DNA
ggcaacggcagcggaagttgtcgagcagttgtgtgaactgacattgagttggggtaagcagccagtgcgctgtcattcgacccccggatttatcgttaaccgtgttgcgcgtccttattattccgaggcctggcgggcactggaagagcaggttgctgcaccagaagtgattgacgctgcacttcgcgatggcgctggtttcccgatggggccgctggaattaaccgatctgattggtcaggacgtcaattttgctgtcacctgttcggtgtttaacgctttctggcaggagcgtcgttttttaccttcgctggtgcaacaggaactggtgattggtggacggttgggcaagaaaagtgggctgggcgtgtacgactggcgcgcggaacgtgaggcagttgttggcctggaagcggtaagcgacagttttagcccaatgaaagtagaaaagaaaagtgacggtgtcacggaaattgacgatgttttattgattgagacacaaggcgagacggcacaggcgctggcaatacgactggcacgcccggtggtagtggtcgacaaaatggcgggcaaggtggtgaccattgctgcggcagcggtgaacccggactcagcgacccgcaaggccatttattacctgcaacagcagggcaaaacagtgctgcaaattgcagattacccaggaatgctgatttggcgaacggtagcaatgatcatcaatgaagcccttgatgcgcttcaaaaaggcgtggcctctgaacaggatatcgataccgccatgcgtcttggggtgaattatccatatggcccacttgcctggggagcgcaacttggctggcagcgaatattaaggctccttgaaaatctacagcatcactatggcgaagaacgctatcgcccatgttcattgctgcgccaacgggcgcttctggagagcggttatgagtcataaggcctggcaaaatgcccatgcaatgtatgagaacgatgcctgcgccaaagcgcttggcatcgacattatctcaatggatgaaggctttgctgtagtgaccatgaccgtcactgcacaaatgcttaacggtcatcaaagttgccacggcgggcagctattttcactggctgatactgcctttgcctacgcctgcaatagccaggggctggcagccgtcgcttctgcctgcacgattgattttttacgtccaggctttgccggagacaccttaactgctactgcgcaggtacgtcatcagggcaagcaaaccggtgtttacgacatcgaaattgttaaccaacaacaaaaaacggttgcgctgtttcgcggtaaatctcaccgcatcggcggcaccattacaggagaagcctgatgcgtgaagcctttatctgtgacggaattcgtacgccaattggccgctatggtggggcattatcaggtgttcgggctgacgatctggctgctatccctttgcgggagctgctggtgcgaaacccgcgtctcgatgcggagtgtatcgatgatgtgatcctcggctgtgctaatcaggcgggagaagacaaccgtaacgtagcccggatggcgacgttactggcggggctgccgcagagtgtttccggcacaaccattaaccgcttgtgtggttccgggctggacgcactggggttcgccgcacgggcgattaaagcgggcgatggcgatttgctgatcgctggtggcgtggagtcaatgtctcgggcaccgtttgttatgggcaaggcaaccagtgcattttctcgtcaggctgagatgtttgataccactattggctggcgatttgtgaacccgctcatggctcaacaatttggaactgacagcatgccggaaacggcagagaatgtagctgaactgttaaaaatatcgcgagaagatcaagatagttttgcgctacgcagtcagcaacgtacggcaaaagcgcaatcctcaggcattctggctgaggagattgttccggttgtgttgaaaaacaagaaaggcgttgtaacagaaatacaacatgatgagcatctgcgcccggaaacgacgctggaacagttacgtgggttaaaagcaccatttcgtgccaatggggtgattaccgcaggcaatgcctccggggtgaatgacggagccgctgcgttgattattgccagtgaacagatggcagcagcgcaaggactgacaccgcgggcgcgaatcgtagccatggcaaccgccggggtggaaccgcgcctgatggggcttggtccggtgcctgcaactcgccgggtgctggaacgcgcggggctgagtattcacgatatggacgtgattgaactgaacgaagcgttcgcggcccaggcgttgggtgtactacgcgaattggggctgcctgatgatgccccacatgttaaccccaacggaggcgctatcgccttaggccatccgttgggaatgagtggtgcccgcctggcactggctgccagccatgagctgcatcggcgtaacggtcgttacgcattgtgcaccatgtgcatcggtgtcggtcagggcatcgccatgattctggagcgtgtttgagcatatcaacctgcgagtaccctacaatgataaccaatacaaagcttgacccgattgaaaccgcgtctgttgatgagttacaggcgttgcaaacacaacgtctgaaatggacgctcaaacacgcgtatgaaaatgtcccgatgtatcggcgcaaatttgacgcagcaggcgtacatcctgatgatttcagggaactttcagatctgcgtaaatttccctgtaccaccaaacaggatctgcgcgacaactatcccttcgacacctttgccgtgccgatggaacaagtggtgcgcattcatgcttcttcgggaaccacaggtaaaccgacagttgtcggctatacgcaaaacgatattgataactgggccaatattgtagcgcgttccttgcgtgcggcaggtggcacgcccaaagacaaaattcatgttgcctatggttacggcctgtttactggtgggctgggcgcgcactatggtgccgaacgtctgggcgctacggtgatcccgatgtctggtgggcagacggaaaaacaagcgcaactgatccgcgattttcaaccagatatgatcatggttacgccatcttattgccttaacctgattgaagagctggagcggcagttgggcggtgatgccagcggttgctcgctgcgggttggagtgtttggtgctgagccgtggacacaggccatgcgtaaagagattgaacggcgtctggggatcaccgcactggatatttatggcctgtcagaagtgatggggccgggggtggcgatggagtgtctggaaactaccgacggcccaaccatttgggaagatcatttctatcctgaaattgttaatcctcatgacggcacaccgcttgccgatggtgaacatggcgaactgttattcaccacgctgaccaaagaagcattgccggtcattcgttaccgcacgcgtgatttaacccgactgttaccaggaacggcgcggactatgcgccgcatggatcgcatcagcggacgcagcgatgacatgttgatcattcgcggtgtaaatgtcttcccgtcacaactggaagaagagattgtcaaattcgaacatttatcgccccattaccaactggaggtgaaccgccgggggcatcttgattcactttctgtgaaagtggagttgaaagaaagcagcctgacattgacgcatgagcagcgttgccaggtgtgccaccagctgcgccatcggattaagtcgatggtggggatctctaccgatgtgatgatcgttaactgtggcagtatcccgcgttcagaaggcaaggcgtgtcgggtgtttgatctgcgcaatattgttggtgcctgacgtgtcgtctggcccgggtggggtaaagcgccagggccagaagtcgatacgacctgtgctatgattcataaatcacaacaataacaacagactgaatcgaatgagtaaacttgatacttttatccaacatgctgtaaacgctgttcctgtcagtggcacatctttgatctcctctctgtatggtgattcgctttcccatcgtggtggtgaaatctggctgggtagtctggctgctttactggaagggctgggatttggtgagcgattcgtgcgcaccgctttgtttcgtcttaataaagaaggctggctggatgtttcccgcatcgggcgacgcagtttctatagcctcagtgataaaggcttgcgcctgacgcgacgggcagaaagtaaaatttatcgcgcagagcaacctgcatgggatggtaaatggctcctgttgctttcggaaggtttagataaatcaacgctggctgatgtcaaaaagcagttgatctggcaaggttttggcgcactggcacccagcctgatggcatcgccgtcgcaaaaactggccgatgtacagacacttttgcatgaagcgggtgtggcggataacgtgatttgttttgaagcgcaaataccactggcgctttctcgtgcagcactgcgtgccagagtagaagagtgctggcatttaactgaacaaaatgccatgtacgaaacctttattcagtcattccgcccgttggtgcagctgttaaaagaggcagcagacgagttaaccccggagcgtgcatttcatattcagcttttactgatccatttttatcgccgtgtcgtccttaaagaccctttgttgccggaggagttgcttccggctcactgggcagggcatacggcnnnnnnnnnncaacatttatcagcgcgtagcgcctgctgctttagcgttcgttagtgaaaaaggtgaaacctcggtcggtgaactgccttcgccgggtagcctgtattttcaacgttttggcggtttgaatattgaacaggaggcgttatgccaatttatcagatagacggtctgactccggttgtgccagaagagagttttgtccatccgacagcggtattgatcggcgatgttattctcggcaagggtgtttacgttgggccaaatgccagcctgcgtggcgattttggtcgtatcgtggtgaaagatggcgcgaacattcaggataattgcgttatgcacggttttcccgagcaggatactgtcgttgaagaagatgggcatattggtcatagcgctatccttcacggctgcattatccgccgcaatgcattagtgggaatgaacgcggtagtgatggatggtgcggtgattggcgagaacagcattgttggcgcatccgcatttgtgaaagccaaagcagaaatgcctgctaattacctgattgtcggcagcccggcgaaactgattcgtgagcttagtgagcaggagctggcatggaaaaagcagggtacgcatgagtatcaggtgctggtgacacgctgtaagcagacgttacatcaagtcgaaccattgcgggaagttgaacctggcaggaaacgcctggtatttgatgagaatctgcgaccgaaacagtaacgtccagatactgaacgttctaatttttagcatgtgatacctaaaccgcaacgctgatacaggttgcggtttttttattgccgaatgcggcgctttacgcgttttgttttggtgtctttcaggacaatagagcaactcatccagtaatcttgtttacgccttcgcattatttatctcttttcgtttctatactgatttttctcaatccgttttattacagggcagggtgcgatgagcagcaatacatttactctcggtacaaaatccgttaaccgtcttggttatggcgcgatgcaactggcaggtcctggggtttttggtcccccaagagatcgccacgtcgctataaccgtgctgcgcgaggcgctggcattgggcgtcaatcacattgataccagcgacttttatggtccgcacgtcaccaatcagattatccgcgaagcgctttatccttactctgacgacctgacaattgtcactaaaattggtgcgcggcgtggagaggacgcatcctggttgcccgcattttctccggcagagctgcaaaaagcggtgcacgataatctacgtaatctcgggctggacgtactggatgtggttaacttgcgcattatgatgggggatggtcatggcccagcggaaggatcgattgaagccagcctgaccgtgctggcagagatgcaacaacaaggcctggtaaaacatattggcctaagcaacgtcacaccgacgcaggttgcagaggcgcgcaagattgccgaaatcgtctgtgtgcagaacgaatacaacattgctcatcgtgctgatgacgcaatgattgatgctttggctcgtgacggcattgcctacgtgccgttcttcccgctcgggggctttacaccgctgcaatcctctacgctgtcggatgttgctgcgagcctgggtgcaacacccatgcaggtggcgctggcgtggctgttacaacgttcaccgaatattttgctgatcccagggacgtcttctgttgcgcatttacgggagaatatggctgctgaaaaattgcatctttctgaggaagtgttgtctacgttggatggtatttcgcgagaataacgaatatacaaaagggaaagatgcatttcccttttgnnnnnnnnnngcatggagtgcatatgtttaagtccaggatttgcggctggataggtttacttcccctgtttatgctgagtcttccagtacaggcggaacttcgatgtgttgcaaatacagttgatattgaaccatttttttctgcggctaccgctgaagataaacaacaagttgaacaagctatcaacagtagcgtgaatcttgtccccttcggtttatctgcatcggactggaaagtgcatcgtggcgatttagtggtagaaggtaatatagagagtaatcaaaaattgattgttcttggtaatttgacagtcaaaggtaatatttccactttctctctttctaatccatgggttattctcggtaacgtgacggcaacgaatatagttacggattcaccactgttaattaccggttcgataaatgcaagtggactggtatttatcgactcatattacgataatccgtcttcgattaaggggagtattaatgcgcgtggaatatttatcaatgacataattgcacctgttgttgcgtcttcgacaaatagtgaattcatggtccgtgcgagtgacaaaaatgacactgaaaatgtcaaaaaagcgctgatgataataaatcctgatgcatattattggggtctaataaatgatgaagatgctctgaaagaaatttttaagcgaagcaatattcgcatggcagggaatgtctgtaatcagatgaaaaaagaagcgctgtttcgccctaagccttctcctgagttagtgcaggaattgcaaatgctggatgaaggcaacgttgctgcatttgaaggacgagatattgcgacatttgatcttgccataatgcgaactctcccaaggcttaaaggaatttcagctaacctacgcaaacaacttattaatagcaatgatgaacaaacgattgaaagtatggcgagatatatgcctgacaatgagattctggagttgaccgatcagcaattgggttaccagcctgttgttctggggttgctcgaccgtgaaccgctctctgtcgaaataatgacgcgaatgagtcgtctacctgatggtgtcggtccgttgaatcttgcgctacgtgaaaatctccctctggatatcgtaatgactctggcgaaaagagattgggatatgatcattcaggagctttataaagatgcgtggttattgcctgaatccattattgatggctatatccgcagtgatgattcctctattcgtcaggtcggtgctggaggacaactcacctacaatcaggcaatgcagttggcgaacgattcatcaaacaatgttgtcacaagcttagcgttcaagctggcagagatgaaacaccatggtcaattattgcggatgacgccacaggagagtgacaaagttgcagcctatttataccaaaaattcgagaatgacgatgatctaatacgtgtgttatttttagcattgccagataacttacagtttaattttgttaaaaggatggagaaaaaatcccctgcctacttttgctgtcgggatatgcaggtaattcactctgacgctgctctacaacggttattgacacgtttcaacgatcctgaggggtggagtaatctggcgaaaaatgagtatctgagcacgtcgatgaaacaaaaaatttggcaacgtgctttatcgcatcggaaaaataatccgaaagcagattcagctgcgtatgaaaccagcgctgatatgattttgtctgagcttatcagccacggtgaagttgatgatcagatgctattaaatgccaccgccctgatacgtttggaagactgggactttttagagagtgcattagttagttgggataatttacccgctgttgtcctcaaggaattacagcaaaatacgccacgcaatgatatttgggcgaagttttttctgaggcaggaaaacagctcccgtgcgcaggttgatgaagcattacgcgtctattatgcactcgaccccgatgcgttagcacaactggatgtactggcaaaacaaccggatcgtatatggtggagtacactggcgaaaagcaatctcacatttttcaagttcggcgcacttaacaaccgccacacaccgcctgcagtactggcggcagaaattgatcccgagtggtggattgtggcgatgaataatccccgttttccagttgatgtattaaaggcgaggctgaaacgtgatcctttgctggcgttagagcttgttaaccctgaactggatttagtccgccagctggcgcttaacggtaagacgcgcgcaatacgggaacaagcgatgagaaaacttgatgagttgtattgatccacaacgtaatatttcttaaccctttgattaattggggataattattcctgacagtgagtccccaataccttgatatattctgaatttttaatgaagcggcgtgttgcgatatctccgtcaggggaattgatgcaccatagcgcaaaccgaattatcaaggattgataatgacgctctaccagataaaaccgctctttcagtcgctgttaaggccgacgatgttttggctttacaagcaccacgttacagcgaatcacatcactcttgctgcactggcgctttctcttcttaccggattgctgttgatgttggtggcacaacccatcctctttatgctattgcccatcgtgctttttatccgtatggcgctcaatgcgctggatggcatgttggcgcgtgagtgcaatcagcaaacacggcttggggcaattttgaatgagactggtgatgttatttccgatattgcgctctatttaccatttttatttttaccggaaagtaacgcatcactcgtgatactcatgttattttgcaccatattgaccgagttttgcggtttactcgcgcagacgattaacggtgttcgcagttatgccggtccatttggcaaaagcgatcgcgcgttaatatttggtctgtggggtctggccgttgccatttatccacagtggatgcagtggaataatcttttatggagcattgcttcaattctgcttctctggactgcgattaatcgttgtcggagtgtgcttcttatgagcgctgaaagataatgctggaaaaatctctggcaacacttttcgcgttgttaattttagcaacgctgataaaccattttctgctatggcggttaccggagagaaaagaggatgaagttacattacgtattcgtacctggtggggcatcgtcatttgtttttcactggtgatttcaggtccacgctggatgacgttgacgttttttgcgctgataagttttctggcattgaaagaatattgtacgcttatatctgtacattttccgcggtggttatattgggttattcctcttaactatttgtttatcggttttaattgctttgagctgtatctattatttatacctttggctgggtttctaatattagccaccgggcaagtttttatgggggacccctccggttttctgcataccgtgagcgccattttttggggctggataatgaccgttttcgccttgagtcatgccgcctggttattaatgttgccaaccacaaatatccagggcggggcgttactggtgttatttcttttggcattaaccgagtcaaacgatattgcacagtatttatgggggaaatcctgcggcagaagaaaagtggtccccaaagtcagcccgggaaaaacgctggaaggtctggtggggggcgtaatcaccaccatgattgcgtcactgattattggaccgttgctgacaccgctaaatacattacaggcattattagcgggtttgttaattggtattagtggtttttgcggcgatgtcgtgatgtcagccatcaaacgagatattggtgttaaagatagtgggaaactattaccaggacatggcggactccttgacaggattgactcattaattttcaccgctccggtatttttttattttattcgctactgctgttactgaaggaaaatagagaaaatggaaaattcacgcatccatggggaacatttttttaccagcagtgataatacagcgttgttttatcggcactggcccgctttacagcccggggctaaaaaggtcatcgtcttatttcatcgcggtcatgaacattctggtcgtctacaacatctcgttgatgaactggcgatgccagatactgttttttatgcctgggatgcccgagggcatggacaaacttcggggccgcgtggttatagcccatctcttgcgcgttcagtgcaggatgtcgatgaatttgttcgttttgctgccagcgatagccaggtcggactggatgaggtggtagtgatcgcgcaaagcgtcggcgcagtgctggttgccacatgggttcatgattatgcgcctgcaattcgcgggctggtgctggcttctccggcctttaaggttaaattgtatgtaccgctggcacgtcctgcgctggcgttatggcatcgtctgcgtggtctgttttttattaattcctgtgtgaaaggacgctatttgacccacgatcggcaacgggtggcgagtttcaataatgatccgctgatcacacgggcgattgccgttaatatcttgctcgatctctacaaaacgtctgaacgtattattagagatgcggcggcgattacgctccccacgcaacttctgatatcaggcgatgactatgtggtgcatcgccaaccgcagattgatttttatcagagattacgtagccctctgaaagagctgcatctgctgccaggcttttatcacgacacgttgggtgaagagaacagggcgcaggcatttgaaaaaatgcaaagctttattagtcgtttatatgctaacaagtcacaaaaatttgattatcagcatgaagaccgcactggaccatcagcggatcgctggcggctcctttcaggtggacccgtgccattatcgccggttgatttggcgtatcgctttatgcgaaaggcgatgaaattgttcggggcgcactctgcgggcctgcatctcggaatgagcaccggctttgattcaggcagttccctggattatgtctatcaaaatcaaccgcaaggcagtaacgcattcgggcgcttaattgacaaaatctacctgaacagtgttggctggcgcggtattcgccagcgtaaaacccatttacaaatactgattaaacaagccgttgccgatctccacgccaaaggtttagccgtccgcgtggttgacattgccgcagggcatgggcgctatgtactggatgcgctggcaaacgagcctgccgtaagcgatattttgttacgtgattacagtgagttaaatgttgcacaggggcaagcgatgattgcccaacggggaatgtctgggcgggtgcgttttgaacagggcgatgcgtttaacccggaggaactcagcgcgttaactccgcggcctacgctggcgattgtctctggcctgtatgagctttttcccgaaaatgagcaggtaaaaaactcactcgcaggtcttgccaatgccatcgaaccgggcggcattctcatctacaccgggcagccgtggcaccctcaactggagatgattgccggggtgttaaccagtcataaagatggtaaaccgtgggtaatgcgcgtgcgttcgcaaggggagatggattcactcgtgcgtgatgccggatttgataaatgcacacaacggattgatgagtggggtatttttacggtttcgatggcggtgcgtcgtgataactgaacgtcggaacgtattgctacaaggcgctggctggttattgttgctggccccgtttttcttcttcacctatggatctcttaatcagttcaccgcggttcaggaccttaacagccatgatatccccagtcaggtattcggttgggaaacggcgatcccttttcttccctggactattgttccttactggagtctggatcttttatatggattttcgctgttcgtttgtagcacgacattcgaacagcgccgacttgtccaccggcttattctggcaacggtaatggcctgctgcggttttttgctctatccgctgaagtttagttttatccgtcctgaagtgagtggggtgacgggatggctattttcgcaacttgaactgtttgatctgccttataaccagtctccttcgctgcatattattctctgctggctactttggcgtcactttcgtcagcatctggctgagaggtggcgtaaagtctgtggcggatggtttttactcatcgctatttctactctgacgacctggcagcatcattttattgatgtcatcacagggctggcggtaggtatgttgattgactggatggtgcccgtcgatcgtcgttggaattatcagaaacctgatcaacgtcgaatcaaaatagcactgccatatgtcgtaggcgcgggctcgtgcattgtgttgatggagctaatggtgatgattcagttatggtggtcagtctggttatgttggccagtattatcgctactcattattggccgtgggtacggtgggcttggcgcgataacaacagggaaagatagtcaggggaaactcccgcccgccgtttactggctgacattgccctggcgcatcgggatgtggctgtctatgcgttggttttgtcgtcgcctggagccggtgagcaaaattactgctggtgtttatttaggggcgtttccacgacatattccggcacagaatgcggttctggacgtcacctttgaattccctcggggacgagcgacaaaagatcgactctatttctgtgtaccgatgctggatctggtggttccggaagagggggagctccgacaggccgtggcgatgctggaaacattacgcgaagagcaaggcagcgttctggtccattgcgcgttgggattatcgcgcagtgcgctggtagtggcggcatggttgttatgttacggacactgtaaaaccgttgatgaagcgattagttatattcgagccagacgttcgcatattgtgcttaaggaagatcacaaagcgatgctgaaattatgggaaaacaggtaagtggattgagatgtggactgaactacagtacacatcaagatcgtgtccggttatgcagcaacaatgctgtcgatggccgctttcgcgtcagactgcgctttcgctgccatttccggaccgtatgcgatcccttcggcgaagacaaatttcacatcggtaatgccgataaagacgaggaacgtggacagatacggcgtcaccaggtccgttggtccatctttgtggatcccaccgcggctggtaataacgatggcttttttacccgttaccagaccttccggaccgttctcggtatagcggaaagtaacgcctgcgcgtgcaaccaggtcaaaatagtttttcaactgagttgagatgttgaagttatacatcggtgccgcaataacgataacgtcgtgggctttcagctcggcaatcagctcatcggaaagcgccagagcttcctgctgacgcggagtcagcggcgcatcgctcggacgcagtgcaccaaccagttcgccatccagtaccggaatcggatttgcagccaggtcgcgaacggtgatttcatcagcggagtgcttttcgcgccattgttcaacaaaataatcggacaactgattagactgagagtaccctgccaggatgctggatttaagaactaataccttgctcatggtgtttccttatagatgtttgaatgggcgatgccccgttgcttgctgacactttattcacaatcctgccacagagatagcgcaataaatcgaagcctatgttcgaatttattgaacaacgcatagaaagccgcgatgtggtactctatatctatcatttaaaagaaaattaatcaggcagactactgcccactaacgttatgacagaacaacaaaaattgacctttacggccttgcagcagcggctggattcgctgatgctgcgcgacagactgcgtttttctcggcgtctgcacggtgttaagaaggttaaaaatcctgatgcacaacaggccattttccaggagatggcgaaagagattgaccaggcggcagggaaagtcctgctgcgtgaagcggcacgaccggaaattacttatcctgacaatttaccggttagtcagaaaaaacaggacattctcgaagcgattcgtgatcaccaggtggtgatcgtcgccggggaaacgggttctggtaaaacgactcagttaccgaaaatctgtatggagctggggcgcgggattaaagggctgatcggccatacccagccgcgtcgcctggcggcaagaacggtggcgaaccgtattgcggaagagctgaaaacggagccgggcggttgcatcggttacaaagtgcgtttcagcgatcacgttagtgataacacgatggtcaagctgatgaccgacggtatcctgctggcggagatccagcaagaccgcctgctgatgcagtacgacaccatcattattgacgaagcacacgaacgcagcctgaatatcgattttctgctcggctatttgaaagagttgctgccgcggcgtcctgacctaaaaatcattatcacttccgcgactatcgacccggaacgcttttcgcgccactttaataatgcgccgattatcgaagtctccggtcggacctatccggtggaagtgcgctatcgaccgattgttgaagaagccgacgacaccgagcgcgatcagttgcaggcgatttttgacgccgtagacgaactgagtcaggaaagccctggcgacattctgatctttatgagtggtgagcgggaaattcgcgataccgccgatgcgctgaacaagctaaatctgcgtcataccgaaatcttgccgctttatgcgcggctttcgaacagcgaacagaaccgcgtgttccagtcgcacagcggacggcgcattgtgctggcgaccaacgtcgcggaaacctcgctgaccgtaccggggattaaatacgttatcgaccccggtacagcacgtatcagccgctacagctatcgcaccaaagtgcagcgtttgccgattgaacccatttcgcaggcgtctgccaatcagcgtaaaggccgctgtgggcgtgtgtccgaagggatctgtattcgtctctattccgaagacgatttcctttcgcgcccggagtttaccgatccggagattctgcgtaccaacctggcctcggttattttgcagatgaccgcgctggggctgggcgatatcgctgcgttcccgtttgtcgaagcaccggataaacgcaatatccaggatggcgtgcgtctgctcgaagaactgggcgcgatcaccacggatgaacaggccagcgcctataaactgacgccgctcggtcgccagctctcgcagttgcctgtcgatccacgtctggcgcgtatggtgctggaagcgcaaaaacatggctgcgtgcgtgaggcgatgattatcacgtccgcgctttccattcaggatccgcgcgagcgtccgatggataaacagcaggcatcggacgaaaaacatcgtcgcttccacgacaaagagtctgacttcctcgcgtttgtgaatctgtggaattatcttggcgagcagcaaaaggcgctttcttccaacgccttccgtcgcctgtgtcgtaccgattatctcaactatctgcgcgtgcgcgaatggcaggatatctacacccagttgcgccaggtggtgaaagaacttggcattccggttaacagcgaaccggcggagtatcgcgaaattcacattgcgttgctgacgggtttactttcccatatcggcatgaaagatgccgataaacaagaatataccggcgcacgtaacgcgcgtttctccatcttccccggttctggtttattcaaaaaaccgccgaaatgggtaatggtggcggaactggtagaaaccagccgcctgtgggggcgcattgctgcgcgtatcgacccggaatgggtggagcctgtcgctcagcatttgattaaacgtacctacagcgaaccgcactgggaacgggcgcagggcgcggtgatggcaacggaaaaagtcactgtttatggtttgccgattgttgccgcgcgcaaggtcaactacagccagatcgatccggcgttatgtcgtgaactctttattcgccatgcgctggtggaaggtgactggcagacgcgtcacgcattcttccgtgaaaacctgaaactgcgggccgaagtggaagagctggaacacaaatcacgtcgccgcgatattctggttgatgacgaaacgttgtttgagttctacgaccagcgcatcagccacgatgtgatctctgcgcgccacttcgatagctggtggaaaaaagtcagccgcgaaacgcctgatttgctcaactttgaaaaaagcatgttgatcaaagagggcgcagaaaaaatcagcaagctggattacccgaacttctggcatcagggcaatctcaagctgcgtttgagctatcagtttgagcccggcgcggatgctgacggtgtgaccgtacatattccgctgccgttacttaaccaggttgaggaaagcgggtttgaatggcagatccccggtctgcgccgcgaactggtgattgctctgattaaatcgttgccgaaaccggtacgccgtaattttgtacccgcgccaaactatgccgaagcgtttttaggccgcgtcaaaccgctggagttaccgttgctcgacagccttgagcgcgagttacggcggatgaccggcgttaccgttgaccgcgaagactggcactgggatcaggtgcccgatcacctgaaaatcaccttccgcgtggtggacgacaaaaataagaagctaaaagaagggcgctcattacaggatctgaaagatgcgctgaaaggcaaagtgcaggaaacgctgtccgcggtggcggatgacggtatcgagcagagcgggctgcatatctggagctttgggcaactgccggaaagctacgaacagaagcgcggcaactataaagtgaaggcgtggccggcgctggtggatgaacgtgacagtgtggcgatcaaactgtttgataacccgctggagcaaaaacaggcaatgtggaaccgtctactgctgctaaatattccctcgccgatcaagtatttacatgagaagttaccaaacaaagccaagctgggactgtactttaacccgtatggcaaagtgctggagctgatcgacgactgtatctcctgcggtgtggatcaactgatcgacgccaatggtggcccggtctggacggaagaaggctttgctgcgctgcatgagaaagtgcgtgccgaactgaacgacacggtggtagatattgcgaagcaggtcgagcaaattcttacggcagtgttcaatatcaacaaacgtctgaaagggcgggtggatatgaccatggcactggggctttctgacattaaagcgcagatgggcgggttggtatatcgcggatttgtcactggtaacggcttcaaacggctgggcgacacgctgcgatatttgcaggcgattgaaaaacggctggaaaaactggcggttgatccacatcgcgaccgtgctcagatgctgaaagtcgaaaacgtccagcaggcgtggcagcaatggatcaacaaactgccgcctgcacgtcgtgaggatgaagacgtgaaagagatccgttggatgatagaagagttgcgcgttagttacttcgctcaacaacttggtacgccttatccgatttcagataagcgtattttgcaggcgatggagcagattagcggttaaccctgctatttgcctgataaagaaaaaacccggtaagcatttagcgccgggttttttattaattctaaaacggtaagggtaaaaattcaggaattcagaaaaatacaattctctgctgcaagatgaataatgtttatctacagcatttccttaaaagatatgtcaggcttgcggagtggcggttaaggacatacgacttcctcctttcagagtgctccgcttctcactattatctcacgcagtattcttaagggaacgataaggaggaaccatgaacattaccccgtttccgacgctttcgccggcaactatagatgccataaatgttatcggacagtggctggcgcaggatgatttctccggtgaggtgccgtatcaggccgattgcgtgatccttgcaggcaatgcggttatgccgactatcgacgcggcatgtaagattgctcgcgatcagcaaattcctttactgattagtggtggtatcggtcactcgacaacttttttgtatagcgccatcgcacagcatccgcactacaacactatccgcaccactggcagagcagaagcgaccatcctggcggatatcgctcatcagttctggcacattccgcatgaaaaaatctggattgaagaccagtcaacaaactgcggtgaaaacgcacgctttagcatcgcgctattgaaacaggccgtagaacgagttcatacggctatcgttgttcaggaccccaccatgcagcggcgcacgatggcgacgttccgccgtatgactggggacaatcccgatgcaccacgctggttaagttatcccggattcgttcctcagttaggaaataacgcagacagtgtaatctttattaatcagttacaaggattatggccggttgagcgttatctctcactactcactggcgagctgccgcgtttacgcgatgatagcgatggctacggtccccgcgggcgagattttatcgttcacgttgattttccggcagaagtcatccatgcatggcaaacgctgaaacatgatgcggtgctcatcgaggcgatggaaagtcgctcgttacgttaaaaattgcccgtttgtgaaccacttgtttgcaaacgggcatgactcctgacttttatttctgccttttattccttttacacttgtttttatgaagcccttcacagaattgtcctttcacgatgccgtctctctgatgattgatgttaattaacaatgcattcaccgaaaacaaacatataaatcacaggagtcgcccatgtcagtacccgttcaacatcctatgtatatcgatggacagtttgttacctggcgtggagacgcatggattgatgtggtaaaccctgctacagaggctgtcatttcccgcatacccgatggtcaggccgaggatgcccgtaaggcaatcgatgcagcagaacgtgcacaaccagaatgggaagcgttgcctgctattgaacgcgccagttggttgcgcaaaatctccgccgggatccgcgaacgcgccagtgaaatcagtgcgctgattgttgaagaagggggcaagatccagcagctggctgaagtcgaagtggcttttactgccgactatatcgattacatggcggagtgggcacggcgttacgagggcgagattattcaaagcgatcgtccaggagaaaatattcttttgtttaaacgtgcgcttggtgtgactaccggcattctgccgtggaacttcccgttcttcctcattgcccgcaaaatggctcccgctcttttgaccggtaataccatcgtcattaaacctagtgaatttacgccaaccaatgcgattgcattcgccaaaatcgtcgatgaaataggccttccgcgcggcgtgtttaaccttgtactggggcgtggtgaaaccgttgggcaagaactggcgggtaacccaaaggtcgcaatggtcagtatgacaggcagcgtctctgcaggtgagaagatcatggcgactgcggcgaaaaacatcaccaaagtgtgtctggaattggggggtaaagcaccagctatcgtaatggacgatgccgatcttgaactggcagtcaaagccatcgttgattcacgcgtcattaatagtgggcaagtgtgtaactgtgcagaacgtatttatgtacagaaaggcatttatgatcagttcgtcaatcggctgggtgaagcgatgcaggcggttcaatttggtaaccccgctgaacgcaacgacattgcgatggggccgttgattaacgccgcggcgctggaaagggttgagcaaaaagtggcgcgcgcagtagaagaaggggcgagagtggcgttgggtggcaaagcggtagaggggaaaggatattattatccgccgacattgctgctggatgttcgccaggaaatgtcgattatgcatgaggaaacctttggcccggttctgccggtggtcgcatttgacacgctggaagaggctatctcaatggctaatgacagtgattacggcctgacctcatcaatctatacccaaaatctgaacgtcgcgatgaaagccattaaagggctgaagtttggtgaaacttacatcaaccgtgaaaacttcgaagctatgcaaggcttccacgccggatggcgtaaatccggtattggcggcgcagatggtaaacatggcctgcatgaatatctgcagacccaggtggtttatttacagtcgtaatgagtaaaagaggcggaggttttttcctccgcctgtgcgcgtcagagtttagcgaatttttcgagggtgcgaataagctgcgtgacgaagccatattcgttatcgtaccaggcgaccgttttcaccagttgtaaatcgcccacggcggtaatttccgtttgcgtggcatcaaacaccgaaccgaaatggctgccaatgatatcggaagagactatttcttcatcggtataaccaaatgactcgttattggtggttgcttgtttaagtgcgttattcacctcttcggcagtcactttttttccgagaatcgataccagttcagtgaccgaacctgttttcaccggcacgcgttgcgcatgacctttcagtttgccgctcagttccgggatcaccagaccaatggcttttgccgcccccgtagtgtggggaatgatattttctgccgctgcgcgtgaagcacgtaaatctttaccacgtgggccatccaccagtgactgggtgccagtataggcatgaatggtcgtcatcgtgccgacttctatcccgaaactgtcatgcaaggctttggccatcggcgcaagacagttagtggtgcatgacgccacggaaacaatggtgtcgttgccatccagagtgtcgtcattgacgttataaacgatagttttcatttcaccggcaggggcggaaatcaacaccttcttcgcaccagcatcaagatgcgcctgcgatttctcggcggaggtataaaagccagtacattcgacaatgatttctgcacctttcgctttccacggaatatttttagcctctttttcggcgtaaaccgcgatacttttcccatcaacgataagtgaatcttccgtaaaatcaacgctccaggggaatggtccgtagtttgaatcatgtttcagcaggtaggcgagaatttttggggaagtgagatcattaatagcgacaacgtctatgttgcttttgacttcaagtaatcgacgcaacaccagtcgaccgatacgaccaaaaccgttaataccaactttactcatggttttctcctgtcaggaacattcggatgaaaattgatcctttccaggcttagaccaggattgtgggatgggcaatctccattcttacagtgaaacgtaacgtactgaaaacgggtgaacaatatttaatgaaattttgagaaaagcccgttatgttaacggaaaattatgttaaagcaggaaatgttatggaaaataaatactcaaggttacaaatcagcattcactggctggtctttttgctggttatcgcagcgtattgcgcaatggagtttcgtggtttcttcccacgtagcgatcggccactcatcaacatggttcatgtttcctgtggtatctcaattctcgtgctgatggtggttcgtcttttgttaagactgaaatacccaaccccgccgattatacctaagccaaaaccgatgatgacgggactggcgcatttgggacatttggtgatttatctcctgtttattgcgctgccagtgattggtttggtgatgatgtataaccggggcaacccgtggtttgcgtttggtttgacgatgccttacgcttcagaggccaatttcgaacgggttgatagcttaaagtcgtggcatgagacgctggcgaatctgggatattttgtcatcgggttgcacgctgcggctgcactggcacaccactatttctggaaggacaacacacttctacgcatgatgccgcgtaaacgttcctgaaggatatttaaagaaaacgcctgtactaaaaccgacccgtggtacaggcgaagaatacgggtctacatcggaagcgcctattatatttatttgtatgacaaataaaaccataatccttgcccatacgtccatctggcttatttttaatcaattcacccgatctttgatctcatcaacggtatcaaaataaaccagcgtataacgttcaaatcgaacataagattcgataaaccatggaggttatatgaaaaaactggcacttattttgtttatgggaacgcttgtttccttttatgccgatgccgggcgcaaaccctgttctggttcgaaaggggggatctcacactgtacggcaggcggcaaatttgtctgtaatgatggttctattagtgcctcgaaaaaaacatgcactaactgaagtgtaaaaggggtgccatgagaaaatgaatctgctagtcagatgcgcggggaaaatccccgcgcttgcccttacctggacgtgcaggccatgagcgcagcaacctccttatcaccgtcccggaaccgcagttcgtagagcgtttgtcgggtcaggagtgtgaatgtcagaatcgtaatgcagataatgagcagacacaccaccagagggttgtgcttcatagcctttctccttgccggatggcgggtaagaggctaagatctgaattgctaggttcattcgttggcctcggttgatagaaatatcggtcggggccttcgtctttctgattcccggttagcctgaaaacagaaagtctcaggcacccgcaggcatcctatgaggtttccttagggacgaaaataatcacttcacgaaattgcgtgctgttttccagaatttttcgtcattcggattagccagtttagccattcgttactctcttcattccaatagcattaattttctctgcaataattgttgtaaaaatgtgacgcaaagaggtttttggtcataagtaattaccgtcaagtgccgatgactttctatcaggagtaaacctggacgagagacaacggtaatgaatacaactccctcacagcgattaggttttttgcatcacatcaggctggttccgttatttgcctgcattcttggcggtatcttagttctattcgcattaagttctgctctggctggctatttcctctggcaggccgatcgcgatcagcgtgatgttactgcggagattgagattcggaccgggttagcgaacagttcagattttttgcgttcagcccggatcaatatgattcaggccggggctgcgagtcgtattgcggaaatggaagcaatgaagcgaaatattgcgcaagccgaatcggagattaaacagtcgcagcaaggttatcgtgcttatcagaatcgaccggtgaaaacacctgctgatgaagccctcgacactgaattaaatcaacgctttcaggcttatatcacgggtatgcaacctatgttgaaatatgccaaaaatggcatgtttgaagcgattatcaatcatgaaagtgagcagatccgaccgctggataatgcttataccgatattttgaacaaagccgttaagatacgtagcaccagagccaaccaactggcggaactggcccatcagcgcacccgcctgggtgggatgttcatgattggcgcgtttgtgcttgccctggtcatgacgctgataacatttatggtgctacgtcggatcgtcattcgtccactgcaacatgccgcacaacggattgaaaaaatcgccagtggcgatctgacgatgaatgatgaaccggcgggtcgtaatgaaatcggtcgcttaagtcgtcatttacagcaaatgcagcattcactggggatgacagtagggactgttcgacagggcgcggaagagatttatcgtggcaccagcgaaatttcagctggcaatgcggacctgtcatctcgcaccgaagaacaagcggcggctatcgaacaaactgccgccagcatggagcaactcactgcgacggtgaaacagaatgcggataacgcgcatcatgccagcaaactggcgcaagaggcttctattaaagccagcgatggcgggcagacggtttccggtgtagtaaaaacgatgggcgctatctccacgagttcgaagaaaatttctgagatcaccgccgtcatcaacagtattgctttccagacgaatattctggcactgaatgctgccgttgaagccgcgcgagcgggtgagcaagggcgtggatttgccgttgtcgccagcgaagtacggacactcgcaagtcgcagcgctcaggcggcgaaagagattgaaggcttgatcagtgaatcagtcaggttaattgacctggggtcggatgaggtggcaacggccgggaaaaccatgagcactattgttgatgccgtcgcgagtgtcacacatatcatgcaggaaatcgccgccgcctcggatgaacaaagtagaggcataacgcaggttagccaggcgatttctgaaatggataaggtgacgcaacagaatgcttctctggtagaagaggcctcagcggcggcggtgtcccttgaagaacaggcggcacgattaactgaggcggtggatgtattccgtctgcacaaacattctgtgtcggcagaacctcgcggagcgggtgaaccagttagtttcgctacggtgtgaaaatgttcaaggagggatcgacagatcccttcacctttcagaacggcattgattttcgaatagcgttaatcatcaactggcaaccagaagagaacgtcgcatctacgcgggtcagtattccaatcggttcgactgcaccatgtcccggaacaggcagggccaccagcgtggcatgacgcaggtcgtcttttacagcgccagaagggacaaaccacacgtaatcgtattcaaccgtaagttgacgagatagcgaagcagacagcgtttcgatacaacccgaaggaattttacagccctggctctgcactaatgcatctgaatgctggcgtggcgcagtgccttctggtgatacaacgaccggccattccagcacccggcttagcgttacgttctcctgaagtagcgggtgattagggcggacaaccagcttcaacgattcaagaaacagcagttcgtaattaagcccggtcatcagttcaggatctgacatccgaccaatgccgatatcgatttccccggtttttaaacccgccagaatcatagggttactcattgtcgcaacttgcaaggtcgtctctttttgttgctgatgaaactgacctataaccgaaggtaatatccccagtgccgcagtaggtagtgcaccaaccctgacgacatcattattaagaccttctttacgatgaagcgactgtccggcagtgttgatggcgtcaagaactctgactgcatgcgttaaaaattgttcgccgggtaaggtaagttgcgccccctgacgaccacgctcaaacaagcgagcgccagtcagctgctccagttcattcaatgtcttagagagcgcaggttgactcaaattaagggtttcagccgcgcgccccaaagttccttgttgtgcgacagctacgaatgtatgaaggtggcgcaaacggatgcgctgactaaacagactatttttttccataagcgatgttaaaaacgaagcggtgtcgctgacaagtgaagttgtttgattatgataacttgattgcaaaatattattaacaattaaagcaattatgttacagcaaaatggataatattgatgttttcgcggcgagatcacagtttgtaaattcttcccgcaagagtgaatgcggttacctacactccagattactgaccactggaggcagacactatggcgaacagcatcacggcggatgagattcgggaacagttttcgcaggcaatgtcagccatgtaccagcaagaagttccgcaatatggcacgctgctggaactggtagctgatgtgaatctggctgtgctggaaaacaatcctcaactgcacgaaaaaatggtaaatgcagacgagctggcgcgactgaatgttgaacgtcatggggcgattcgcgttgggactgcacaagagcttgctactcttcggcggatgtttgccattatggggatgtacccggtgagctattacgatctctcgcaggcaggggtgccggtacattcgacagcatttcggcccattgatgatgcttctctggcgcgtaatcccttccgcgtttttacctccttactccgccttgagcttatcgagaacgaaattttgcgccagaaagcggcggagattctgcgtcagcgcgatatcttcaccccacgttgtcgacaactgttagaggaatatgagcagcagggcggttttaacgaaacacaggcacaggagtttgtgcaggaagccctggaaacgtttcgctggcaccagtcagcaacggtagatgaagaaacctatcgcgccttgcacaacgaacatcggttgattgctgatgtggtctgttttcctggatgccatatcaaccacctgacaccacgtacgctggatattgaccgggtgcagtcgatgatgcctgaatgcggaattgaacccaaaattctcatcgaggggccgccgcgccgcgaggtaccgattttactacgccagaccagctttaaagcactggaagagacggtgttgtttgcggggcagaaacagggcacgcataccgcgcgctttggtgaaattgagcagcgtggcgtggcattaacgccgaaagggcgacaactgtatgatgatcttctgcgtaacgctggaaccgggcaggataatctcactcaccaaatgcatttacaggaaaccttccgcacttttcctgacagtgagtttttaatgcgtcagcaagggctggcatggttccggtaccgtctgacgccttcaggtgaggcgcatcgtcaggcgattcatcccggagacgatccacagcccttaattgaacgtggttgggtcgcggcgcaacccattacctatgaagatttcttgcccgttagcgcggcggggatcttccagtcaaatctgggtaatgaaacgcagacacgcagtcacggtaatgccagtcgcgaagcatttgagcaggcgttgggttgtccggttttggatgagttccagctttaccaggaagcggaagaacgcagtaaacgtcgctgtggtttgctttaaattctgaccatccgcctttgcaaaaatttgcctgattttacaaacgaatcaggctcatcccatcgacataaaaaaaatgccgatttatgcatattctctcagttcaacaattggattattaataaatattgtctagagtgagcggtcataaataagcactttcttgccgctgaaaacgaccagcgcgggaccattcacaacaccagaaggactcactttcaggtatggatcgtagacgatttattaaaggttcaatggctatggccgccgtgtgcggtaccagcggcattgcttctcttttttctcaggcggcattcgcggcagattctgatattgccgacgggcaaacccagcgttttgacttctccattctacagtcaatggcgcacgacttagcgcaaacagcgtggcgtggtgcgcctcgtccgttacctgacacgctggcgacaatgacgccgcaggcttataacagtattcaatacgacgccgaaaaatcgctctggcataacgttgagaaccgtcaactggacgctcagttcttccatatgggaatgggattccgtcgccgcgttcgtatgttttctgtagatccagcaacacatctggcgagtgaaattcactttcgcccggagttgttcaaatacaacgatgcgggtgttgatacaaaacaattagaagggcaaagcgatctcggctttgccggttttcgcgtgtttaaagcccccgaactggcgcgccgtgatgtagtatcatttctcggcgcgagttatttccgcgccgttgatgatacatatcaatacggtttgtcggcccgcggcctggcgatcgacacttacactgacagtaaagaagagttccccgactttaccgccttctggtttgatacggtaaaaccgggggcaactacctttaccgtttatgcgttgctcgatagcgccagcattactggtgcctataagttcactatccattgtgagaaaagtcaggtgattatggatgtggaaaatcacctgtatgcgcgcaaagacattaaacagctgggcattgcgccgatgaccagtatgttcagctgcggtactaatgaacgtcggatgtgcgatacaattcatccgcaaattcatgactctgatcgtctgtccatgtggcggggcaacggcgagtggatttgccgtccgctgaataatccgcaaaaattgcagttcaatgcttacaccgacaacaacccgaaagggtttggtttattgcaactggatcgtgacttctcccattatcaggacattatgggctggtataacaaacgcccaagtctgtgggtggagccgcgtaacaagtggggtaagggcaccatcggcctgatggaaatcccaacaacgggcgaaacgctggataacattgtctgcttctggcagccagaaaaagctgtaaaagcaggtgatgagtttgcattccagtatcgtctgtactggagtgcgcaaccgcctgttcattgcccattagcgcgcgttatggcgacgcgtaccggcatgggcggtttcccggaaggttgggcaccaggtgaacactatcccgaaaaatgggcgcgtcgttttgccgtcgatttcgttggtggtgatctgaaagctgccgcaccaaaaggcattgagccggtgattacgctttccagtggggaagcgaagcaaatcgaaattctctatattgaacccattgatggttatcgtattcagtttgactggtatccgacttcggactccactgatccggtcgatatgcggatgtatctgcgttgtcagggcgacgctatcagtgaaacatggctgtatcagtatttcccgccagcgccggataaacgtcagtatgttgacgaccgcgtgatgagttaatcgttttttcttcggcaccttcttcgggaggtgccgtctggttaaacacgatcccgctcgcatttttccctaagttaaatgagtaatctgatggtgtgtatttcagatacaccttgtcagccactaacagggagtgcgtatgtttccagaataccgagatttaatatcccgtctgaaaaacgaaaatcctcgctttatgtccttgttcgataaacacaataaacttgatcatgaaattgccagaaaggaaggttccgacggtcgagggtacaatgcggaagtggtccgcatgaaaaaacaaaagctacagttaaaagatgagatgctcaaaatcctgcagcaggagagcgtcaaagaggtgtaaactttcctaagccgccagccaggcggcttttttaacaacagcatggattgactggagataagatgactgaaacgataaaagtaagcgaatcacttgaattacatgctgttgcggaaagtcacgtcacacctctttatcagttaatctgtaaaaataaaacctggttacagcagtcgctaaactggccgcagttcgttcagagtgaagaggacacgcgaaaaacggtgcagggtaatgtgatgttgcatcaacgcggctatgccaaaatgttcatgattttcaaagaagatgaacttatcggcgttatctcgtttaatcgtattgaaccactgaataaaactgctgaaatcggctactggctggacgaatctcatcaggggcaggggatcatttctcaggcgctgcaggcattgattcatcattacgctcagtctggtgaacttagacgcttcgtgatcaaatgtcgggtggacaatccgcaaagcaaccaggtcgctttgcgcaatggttttatccttgaaggttgcctgaaacaggctgagttcctgaatgatgcctatgatgatgtgaacttatacgcgcgtattatcgattcataataaccctgccagcggcgttcgcgtaatgcgctcctcgccgttaatgacttttggaccacggacatgaaccgtgtcgccatcaaaggcttcaacgacggcgtggtcggttaactccacatggttttcaattatcaccgcacctgaaatacggctctcaccttgtattacaacgtgctcgtcgagcagaatcggtccaccacgtaccacggcatttccgccaatcaagacatgatgttttaacacacaattaccttccacaatggcatattccgccacctgcgaactgtaatgaatcgtcggaatggcatcttcttctatgccagctttcacctgcgcgtgaccgtagactttagcgcaatcgcatagccagacgttgttctcttcattaccttcaacactggcaaaatcaaaaacttcggcgcgatgttcaataaaagcataccggacgacggcatcgccataaatttgtgcctggtggacaatacgcgaggcgctaacccttgcgcgatcataaatttggagcaggagttgatggtcgggcgttaagccttgtgcggcgacgatcatagaatgttgatcaattaaggcgtgaccaaatattctacattgcccgtaaactaatgagtcatgaatggtgacactgtcacttatgtatgcaccctggctgatttcactattatcgatccagacattatccgttgcgtaaacctctccccacagtacgctggtgccggtgatgcgcgtattaccggaaatcaccgttccgccgaacgcaatagcattctggtcgtaaatccagcaatttccttcctgtgctaacaccgtttcgcgatcgatccagccgccagcggttcctgctatcacatcgttaaaatcgctaatggcgataatctgccgtaataacacattttttttagtgccatcttcctgataactaaaggctcgctgttcttcacttagacgatatttgcgcatagcgttttcccacaggtgacttactataaccgtagcaaattctgcggctctggctatgctcgagaaaattccataaaatgcatttcaaatatactttataaattaaacaaaatgagtaagaagatgcagagcgataaagtgctcaatttgccggcaggctactttggtattgtgttggggacgatagggatgggatttgcctggcgctatgccagccaggtttggcaggtcagccactggttaggggatgggctggtgattctggcgatgatcatctggggattattaactagcgcatttattacccgactcatacgctttccgcatagcgtgctggcggaagttcgccatccagtgctgagcagttttgtgagtttgtttccggcaacgacgatgctggtggcgattggttttgttccgtggtttcgcccactggcggtgtgcctgttcagttttggtgtcgtggttcagttggcttatgccgcctggcaaactgcgggattatggcgcggatctcaccctgaagaagctaccacgcctggactgtatctgccgacagttgccaacaactttatcagcgcaatggcctgtggtgcgttgggctacaccgacgccggtctggtgtttttaggcgcaggcgttttctcatggctaagccttgaaccggtgatcttgcagcgtctgcgcagttcgggagaattacccacggcactgcggacatcactcggcattcagctcgctcctgcgctggtggcttgtagtgcctggctgagcgtcaacggcggcgagggtgacacgctggcgaaaatgcttttcggttatggactgctgcaactgctgtttatgctacgtctgatgccatggtatctctcccagccatttaatgcttcattctggagtttctcgttcggcgtatctgcactggcaaccaccggtttgcatctggggagtggcagcgataatggatttttccatacgctggcggtgccgctgtttatctttaccaattttattattgcaatactgctcatccgtacttttgcgcttctgatgcagggaaaattgttagtcagaaccgagcgcgccgttttaatgaaagcagaggacaaagaatgatcattcgtgacgaaaactattttactgataaatatgaattaacccgcacacactctgaagtactggaagcggtgaaagtggttaaaccgggtaaaacgctggatctgggctgtggcaatggtcgtaacagtctttacctggcagccaatggttatgatgttgacgcatgggataaaaatgccatgagtatcgccaacgtcgagcgcattaaatccattgaaaatctggataatttacacacccgagtcgttgatctgaataacctcacatttgatagacagtacgattttattctttcgactgtggtactgatgttccttgaggctaaaaccatcccagggctgattgtcaatatgcaacgttgcactaaacctggtggttacaacctgattgtggcggcgatggataccgctgattatccatgtaccgtcggcttcccgtttgccttcaaagagggagaattacgtcgatattacgaaggctgggagagggtgaaatacaatgaagacgtcggcgaactgcaccgcaccgacgccaacggtaatcgtattaaactgcgtttcgccacgatgctggcacgtaaaaaatgacccgctaagaataaggcgcgtgaaaattccccacgctgagatgatttactgttcttcttttcggtaagcatattttttatcgaagggatgtgaaattaatcacagtagtcgaagttttttagcagcttaacttactgaaatttaactactgatgattgacttagcccctttttcggcattgactatgtcgtctgaaaaggggctgaaaaatttattttcaccaacactttttttgccacaacacgaagcggcgctttttgctataacttagaaagtaatataatcatctcaggaaactattcatgcgtaccacatcatttgcgaaagttgcagctttatgcggcttgttggctctgtctggttgtgcctctaaaatcacccagccagataaatattctggttttttaaacaattactctgatttaaaagaaacaacctcagcaacaggtaaacctgttttacgttgggtagacccgagttttgatcaaagcaaatatgacagcatcgtctggaacccaatcacttattatccggtaccaaaaccttctacccaggtagggcagaaagttctggataaaattttgaactataccaacaccgaaatgaaagaagcgatagcgcagcgtaaaccactggttaccaccgctgggccgcgtagtctgattttccgtggggccattaccggtgtagataccagcaaagaagggctgcaattctatgaagtggttcctgttgcattagtggttgcggggacacaaatggctacaggccaccgtaccatggatactcgcctctattttgaaggtgagctgattgatgcagcgactaataaaccggttatcaaagtcgttcgtcagggcgaaggtaaagacctgaataacgaaagtacgccaatggctttcgaaaatattaaacaagttattgatgacatggcgaccgatgccaccatgtttgacgttaacaaaaagtagttccagacgcgccatcgttagatggcgctttttatccggtgcgccgtaaaaccccatccttcagggcggggatataaggcgcggttttccacctgaccaggtgtttgctgttgttcaatgtattggcggatgacggatattggcgcacctccgcagctactggcaaaatagccaggactccacaaaacgcctttgtagtaatacctgactgcaatatctggtcgatctcgtcgcagtaacctactcgatacgcctttgaggctgtttaccagactggatatcgccagtttgggaggatagttaattaacaaatggacgtgatctggttcgccatccatttaaaccagttcagcttcaaaatcagcacatacatttgaaaagtaagtgcgtagtttttctgtcgcgtcatagtcaaaaatctgacgtcggtatctggtgacaaagaccaggtgaacatgcatcaggaaaacacaatgcttccccgtcggatatcggtttctttattcatagaccaaagtatcatttggcctgtgaaacgattacaggcatttaaattccagttaagacccggtggtcaacaggagcgtgaaatgaggcgcttcgcaggtgcatgtcgtttcgttttcaatcgtgctctggcgcttcagaatgagaatcatgaggccggtaataaatacatcccttacgggaaaatggcttcctggctggttgagtggaaaaacgccactgaaacgcaatggcttaaagattcgccctcacagccattgcaacagtcactgaaaggccttgagcgggcttacaaaaacttcttccagaagcgggctgcttttccccgattcaaaaagcggggacagaatgatgcattccgctacccgcagggcgttaagctcgatcaggaaaacagccgtatttttctgccgaaactgggctggatgcgctaccggaacagccgtcaggtcacgggagttgtgaaaaatgtcactgtcagccagtcctgcggtaagtggtacatcagtattcagacagaaagtgaagtatcaactccggttcacccttcagcatcaatggtcgggctggatgctggcgtggctaaactcgccacgctgtcagatggcacagtctttgagcctgtaaacagttttcagaaaaaccagaagacgccggcgagacttcagcgacagttaagccgcaaggtcaaattcagcaacaactggcagaagcagaaacgcaaaatacagcgactgcattcctgtatcgcaaatatccgcagggactaccttcacaaagtcacaacgaccgtcagcaaaaaccacgcaatgatagtcattgaggatttgaaggtcagcaacatgtcaaagtcagcagcgggtacggtcagccagccggggcgcaatgtccgggcaaaatcaggtttaaaccgttcgatactggatcagggctggtatgaaatgcgccgccagcttgagtacaagcagctctggcgtggcggtcaggtgcttgctgttccgccagcgtatacaagccagcgttgcgcgtactgtggtcatacagcgaaagagaaccgcctgtcacaaagtaaattcagatgccaggtatgtggatatacagcgaacgccgatgtaaatggcgctcgtaacattttagcggcggggcacgccgttcttgcctgtggagagatggtgcagtcaggccgctcgttgaagcaggaacccaccgaaatgattcaggcgacagcctgaacgtagcagggatccacgtccttcagggcgtggaggatgtcaatatcggtttctgtcagcgattaaattcaacaccacgtaacaaacgcctccggcaattaatccccagaacgcagaaccaatcccgaccagcgtcaatccacttgccgttaccagaaatgccaccaccgccgcgtctcgctcacgctcattatgcagcgcctgatacaaactgccgctaatggtacttaacagcgccagacctgccagcatctggatccaacttacgggcagggcagccatcatcccggtaatagcactaccaaacagacctgcgatcaaataaaaaatgcctgcaacggcagctgccagccaacgttgatctttatccggatgcgcttccgggctttggcaaatagccgcggtgattgccgcaataccgacggaataaacgccgaaaggggaaaaaaccagtgccagcaatccagtaaatacaattaatggcgaaacaggagccgaatacccggctgctttcattgctgcgatacccggtgcgttttgcgatgccatcgtcaccagaaaaagggggagtgcaacgctcaggctgtgagcaaacgaaaaatcaggggtaatataagtggggagaacgggtttaaagacaacatcagttgtgacaacgtcaccttgcgcgataacgatcacgatcccaataatcatcgcggcaattaccgcatagcgcggcgcaacggccttggttgccagccataccagcaacatacttccacacaacgtaaattgaccgtccagactggcaaacgcctgtaaaccaaagcgtaataaaatcccggcaagcattgccgccgcaagcgagtgcggaataatgcgcatcagacgagcaaagagtcccgttatgccgcagaggactattaacgcgttggtgacaataaaaacgccgatggcttcgttaagtgttagtccctgcaatccggtgaccaacaaagccgcgccaggcgttgaccatgcggtgagaacaggtacgcgataccataatgtcagagtcagcgtactgacgcccattgccagccccagcgccgtcatccagccagagatttgtgcagtggtggctccggcgacaatcgctgcttgccagattattgcccctgaactggcgtagccaattaataccgccagaaaccccgccagtagcgtgggtggaggaatagaaaacagacgcatagtcacctcgtacgttatagcgtacaggcaccgtagcatttgtccgttataacgcacaagtgataaacttccgttttgccggaggagtcgcatggaaaatctcgctcgctttttatccaccacacttaaacaactacgccagcagcgcggctggagtctttcgcgactggcagaagcgacgggcgtttctaaagcaatgttagggcagattgagcgtaatgagtccagcccgacggtcgcgacattatggaaaattgccaccgggttgaatgtgccattttcgacatttatttctccgccacagtccgctacgccttcagtttatgatccacaacagcaggcgatggtgatcacttcgctgtttccttatgatccacaactctgctttgaacacttctcgattcagatggcacccggtgcaataagcgaatcgacgccccatgagaagggggtaatcgaacatgtcgtcgtcattgatggacaacttgatctgtgcgttgatggggaatggcagacccttaattgtggggaaggcgttcgatttgctgcagacgtcacgcatatctatcgtaatggtggggagcaaaccgtacattttcattccctcatccattacccgcgcagttaagcgggaaaactatttcgcaacgtcgcgcttgtggctaaaatagccgccatttttcagctactggataagaatgtgaccgtatcttctcatcgacttgaactgttaagcccggcacgcgatgccgccattgcccgcgaagctattttgcacggtgccgatgctgtttatatcggcggccctggttttggtgcccgtcataatgccagtaatagcctgaaagatattgccgagctggtgccgtttgcccatcgttatggtgcaaaaattttcgtcacgcttaacaccattttgcatgatgatgagctggaacccgcgcaacggctgattactgacctctaccagaccggtgtcgatgcgctgattgttcaggatatggggattctggaacttgatattccgccgattgaactgcacgccagtacgcagtgcgacattcgtacagttgaaaaagcgaagttcctctctgatgttggcttcacgcagattgtgctggcgcgagagctgaatcttgatcagatccgcgcgattcaccaggctacggacgcgaccattgaattctttattcatggggcactgtgcgtggcctattcgggtcagtgctacatttctcatgcgcaaacagggcgtagcgccaaccgtggcgattgctcgcaggcgtgccgtttgccatacacattgaaagacgatcaggggcgggtggtttcctatgaaaaacatctgctgtcgatgaaagataacgatcagactgccaacctcggcgcgctgattgatgctggtgtacgctccttcaagattgaagggcgttacaaagatatgagctacgtgaagaatatcaccgcccattatcgccagatgcttgatgccattattgaagaacgtggcgatctggcgcgcgcttcatcaggtcgtactgaacatttctttgttccatcgacggaaaagactttccaccgtggtagcacagattattttgtgaatgcccgtaaaggcgatattggcgcgttcgattcgccgaaatttatcggcctgccggtaggcgaagtattgaaagtggcgaaagatcatctcgatgttgccgttaccgagccactggcaaatggcgatggcctgaacgtgttgattaaacgtgaagtcgtcggttttcgtgccaatacggtcgagaaaaccggagaaaatcagtaccgcgtctggcccaatgaaatgccagcagatttgcacaaaattcgtccacatcacccactaaaccgtaatcttgatcataactggcagcaggcactgacaaaaacctccagcgaacgtcgggtggcggtagacattgaactgggcggctggcaggaacaactgattctgaccctcaccagtgaagagggtgtcagcatcacgcatacgctggacgggcagttcgacgaagccaataacgccgaaaaagcaatgaacaatctgaaggatggtctggcaaaactggggcaaaccctctattacgcccgcgatgtgcaaattaatttgccgggggcgctgtttgtaccaaacagtctgttaaaccagttccgccgtgaagctgctgacatgctggatgctgcgcgtcttgccagttaccagcgcggcagccgtaaaccggttgctgatcctgcgccggtttatccgcaaacgcatctgagtttcctcgcgaacgtatacaaccagaaagcgcgtgaattttatcatcgctatggtgtgcagctgattgacgcggcgtatgaagcacatgaagagaagggcgaagtcccggtgatgatcaccaagcattgtctgcgctttgcctttaatctgtgcccgaaacaggcgaaaggcaatatcaaaagctggaaggcgacgccaatgcaactggttaacggcgatgaagtattaacgctaaagtttgattgccgcccatgcgagatgcacgtcattggcaaaatcaaaaatcacatactgaaaatgccgttaccgggaagcgtagtggcatccgtaagtccggatgagctgctgaaaacattgcctaagcgaaaagggtaaaacgccagttttctggttactcacaactcattgaatctgcatgatattgcctgccgggtaaggcgtcacgccgcatccggcaacaaatgactcaacgttgtcccgcttctggtttgcgcgatttttgccagtaaaaatgctcgcgcaaaccttccgccgactcttccgccacagcacgcaattcatcgctgtccgcttcatgacgcagctgatgatccacattctttacccacacaaattcatgtcctttgtgccctgccatgagttgtcctgagaacagcgcacacgttaataagacaaccgataacgccttcgtaaacatcctgccacctttttcttaccttttgccgctatgatgccgatcgtttcttgaggttattattcagttttgcaaattagcgcaaagaaattctggaatcttccttcctgattttgcattgcattctgccgttgcggcgatttagtgctattttcgagcaaattacacacagaggtaaacactaatgtttactttgttgatatactcagcggcagggaggcgatgtgaaacaaagcgaattcagacgttggctcgaatctcagggcgtcgatgtagcgaatggccgcaaccatttgaaactcaggtttcatgggaggcgcagtgtcatgccgcgtcactcctgcgtaaagcaatcctgaaacaactcggtttgagttaatcgccaattaaaaaggttaatgacatgcgagagacagtcgaaattatgcgttatcccgtcactcttacacccgcgccggaaggcggttatatggtttcttttgtggatatccctgaagcgttgacgcagggcgaaactgtcgctgaagcgatggaagcggcaaaagatgctttactgaccgcatttgatttttattttgaagataacgagcttatcccgttaccttcgccattaaatagtcatgatcactttattgaagtacctttgagcgtcgcctctaaagtattgctgttaaatgcttttttacagtcagaaatcactcagcaagagttagccaggcgaattggcaaacctaaatgttgtaaaccccaataactaaaatttttccaataaaaaagccccatcacaaggacagggcttagaaatcaattacttacgatgatactttcgcttatcattttgttggtgatgatctccggcaatgcttcaaatggtagtgtttcagtgtaaccgtctcgcatatcatcccgactaacaacaccacattcatacttagtctttatgagcttctctagcttagatgcatattcccctttactgaatcggaaagacttgacaaatgatttaggttctggatcggggtcagataaagcgagttttcggcaccccggtttttgatgtgcgtgtgagatttcaaaacaggtgcagtgcagcccaccagcgcggtcgctacgcgactattaacaccagccaatccctttccccgcctcgatctttcccttcgttataaagcgttttaggcgctctcctgaatgcgcagatcagataaataattttacgcaaatttaatggaggataaccggatgaaagaagaattaacccttacagaaatttcccgcttatacggctatacaattaacgccgctaagaaatggcaagaacgaggaatgccatttaacaccaatacacgacgcgtaccgctcaaggaagggaccgaatggatagcaaaaaatatcatcagtccactcagggaaactactgtcaaggaacaaatcgacgtagaaaaattacgccgtgaacgtgctttagcggacgcagccgaacgagagaaccaggaagcaatgaatctcctgattcccgtcgggtatgtggagcaggagctagcggaatattgcggaaaagtgaagcagactattttgcagatcgccacaatcgacgctttagaaattctcgaatctgccactgaccagaaaacattgaagaataagctaagggagatcatcgagcgtcgtttaaatgaagtaggggacttgttcgaaaatgcagatttgggagaagacgaggaagaagaattaccattaatggatgaaccggaagaacaagaaccagaagaagacgatgaatttgatgtgtcttaaaacgcgttataaataaatgtatgaaagatgttgaacgggtcaacgtctacgggggatgttctcccccgcttaacttttaagaggatataaaactatggctacttttattacctatgctgtcatcattactattctggctgttatttctgcttataaactcggaaccgaaaatcgagaacgtgctgaattattcttaggtgcgtttgttgcattttctagtctagcgttaattgtcgaagggatttcttatattgttggtctagttagtatgacactttttaacttccatccggctatttctatgcatctactgcttactgtatgctgggtatattgcttaatcgaatttttaacgtttgttttcaaacagactaaataatattgtaatctgccatttctccttatgtggttttaacagggaattttcgaaagagagttcccgattaaaagccataaacacattcagtacagtgttttcatagtcagtgactatacaacataaaaacataacaagtatagattgagtattaatcctcccgcccttcggggcggttatttttctggctttactagataatgtagcattatgttcattataacctcatctttgttgtgcaaactaacctaaacttactagggactcttcggagtccctttttttattggcagtaagaaaagttagtaccgtacatttcatcatgaagcattgcagcattgcgtttctgttcttcttcctcatcttctacatcactagaaaaatgagatttgcccttaaaagaacgaagcaattgcagtgcagccatcggatcacgcatcacatcgattttcacttctacttcatcatttgcggcctcatcagccgcgttttcaactactgccaccggagcaacttctttagctttcagttcttcaatctcagctttctgtgcttcgataatctggtctttttcttccagtgcagctttcagttctgcgatctgtgcttccagtgcagcaaagcgatcttcaacaaccggagaaacagcattcacctgtgcttccagttccagaaatgcttcgcaagattcaatacgttctttctcttcaccttcataagcaaccagttctactacttctttctcagtagcgtggctgttaaagaatacagcaaagtaaggattgccggatttggtgaagttcagtttagcttttccggtaacttctttacgacgaccaaaggtaatgttgcaatcagcggtatcctgaaaatccatgttaggagcggaaacgatagcagtatcaccagcaatcactaggtggaacagttcagaagagttcttaacggtaaaagtaacgatgtggtctactgcaacgtctttagcaggtttaacgcggtcgattgctttacgaatgccgttaggcagtttaccgtcaacaccaaagccagccgcgatcagtgcttcacgatgtgctttaaagccagcgaaagcggatttctgctgtgcaaaggaaacatgagcaacaactttcggctgaatcttcttgtttgcttcggtgccaaatttgataactgctttagcgttggttacttcgttagtgaaaaagttagcggaaaataacattataaatactccgtggaaagttagttttaattgttcatcgcaaaagcctccttgttgccgcaagggggcttttttatttttaaagccatcatataattctcagtgaaaggttattaccacacctctgcggtaatctttacgcgaatatcatacttctttaagagtttatgaaaggttgatttatcgataccctcatttttaaaccactcttcaattctcacacccggcgttaactcaaagtagcgtttagccatttctaagatgatttcgcgagtgaacttaacaggtcgtgccatctcgaatcctcctacaatgtggattaatgatttcttaaaaaagagcgttaaccgctcactattatttatattgggattgtattttatttttcgacccctcacatttatctcttatatatgtatttataacagagatatgttaaaatgttattcagatgttatcagacgtgttaaatgtgttaaaccacagcacgaattgctaaagcgaagaatacgatttaaccaaattgatgtatattcaatcaatttagaaaaaggcatagcactttttgctaaagcggtgagcattaattgagctatgaattgtaaagatttgttacaagattttctctcagatccaaatcttcacagacatataacaatttaacacggtgataacaataggaaggaaaatcggtaaattttcactttcaatacaaatattataacatatttatctctaattgtcaagtgtcgcaccgatcctacacag

SEQ ID NO: 181 - DNA, 44233 bp, Escherichia coli
  source 1..44233: mol_type = genomic DNA
cggggttttttactggttgatactgtttttgtcatgtgagtcacctctgactgagagtttactcacttagccgcgtgtccactattgctgggtaagatcagaaagaagtcttgaacttttccgggcatataactatactccccgcatggagcaacagcttctatgcggtttcttgttagccccggtaatcttctctcagtcgccaaacttgacgaagattatcggggttttcacttttctggctcctgtacaacatccacatcagaaccagttccctgccaccttacggcgtggccagccacaaaattccttaaatgatcagtaatctagcatgctacggcacaaagtaaagtctttactttagtatatccagtctctgcagttcatctttgataattttctcaatgaactgagcctgtgttatcccttctcgctcacagtactcaaccatgagatctttcagaggatttttgacaaaaacttttatctctttgtgtgtaagacgttttcttgcaacagcggccatctgtttctcagaatcagacataggcttacctctgcgcacaaaccgcttttgactcaatgaggaagtcactgcattttctgtctgcgacatctcgcctcctcaattctcaaacagggatcgtttcgcagaggatactacagttttttgaaatcagcgacttgaaagttgtgacgatgatctgtgttggcgcacaaatcatgtctgattacgtccgtttaatgtgattttgataatgaaataacgaaaaaacagaaaatacctaaacctgtgtactggcccgggcgggatcggcggtttctggtatatagggtgtctgcccctgaaatacttcacactgccgggcttcataggccagagttacctgcaccactgtatttcccctgtgaatattcagctcacataaccgttccctgaatatcagggaaaaacacaacaccgtggcgcacacggctaacaaccctataaaggcatattttcccgtttccggtgttggataactccaccatgcggaggcgtcagccagtcgagcgacgtcaaaattcccggatcaacgactctatctctacaggaaccttacgattattcaccaaacgcacatcaagcggatgattactgaccaggttaagagcacgcctaagagcagagacaatccagctgagatcattaccgaaagcgcctccaccaaccagagtcagatagactctgggattacctgtgtcgtgataatttagcaccggagccagcagggttgcttcataacaggcctcaagcactaaagtcgcaaaaggaccccagtcccttcgtggggaatagtgataagcaaccggtaaagcagcgcaaagaacctgagtaacgcgctgctccttcggtacacccggaattgtcatttccgtgtcagaatgaaccccgacacggagcttctgcctcacctcatcacgcgaaagttcatccatcgcctcaatatgtttgctgatggcgagcaccgtatccggttgcagaagagcgtagccattttgcattctgatccccctaatgccaatggctctgtccatgtccgccagagcgttgagttgacagttttgagtctgccccctctgcgaaccaaccgggaccagatagttacgaaacaccgtagcggcagcacaggccattgcacatgcgggcccctgcgtataatcatactgatagttggtgattcccttctccggtgtagtgtgttcgttcggcatttccaggaggttaaactgactggcaacctggattattgcgcgattcgcctccggacaccgatgaagttcataagcgtcggtcaccaaactacttagctttattttttcacctctacttacctccaggctacaaacggctttccgtatttcagccagactcggcagannnnnnnnnngagtcagtataccggcatgaaaggtacgggatgactggcccctggtatgaagcaagggaccatcgatgtagaaattagcctgagttctggcgtaagttgattcctcaaaaccatatatatcgctaaaccaactcattggtttactcctttctggaagctaaatttattcagaaacgccggaagcggggaaaacttgctttttcccgtttacggggttggacaactgagcaacgcgaaggcgtcagcccacctgacgtgtatgttctttgattttcgccggacatccactacctcctgaagaacgtggtggatgtccggccttacccctgctgcgccgttggcagtattctgctctctgccacgcaaactgctgccagtcagtacggggagctatatgagcagcccgtatccatgcttcagccgcttctatcccgcggccactgacctccagaataacagcccggcctccggcacgctgccagcaccagaccttactgcttcgtgaacggtttctgaatccattcattcctctctcctctttaattccgcctgctaaatatgttaaaaaataaccgtaatccgacttccaacgggcatgggagttgtttcatcagaccagccttattcttccgcctcccttcatctctgagggaggcatttttttgctgttcagtaatactaaagcaccagaccactgtatcggagtcaggaacggtcagagaactctgaccagaaagccaataaaaaacagatgaatggcatacgctggcgcaaaccagcgtcctgcctgcagacgtcgtccggaagccggtaccagcccgtggacacagaacagcaccgtcagtgtcagaatcacgccggaaaacatcatcacatcaccgtgtcgggcattaagcagggcaaccagcaacagccagacagcaaacagagctggacgcagcgtgcccctgacctgccagaccagcagcgctccggcaagcatcagcagaccggggatgccgtagctggcagaactgaacggtgtataccccatcagtaccgtgaaggccgcaacaccatcacgggcagtagcagactgcaggaaaagagccacctgcatgacaacagcaaaggtgaacaggatattcagttgccaccacgcaaggccgacatcccggaaggccagccagtaacccggctgtgccaggagtgccatcagccacaggcggttcaggctgtgctgacgtaaggttttacccgccatgttgcagccacagaccagcgcaaacagggggaaagcacagcgcccgcccatgttcagtaagggcatatccagctgaaaggcagtagctatgtggtcccccaccatcgccacaaacgccaccatccggatgacatcgcgctgcagcgcggagaaattcaggaccggcctgacaggttgcacagcaacggatttaccctgattcatgctgcggcctccggacgctgtgcgcaaaggtgcgccctgacacgcgccgtcagttgctgttcattatcgccacgcaacagcgggatacccgcctgtttcagcacctcttccagcagcaggtcacgccgctgacgtttcggttcctgatgagaccggtcgtccagctcaaccgctgcaatgatgcgcccggcacggtccgtgataaccacatcgcagtgccactgtgacaccaggcgaaataactgccaccattcacggctgccggacttccggtcgggcgccactctgacgatatcggccacacgaacctgcggacataaccgccactggcgggtatctgtcaccctgtccagccggcgcagaaagcgctgctcccgttcggtcattaaccggccggcactgacaaatgatggcctgctgcacagcaacagctctgctgcaccaggccgtataccccttgaccgcaatgactgcagaagtggatgcgctgcacgaccggcctgacggagcaggagcacaaacccgcccagaagaatgacaataataatgaatgcaataaacatacgttcctctccctgactcagtcgccaccgagcgtcttttccagctctatctctttttccggcatcttcaccacccactcacgttcagtacgctgcatctgttcacgtacctgctggcgggcaccacgaccaccggcaaccgcttcccggacagcctcatccagttcccggctttcccgttctgtaccgtcacgcaggcggcgctcatcatcgacagataacaacgagtcacgtttgtcttcgtctttttgtggtgccaccgacaacagttcacgccgggcctgttccgccagttcacgggcggctttctcctgcacctccgccagcttctgctgctcatccggaggcagcgtaatggggtcttccgcttttgccgccgtttcggcatccgccacgttacgcaatgcccgactcaactcgtcaggctctgtgatacgtcccccggtcagccgcgcggcattgagcaggcgctcttcgccgtgcaggcgtatcaccaccccactctccgggttttcctgcgccagccgcagtgcggcgtccgcactgtcagctatcagtgtctgaccattccggctggcctgcagtccggcaaactgcgcatcttctccgccacgcagccgggattcttcgctgagcaccacgcgcattccgtcatcctcaatacgaatttccgtcagcaacgcccctgcctctttcccgtgacgggtccagactggcagggccacatacggtgacgggtactttttaccggcagcaatgaagcgggccatcgtctcaccctccagaccgttttccgccagcacccggcggcccagcgccgttttatccagccgcgaggcggtggccagcaggcggttaccggtgtcggactcgcggtcacttttctcgtgcagcaggtcgtgggcggttttgccgccgtcagactgccggacctgttgctgccagtcctcaaggttgtccgtgtacacctggacatgctcctttgcacgtgacaacgtcacataggtggattccagggacgccattctcttcctgccgccttcggtgccggtcagggcaatggcaaaacgctcgctggctccctgcacaccatacaccgtcagggcataagcgaggtcaatatgacggtcctccgtcatggactgcgggtcgacaattttctcctgctcaccctgacgaaagcgaatggctccttccttcgtaaaaccggccacttcccacaggctgttggccacatagccccggtcagtatcggagcgggtaaaacgcacccgatccccctgactgagcgtcaggttacggggggagaagagagagatatcctgtgcagtgttctgctgtggtgaaatcagtaccgactccccgtcagcattccgcagcgtgaccacagcgtcctgagtattcacctccgccaccgtccagtagcgctcattcatcatggccaccgcaccggtgtattccgcaaaagcttcagccgcacgcagagcattgtcagggacccgtagcggctccagcacggtgaacgtacgttcttctgcgccggtatcacctttctcatgccgggcggcatgaatggcttcgttaatggcatgccggtcggcgttaagttcagccataatcagcgtctgctgctgtgcctccggcgtacgccccatccagtcatcccggatggctgcaatgatgtcggtacgcgccggtgacaactgctccggcttcaaagcctccagtgcggcagtccggccctgctccggctctttctccggcttacggatttccataacggacttttccggcacccatgccccggcctgacgcgggacctgctgtgggctgacgtcatccacctggcgcagggatgtatccacctgacctgcgatgatgctttcaatcgccggacgcaacgcaggtgtctgacggacaatctcctgcatcaccaccgtatcgatggcactgcgctgttgtaccagacggaacggctggccagtggaaatagcctgcaactgcgcggtatccccactggagaccattcgcccgccccctgcagcaaccagctgataaagctcagccatatcacggttacccaccatcgagctctcatcagtcaggaacaggacgttgcgaaaatccggtgtttccccggcctgaatggcctgacgggtttcactcaggaaactggccagtgtgcgggcgtccacgcctgcttcacgcatctcatgcacggcccggtgcgtgggtcccagaccgataacctgcggtcggacagattcagacagtgtgttcagggcacccatcaccgcccggaactgggtggttttccctacgcctgcatatccctgaatggccataaagcggtcggtattctccagtaccgttcgcgtggcttcccgctgacctgctgtcagccctgacagtaccgaagccggcgtcagcgccatcaggggctgcacggcatccttaccctcggcaatatggcggatgatgctcttttccatctcatacgccacccgcggtaccaggacgcggtttcccaccccggcaatcgaatccagcttaatcagcgccccgctgtccacctgccgggttatttcagcccggacatccgccagccgctgacccgacttcactgcttcggccagcagggtaagttcactgagatggacctgtccctgctgcgcgcgcgggatggccagattcaccgcctgctctgcatctgacatcagacgctcccggctggtctgtatggcggtatccagatttgcctcgccggtcgactgtcggagctggtcactggcaagccggacggcagacacgctctccactttacgtgcagcctgtccggtttccagtggcgtataaatccggatttcaccaccgctctgcgccagcgcgttcaggacctgtttattcagtgctcgtggcccgaccgcggccagtaccgtgcgtgatgcgctggtacccgccccggttccctccacataatcatgggccagcttcacggcccgctcagtgggcaggcgcaactcccgctcaccactgcgcaaccgtatcgcaccgttttccagagcagtcaccgtgaactgctccttcgctttgatggcccccttcagctcacgacccagcgccctgatgcggtccccctctgaaactgccagcgtccggctgcggtacaggctccagctgccgtcaagctgcgagaccttcagcgtcaggcgactgccgtcctctcccagcagaaccaggctgttggtggcctcagccacacggtcaatggtgtgacgtgtcatcattttcttctcagcgtcccactgctccatcaccatcccggcgcggtaattatcgcgctgatgacgggttttgctgtccagccacacaggctccagcacccggattgtcatctgctccctgcccagctccccggcttcacgacgtgcgtcgcggatgacatccgtcagttgctgctgctcccgggcaccggtcacctgggccacgacatcctgcccttccgccgacaggcgcacatagtcctgtgccagctggccataacgacttcgcttgtccgcctcgctgaccagtcgcacctccggcagttgggtgctataaaaccggtactgcggaataccggcttctttcagcacagacagggcattccccgttccctgccggttctccgtatccataaaaatcagctgcgccccgacgctgagcgccttttcctgcagcagcaccgtctctttcagcgacaggcgctccgcccgatcaacgataaccgtgccctgcaccggcaatacggtgtctgcattcatctgcgagcgcagcattacatggcctgacagatgcggactttctgacagaaactggccactgcgaccgtcggctgcaatcaccatcacctcacggccctgtgaacgggccatcatggccacgtcttccgtgcgctcacgcagggcctgcgcgcccccgccaccactgagaatggccaccgggcttttgtcctgcgtcagaacagagacagcatcacctgccggtatatcgcgctcctgtgcccgttcaggaaagagcagcacggtctgttcctgaatggccgtgcgcgccagctgatggacgctgagttcattcagcaggtggatatcagaggtgaatatccccttctcacggtccagagggataagacgctgcccttcaatcgcggcatcgatgccggcccgggcctgctcaaacagaccgggtgcggaaggcagacggttgaccgtaccggccagcatctccgaccaggtgaactggacctttttctccgacaacgccgaaatcgtgtcgctgacagctttccgcacctgctcgtcagcaatctcgccggaagacgcgcctcccgacaggtccggtgcatgtataccgctatgtccacctgcaacagtaccaggaacctccacgcgcgcctgcgcctgcctgatgtagccatcgatatcaaatttttcatcggccagccgccggcgccagtcagctttcagcagctccgggtcggcccaggctttggcctgacgggtatcgagcgcggcaacgtcgcgggatttggcggacgcgtccgggccggcggcctcccggatagtctgactgcgtgaggaaaaaacatcgacagggacatccttcagctcccacagaccattctttccggccgcgacagtttcaaatcccatcgactcaacgtcttcacgtaaagcagaacgatacaggtttcccagcgctatcttggtggcatacagattctcggagaaccccgttttcatgcgggtatcactggccagcgaccgccatttttcatcagcaaacgtggcgttaaagaccagagcgtgggtatgcaactgcgggtcgaggtcacgggacgtatcatggttatagagtgcggccaccatgttgccggtaagtactgtttccgttttcccctcttctgtaatgcgcgcgctgaccagcttctcaacctcctgcatcaccaccgctacagcccggttatgcgcctcaataaagcgtcggtcttccccgaccagcgccatgacggagacacttttgggggcagaaaacgtcaggtcgtagccgctgcggtgcttattcacaccatttaccatacgggagagatctgaaccgtccggaagtttaccctgacgcacagcatccatatcggcgctggcgacttcccccttcagtcccagtttctccgcaccctcccccatccagcgggagtccagtgaaccgctggcgtagtagttgtcttcatgactgtagtagcccgcatcacctttaatggaagaaatggagagcatcagaacacctccctgtcgtcatcaaaatcacgcgctttatctgtcgcatgattgatgttgacctcttccctgcgggtcatatcgcgggtctgatgtgaagtctgaacccagtcctcatacgcttcggaatccacgacttcaccatcgctgttcaggcccggaggaatatcctgtggtaaatcctgctcaatatcccgctcagttcctccggtggaggtggagccaccttccgctgcaacagcagtggaacccgtgttttcggtatctgcatcgcnnnnnnnnnngccggcagcgtcttctgtctgtaatgtgcgcgtctcaagagacgtgttcgcttccgcaagaacagccgccaccaggtcggcagaaggagggggcgtattcgacagattaccctgcggaatatacgcaccgcccggaacagcctgaattaacgattctccttcgaacaggccggcaaacctgtgccgttcttcttcactgcggcggtgaatttcatcctcaatcgtctgatcgaggctcgtctgcacgtcccgcaacagcagagaatctgccactttaggcatcgcctcatacttcatcgagagtttcactaccggataacttcccggcagagtgacaaaacactgcaggtcgttcagtgactgtacgtcggagtagctgatgatactgacgcgttcttcttccttaccaaacgagataccgtcacgcacctgttcatggccaaagctggtctgttcgctgaacttcagacggcgggtttccccgatatcctcctccacaaacttcgcaatcggggcgctcggggagcggaagaagaacttggtattcagcaggtcaaacagccccgccgccgctttcgggccgtagatttcttccatctgagcaaagttctgaaaacccagcacaaaacagccgccaaacttacgcgcttcggcaataatgcgtggcagcgtgggcagtttgtgcagtgagggcagctcgtcatagaaaaaccagacgcgacgttgacgattttcccccatcgccagcagactggtggcggcaatactgagccacatggaaatcaacggcttgagcgactcatgattctgctcatcagaagtgatgaacaaccagccattcttcgatttatcggcctggcccttcatccattcccggatggtgaatttctcccgtcccggacgatcgataccctgcaggtatcgcattgccttgacatagttggtcagcacacttcggatggagatagctgttttctcaatcttgccgtcaaccagtgtggaggcaggggtaccggcaaggaaggtccgcagctggtccagttttatggccagaagagtacgtagaaatttgttatagctacggtctttgtcctggcgcatgcgctctgcgccttctgcaaaaatagtacgcgcactgccctgccagaacgggtcttcaccactactggcggggattaacgttgttgcagcattctccagttcggagatgtcccggcactcctcccacatgtcccagttagggcaacgggcatcctttgcgttaagcacctggtcccgcgattcgtcatagaagtcttcaacaaaagtgcagcccttatcataaataatcaccaggtctccccggtcacgcagctgcttcaggatcttacgcattaactgggacttcccggagccgactgtcccgtgcatggcgaagttctggatttcagaattcagcttcagcggcaggtcatcgatacggatatcagatgcttctccgcgttttttcatcatccttgcgacttcttttggtgactcactgagggcgcgccccccgatgatttcatcctcactctgctggcgaccggtacgcccgagataccagtacgcggcaaatgtggccacaaaggcgacaagcagcgcggcacaaccggcaatgatcagttcctgcttcagcaactgcccgcaatatacggtgtaattgtcactcaatatctggcgggcgctgtactgcagcttatgttcataataacggatagtatagacaggctgactcaccattttttccgtaaaaggtgacatcacccggacaaaccagtaaataataccgttggtcagattctgtatgcttattcgcatcagcaggacggcaataccaaataacactgtccccatgatgacataataagaaatcaggttatttatttgcagaaacattttcaggcgcataaaagcaacctgaccaccctgcgttaagtcgcgaggattcagactcataatattttccggagaataatactcagtgaaggtgcttcagaaaaaaacttacaaacagaacgcgtttattctgttactgcggagaataaaataacagagaagcgttttaatacgggtgaccgctggccacccggaaagtcttacaggatattagcaactgatttcgccagttgatcttcaagaacaggtttagcttcttcaaacttgagattaactttattagcggaagagacaatacgcgtctggtatttatgctgattacctgtctgcgtactggtctgaaccttatatccggatgttccttgtttcagcgcagctacattatcggtctggacagtggcattcgttttttcagaaatctgaatgtccgtgaccatggtgtagttaatatcttcaaccatcgcatcagcggccattcccacgagaccggcagcaagtcccacacctaatgtcgcccctgcagagttggagttataggccgtaatacctgcccctaacgccgcccccattgcagcaccctgatagccctggctcaggaatccctgagccgtacgcagatccattttatcggctttgaggacattggcctgtatccagtaatatgcgctttccggcgcggatgtcacagtataccctttatcctgaagcgccttcgtcactttcgcctgcagaccggacatgtctttgtcggaggtattctttatctgaagatatacggttttctgcgaggacggttcaagccagatggtttcactcatctgggttttcacttcaagattacgtttcttgattgctgtgctcatcgcgccacaaccagataacaccagagtggaagacaatatggcagtcattgccattaacttaatgttttgtttcatattttctcatttccgtataagtagcatgatatctttcatgctcagaagtgctgctatcattcctcccttcccagagggaggtaatggctatcttataaccagaaatatacccgcatcaatatcacggccagagttggttattttttatactcacatagtggaaaaccgataaataacttatttcggggatgctgaaataagctctttcattttcgacagactactgactactgctggggtcatataccgagaaagagatgtttgtagcgtcagcatgctaattatatacgttacaaaccaagaaaaacccaaaccaccaatcaagctttcatccttcaaaattaaaataaatccaacaatagtatttactgacatgaggaataaactgtaaaaaccaatctttttctcaatcagcttaaaaaaaacagattgatttatgatttcgtcacctaatgcaagccgcatacaaacagaatcataagtcgacattaaaaatacaacactaaaaaaagcattagatcccaacgccagaacaatagtatcaaaataatgatactcgccagacttggttttaaaaaaaacatcaacaataataaaacttacctgaagagcgtaaacaattaccagcttactaaaaatgaccttcagaatatttcgatttgatggaatctcataatcgacctctttaaacgcatccagaataaatgcaacatctttttccagttctgaacgtttcatcacccctccagtcaattctggtcaaactttctttgcagattatctttgatattattcaattcctttctcccgatactattatcacctaactcttcgctctgccttttatcttcagcagccttagcatcactaaagtgtttattaccctgttcatgctcgctctgcaagcggttgtattcttcttgcggtgtattgccggatgagatcacagtatttttttcatcatgaacctgcgattcagcgtgacgacgtctgtcagccacatcaccactgacatcgccctgttgtctcacgccgctttcgttggccctgttttctatttgcatttgctgcacctgatattcactttccagatcaccgccgctaaaggaggaagacacactccccattccctctccggtacgagctttattctgctcaaattgctgtaacaactgcggcttcatacgctcttccacaaaagcctgcaccagtctttcgcgttctgcccgcacttccgggctggcagtgtcagaaagcagctggtcagcctctcccggacgctggctggtgacatacccgacaaactcctgcgagtagttctggttaatgttcgcactgttgttctctgcatagctggccagctgggcatactcatggctacgggtaacggcatcattatattgtgacgcctgactcttcaggctggagaaggtggacgacagctggctggccagggaagctgactcattgtctgtatgactaccactgtcagtgacacggctggaggccaccacatccattgcatcgcgaaaatctttaagctcctgagcactgaaccctttactggtcccgccctggcgggtcagatcggaactggtcccgtgcgaagagccacttcggccagcgtatttgacatgcccttcagcagagcctttaagtcctgttgccagcccaccaattttaccgagtatatggcgatctgtatcaaatgaaacctgaaggcctccacctgcgctcgcctcctgactttttgtcgcggcttctctcactgcttcagccagactgacattttcatcgcgggcatagcggttaccaatcgactgaatggtattcagcgctttggtcagattgctgctgctcgagatgtcactgcccgccacggtggtgtcgctgttgccccgctgctgactccactggctcatctgcgacgcggccaggctggatgtctgcgacaggctgttagtgaggctttgcgcttcgctcatggcatcacgctgttgctgctgccagctgctcgttgcggttttacccagcgcaatatcgaccggcagttttgaaatcgcttctgtggtgttgtaaaccgactgtccggagctcgtcagcgtcttcatcgccccgctctccagctgactggtcatatggccttcacgatggctgtagttggtgtcccacttgttaccctgtacgttcccggttgtcatattgttgtagtgccagttaccgtcaatggtctgagacgacgattgcgtggaggcagactgcagggtctgtcccagatagttacctgcctgcgataccacctgtcccagacctttcaccataccccaggcgataaacgggatggacagcgccagccagccggcggttgtgccaatatccgagtaggtattctgtacctggtcaaaattagccagcgttactgctgtgccactgagcttaccctgcagatagaagttcatggcatggttcaggatggagaacaggatgggccacatctgcagataggcgatggtatagacatagcctttaataatggtccaggacagggaactcaccaccgcaagcacaatcagtacagggaaaagcgctattgtcatgcccaacagtacgctgtacatcaccggtagtgtgttagccgcaatcgacgcactggtcgcctgtgacagtcgcatttttgccattgaggtctgcgtggctacattcaccagccctgccgtatccccgctcagtgcggaaaaactctccagtccgctgcgcagaccgttcattatcacattctttcggatgatctccgtggatgtcagggaagtacgatgaaaatagttatagctgtcccccagcatttcagtgaacagcgcagattgcgcaccattcgtctgaccaaacacctgatcagtgaaaccatgtaacgtattcaggatctgtttcagaaatggggacgtattcgccccggaaatatcaccggaatccgtgtttattctggtggcagcctgttcgcaggtcagaaaattgcgatttttatcgtagagcccacgcagcgggctcggacggctgaagatcagtgcataagggtcggccgcattcatcagctccccgatggtgtacttgttgttcagcataatatcgcccaccacgcagttatggacgtaatcagagaacatacgctgaatctccggctcagagaaccggaaatcactgctccctgcagccagctgcgcaccgaaaagcatcccggttttactgtaggtcagcgcgtcagggcgggcaaaaatggtatcgtacgtctgtgccataccggcaccgatccgggtaatcatactggcgggcgcagccaggcctgcaggaacattatccacctgataaatccgggcaggctcagacaggtcaataatctgaacgcttcgtttatcaccaatcaaaacggcaatgaccagaacataaaatccgacccacttgaccagatccataatattacgggtccggatataggttgcagcgccgactataactgacacggcggtggccatcgcaatcagcgcatcgcccgcacggctgtcgagaaacgatgccacgccattgagcgtatcctgaaaccacgctccgccggcaatcgtataaatggtatcaatggccatattaattcaccctgctgaactgatagttaccgagtacgcgatcgctcatttttgaggagacctgctggcggataaaacggatttgctgttgtgcagaaataagcgcattttccttaatctgaacctccatacgcagtgagttgagcgcctggcgcgcatctgccaggccatttttcagttcattcatattggcccccggatagtctttggtagccagtgaaccattgaccaccttcatgacagcttccagatactgcagataaatatcgacggcgatgtaatccgtcagctgagcaaacagggactgcgaaacactcagggatgactgatccactatccaggacaggatgggaatggaggtgctgttgatgaactgcttctctctctccgtcaatggtgtgtccgtaatggctttattttctatgctggtcaacgtgtcccgcaccatgcggatcagagattttgactccgaaatggtcacgttattcagggagggtgacagacatttgttctggttatcacagacgtacactttggcgctgccaccactcatcatcgcactcaacaggctgcggtctgatgccagcgaagacaggattcgcatttccccgttactgccgaaaatcaccgaaccgctgatgctcatggcaaactggcgtaactctgcattgctgctgggagtactgttgctgagagcatcccacatcaggttgatatccttcagaacctgatctttttctgcgccggtagccttgttcgtgacgctttcgtatttcccgccggatgtgcagccctgacgggaggagacccagtccgagaacacgttattctgaccggcgacagactggcagacgttctgctgactttccccccacagcgacgccacgctgtcgaccatcgcttttgccgcctgacagctggacatattgaaacggttaaggtcagcagccatcttctgcaggaagtcttttgccgctttcaactcaggcacggtagtttccagtgcaaggtcgaaaaagtaccccgccgcgttagccatcgtctgtttcacaaacgccataatctggtcggagttaataaaggagaaagacccaagatagacatcaatcccgccacatccggcgttgatggacggcaggctgatggatatcagctggatatttttgtttcctgtgcgggcatagaacgaaccgccggttacatagcgtgccgcctgtccctgccaggctttcgccgaggtggagttactggcataactcatattgttgaaaaacgaattcatgtcatcctgcagcccggcctgtgccgttcctgtactgtacaggcccagcgcaaacgccaggcaaagcggtttcagtcgcattattgttattcctgagaatgagcctgaagggatttcccggcctgacgatccagggccatacggaacacgtcatcgagacgtttacggacctctccggcctctgcggcaccctgcagcagaggccaggtttccatcgtattaacgttggtcagaaacgtggttggggtggctaccggcacgccgctctggaaaaactccaccatcacatccggggtggccggaagcacatcgggaaattcggcatcaccttttccgtcaaggcttacagggaagacactgagaccgctctgctgcgacagagatttcagcaccggcgcaaactggcgacagtactgacaggtcgactgcataaacagcaccagtttccagtcctgcaaatccacccgccgcccgtcactcagcggataccagacgggcgacgtcttttcgctgagtcctggtgacggtggtgtgttgctctcaggaagacgcaccccatccagtgcaggtgcgctacgtccgttttttccggcttccagtgcacggatatcatccagtgtcccggcctgcagacaaccggacagcatcgccgccatcagaatggcggttcgcaatacgagaataagcatgaattacctcagaacaggcgttatcagtagtcaggtttaaaatgggtaagaacgttgaccatctggcggtccaggtcatcgtggctcataaatccccatgcaaggggctgccactggtgcgttttcggatcgaccaggaaggtcgcggggaaatgtgtggcgcgcatctgctcagcctgcccgctgtccggacggctctgcggcagctggtcgctgattttaccgtccacactcacggccataagtgtaatgccccggtcttcgcagaacgcgcggatgacaccggccatcaggttgtcgacggcattattcccccggtagaagaagaacaggccatagcgctgtgccacctgacggatgaccgcattctgaacctttctctcttcggtaagacgcgcttccacagaaccgttgtagtgactacgtttcacgttgtagtcgagttccggatatttcaggcgcgccagctttgatgtctgggtaaaatctgtcgcccggtcagtccagaaattctggagtatcataaaacggcggaagttctccgcagacggatacagaatggccgtatccagcgcttcacgggtcgcctgctgcaggacctttttctgctcagatggcgtcatgctggccagacgttcctgaagggtcggctctggcgcaggctccggttgaatctcttccgcattcgggttgtaccactgccagccttcttcccgggcatagttggggaccagtacatcgtcgggagccgcatgcagtgatgcagtggcaagaagaacaagcacaccggcgacagctatcatggcgcgttctccttcatcttttcagcgataatgtcctgtgctttcttcagcaaggcctggtcttccgggatatcgctaccggcattaagatcatcatagaaatcgctgaagttcatcacgccaaagtccagcttctgcagttcatccactgtgatgccccgacagtccggagatttgccactgccgaaaccaatgcccagctggccacggcgtccctgctcctggacaatgcgtgccagtttggagtcaaatacgcagtaaccgcgtttcttctccagacatacccccagcacttttttgctgcagtattcccctacatagaccgtcagttttttctctttagccttacccagtgccttttcatcactgctgcaactggacagcccgatatcctggccccagccagaatccttacagcaattgttaaacccggcagcaaacttcttgcaggatttggcttcgccagtgaatgccctgacattctcgccgttcagttccgccacatcctctccggcagcagccactgccgccagcgctgacactgcctgaccaaacatattgctggtccctgtctgcgcctgggcacaactgccgtctttgcagaagaactccccgccgcaaatctggccgtttccctcttttttacgctcacaggagtaggtgacctgctggctgacacaaaaaccatccaccgtatcggcacactgacttcgtacaaccgtacaggcagggttcttcatatactcaccgcaggttccctcagtttcggtctgtgtcagatatgtgtcctgccacttccagcagtcctggtggatgctgtaggtttttccgtcaacaacgacggtccgggtgcctcctggctctacacactgagatccggtcattgcaccttcagacttgctgaacgggcagctttctgtccagacaacctcaggtacccattttctggaaggaacctgaatcgtcagcgtaatggtgaaacggtacttcatatttgagctataccagatggaagacactgtaggtttgttgcgtctattcgttatggaaaacggcaatgactgcccatctgttatattcagcccggaactcagcgtgacgctcccctcagaatcatccattgaaattaaaccaaatggcgtggtcactctcatgaaccagtgatcgttgccgtaagcaagtttcttattccaggagtaaaccgcgctggcagcgatcactttccctccagtgctgaccttaaattcaccagaaaaagaattgttcttttcagtgaattgaatcgaggaagattcaatcactatctgtttgatttctgtcgtatcctcatagtggcctgtgattgtcgcggttcgcgtgcagtattgctctatcttcggatcacgcaagcactgatgcgtggtggtttcggtaaaactggcaggctggtccacgcagccggcaaaccctccaccagtaatggtctcggccttgtccttcatggccagcccttcagaaataaatggtgcatccagcgacggcttgttatccggcggcgtattgagaatggactccgtgattattttacccgcttcagatgtgttcagcgctgctgaacccggggcggtcatatcgacgccagaggaggtcacgccaccgtaatacccgctttcaggaggggagttggtataacccgggatgacctccgcaggattaaacccctgaatggcactggccccctgtcccttattctggctactcagattcattccctggttaaactgctcatttgcaacaagcggctgtaccaggcagaaagatgccgccagcatcagtaaaggaaggtatcgtttcattcccccccctcgccaagcaggctcctggcggtgtcagcacagtcgccctcttctgccacccgcttcagggcctgatgcagcgtaagatccccctgcagacgatcgactttctcaccctgattaccacaggctacaaccagcaccggcacggcggtaatgttgtatttacgaaacgtcgtcggatctatctgtatcccaccggtattgctctctttcacaagaccggcaacggcattagccgtcgcccgcatatcgccgttaaccattccccggataaccaccggaatattgagttgtgccgcatcctttacacgctgcttcaactcctccgccggcatcgagaaggacacaaacaccagggccgcattcaccgggcgttccccgggctgcatggattgccggaactgctgtgcctgcgcgtcgagaaacgactgctcctgcggtgccaccggacgggtctgtttcaggaattccggggtttgcagagactgaaatcgctgacggtccagttgcagctgctcatggataaactgacggttctccgtatgattattcgccatgccgcccccgctgaccagaagcagggccagcgataccattactcgtttcatcgcgtttcctcctgtgacgggcggtgtgccataccgtaggcgcgatccgcagaacgaatgtccagcatctcctcccacatgcgtcgttcccggactgacatctgccgtctcagtaccggaagcagaccgcttatccatctgtccacaaacgccagacgctccagtgtcagccatacctgttcactacctgacgatgacagcgctatcgccgcttcccggcactccagaatacatttgaacggcccgccatttttctgtagcgcgccgttcagctctgcctgctgacgctccagcaggtcagcacgggaggcggcctgttcgtagcgggcgagcagaaagtcatacttttttttactcacgagcatactgtgctccttacagaaagacgcagttgcgcttacgccagaagagatacccaaagttacgccggtcattgggcatgttcttgcccgcttcccagcgggttacgctacgccccagcggatgacactgtccggcatcgggatacttgttgaccatgtgatatcgccagcggcttttggggatgatcggggatggatattcaaagcagacagccctgttttcaccgatgctgttcatgatcatgccctggcggtgaagcttgaacgccatgcgctcactgagtaacagtgacgtctgtaacggactgaattcgttagaaacatagccgttaaacgggtacatactgccctgactgccggcacaccagaaaagggcgtcgatgggtttactcaccagactggccacggcatcagcggcacaggctccctgggcgatgatgttgccaaagagaatcgcttccggctggataatcatgctgagagagctgctgtcccacatgggatcaagttccgacagataaccaatatccaggtcgccaccctgcaggcagcccatcgacgtgataatgttcagccagtaggtgagcgggtatttgtaccagtgaacatggtagaaggcccccggtttggcgcggctttcctgaccaccactgccgctgcccacattaccaatattgatattaaagccccccagattcaccatgcagtaaggggagcgtgtcacatccgtcagcgccatcggctcccagtaaccaatggccagccccacccggtataaaatgcccatcgggcaaaactggatcggcatggaaggattcggcgtatccggctgacgtcctttggcgaccggaacattgccaatggttaccggaaaaatacactcccagcagatatcggtgataggattaacaaaattaccttcacattcagccgaagcggctctggccgtaccggtcaggcataacaacatcagcgccagtcctgttacataacggttcatggcttcacctccggcacatccagtgcaaacgaatccacccgcagacggcgacgatcttccgccagcgtcacacgggccgggatggttttgagttcaaacttccggctgagcgagccatcctgatcgaagtaaatgcgtgtattcagggcattggtcgcttctcgaacatccccattgaccagtatgacgcggtacgtcagcgtgccgggattctgcttcttcatccacgccagctgctgcggattatccgcatcaataaaatacagcgtgtcggtaaagggcaccgtatcaagcggattaatcacctgtcccttacgggcaaacacccgcccctgatggtctttcagatcttcactgaccgtcagcgatggatcgatatagtgcgtggtgttttcctgcgccaacgtcagcccttccaccggcttaggacgcagggtgttttctatgacacgctgtttgaatgcttcctgctcccgggccatctcaccactggcctccattgctttcagccgggtctgaatggtggtcagcatgtcctgctcggcaatggggtacatctccccccatgtgcccaggttttttgcctgtaccatgccggacagggcaagcagtatgagcagacgtcggtacattactgcccccctccggcggccattttttgtgccactgcagactgaatttcaccggtaatgtctgccgcaccgctgaccaccgccggcgtcaccaggataaggacgttgtgatcgcgctggtattcctgaagttctgtgctaagtgtctgcataaagcgttctgtcaggacgctcatctgcgcctcattcagggactgtgcccccgcctggtcggtgaactgatcgaccggcccttcatatcaaaagacacaaccgtcggtgtacgccagctaatcagcagagacgtgaccgccgcgttaacgcacagaacagtggcagcgaccagcagcagattacgcagacaacggcgacggcgttgctcccgccggctccctttaacattaatattccccccttttctgactgactcagcagaaacagaggattcagacagtgctgagttaaggttttgctctgtggtcatgctgcctccgcaagcgcttccagttcgcgcatctcatcagggaagttgcgttgtgccagcaggtagacggcgtcatggatatccatgttctgttcccggcactggcggataaattcgaagtcatcgccctttgaactgaacatcgcgcgactgagcggatcgacaaagagacgatggaaactgcaggtatcgttgatgcgcagcataaaggaggagaaccactggtctttggcatccccgaatttggagataacgctgcgctccagctcactgaactggttggggcggttctggttgtactgtttgaattccgacgcatcctgcttgagaaccaccttgaaggcagagttaccccaggctgcttttgctgcgccggaggcatcatcggcatcaaagtccttgatgttctgacttatggtgatgaacgcgccacggtgacgtcgcacagtgcggtagccggtctcaatgaactgaccgactttctcatttttgaagttgagcagcttccagccttcgtcgatggtgcagcacttcttcaggctgcgcggcgtgcggtacatcttgtcctcgatgtagatgatgagggagaacatcaccgcaaccagcagatcaggcttgtcctgcaggccgcccagctccaggacgataaagcgggcatcgtcagtcagtgacggctcgttgctgttgaaatattcgccgtaaatcccccaggagcagtacttcccgagtagttcgataatctcatccagccggttggtgatacccggcgacttctggtatttatcatgctcgcgaatagccgtcagcttctggacaacatggtcaatacgggctttttccttatgttcttcccaggcctcctgaaccccgcgcaacagcaggctgtggtggacttcatccagcgtcccgttggggctggccagtaccgccagctgatcgcggatacgttccccggattcattgatgttggaaatattggcaaacgggttgaatttgagtgacttgccgtccaggtatgtcccgccgacgttctcacagaacgacttgtagccgtcccccatgtcaaacacccaggcgataccaccggagtccagcacgctgcgcagaataggctgaaccagaccggttttaccggctccggaagtgccggtcaccgccatgttgtagttggtgttgcccatcccgtccccgtagatatcaaggaacgccagctgattacggtaggacggcgtcagcagccccccctgacacagacggttgtcggccactaccggcagcagattcacggcctggatactctcagcccggcaggtggctccgcccattttgatgtcttcccacagcccttccgcatgaatgaaagggatcatcgctatccagttacggaactgcatataggtcggggaaaacagctctatgccgttcttcttgaacgtattaatgacctgctgctcgcagaccagcgcatcctcatccgtgtccggacagaacgtggtgatgttgtagtaatagcggacaatacaggtctggttgctgttgagacgctcacgaatgtccttccactcctgggcctgtttggccacaccgggaaacagtgtggcatagggggatttcgcttttttgtcccgatcgagatacttgcgcgtggcctccccctgcgttgccacctggtcctcggcctccattaccatggtgatgacgaacgggcgggcaatggtcagatcagggctgagcaggttagagatgttatcgccgcccatccacagcatgaacatgtccgggttattctccagcataaagttcatagcccgtgttgtggtcacactgccctgcctgtcagccaggctgatacgcacatcgtcaggacggacatcgatgccgatacgctgatcaatacagcgctgatgcagttcatcaaatttgccgacacgtacgtcgtccggatacaactgatcatggcgggcattcagcatcccgtgaaccagcgtggccagttcctgagcatctgccgtctgtgtgaaaatttttgctgcatccagtgaagaacgaagaactttcagtgtgtgggcaacctccgtcattactgccgctgtgcgtttcctggctttcacacagtaggagatatacagacggtagtcccttaaggtcagcggcaagcccgtcggactgttgaactgctgctgcgctgcacgccggtaatacgcccgtgtgatacggttaaatttatccgcacgcttcccctgccagcggaactcagacaggccgcgatcaagctgaccgccaatcagtttgctggataccaggtggaaggaaatcggcgtcttacgcggcagcttgcttttgataaggtcttccagcacatacacaatctgttcgttagcaccgataaggggttccgcccgcagcagaaaaccaaccgtactgcggttcacaaacagcccggagtcacggtcatagtcgcgatacggcaggacgctggtcagctgcggaaaatccaggctggccagattgcgcgtcatctcagatgcaccatccggcatccggaaagcattcgtgaggttctccagcacgcccagaaattttttcacctgactcttcttagtttatgcgggacggaagaagccattcggcagaggtaaccacaaaggagacccgaccgggctgatggaaagcgttatcgctgtccacccagggggcaatccagacggtggctatgcgatcctggctgcgcagaggatgtacagagccgggattatcacaacgcacgttctggcatgagggcgccagattgcccacggatacagccggacgcgaaactggtgttaccggcgtttcggtaaccggacggtgcaccagtgttgacgttgtggcggtcgtgtttgtacccgcagctgtgctgcctgatactgtcggcctgtcgctggttacctgcacaccggaagaaatgctggcagcggagcgggatgctgacggatgcatcgcagcagaagtggccgggagattaaccagggaaggcagtccgcccgcagccgactttcccgtattttttgccgccttgtcccgtgccagttgattggctttcgtcatggtcatacaggtatcagacgttgtggcatcgcagtcaaagttgcttttaacgccggcacagccggtcaacagcaggacactgcctgccagcagaaaggtgtatttgttcattgaagtattccttgtcattcaggcgtcaaaaggtgtgggagatgacggtcttactgctgccggttttcaccggcaccatcacattgcctttccttttttcatccttcacctcaggtagtgtttttgccggatttccagtacccgctggcattccgtgcaggttcgtacaccaggtatcgtttgctggcgtttgagaggaatgtcgttgccacagcattcacactcgctgaggctttccccatcccttatgagcaactgccgggcggcctgaatatgcagccggttcggcaggtcttcctgcttctgtaaatgatccagtacgtcagccatcggttctccttgtttactctgtccggacacgctaccgcccatccctttcacgtctttcagggcactgactgatccggattgtgtgattctggccggtattccggctcccgcttagtgcgtgacaacctggcctgtagccgggtcgacggtatcccccagcctgaagtcatgcaggtgtttaagcatgtccgtcgtgttgccgggcatggcagcaggcgcagatgagactgatggttgattttgtttcttgcgtgcagccgctttcgcgcgggcttcttccagcgtttcaagctggaagccatcctggaaaaccagggtgacttcattgcccgcacctatcggaatcaccgggtggtactgttcagcacgtttgatgtagtaatcagagagtgttttggccgcagaactgactccgccaccgacccctgcctgaccgatttcaccggcactcatactggcagtagctccaacgcccacggttgtggaagaggctttctcaatgcccttcccaataccatcaagaaagcctgatccccccgcatacagcaggatttgaccattacgcatgaccacttcgcccttgatgccgtttttgcccataaaggacacatgaccggcaatcttctggtcgatattgtcatcacccagcttgcagctgatggagcgggtcctgacgatggcccgttcactggaaacatccccccaggcttcgagagtcacaaaacacccggttagatcgaattcctgatcgttaggcatctgaactttgccggtcaggcgaagctgcatcgggacggtatttttatcgccggtgacagaggcattggcatcagcgccttccaccacaatggcttcggcaaaactaccggaggaaatccacgggaaacggggcttttccggagcgatgtccggcagagtgaattcctggctgtccatcattcccggacgttgaaccggggtcatcaccggtgcggcaggagcctgtccgccaccggcgggccagaaagtggtcgggggaggaacatcaccggcctgtgctgcagattttccctgtgaggcaagcgcccctggcagaggttcagcgctgagagagtcaaaattcttcccggcttcgatttgtgtctgcaggagtttattttcatcttccagctcacggatacgctcctgagagcctttcagatcacgcccgataattcccatttctgtacgcagctttttaatttcagcctgcgtttccttgttcagacgctgggcttccgcaatggcggaacgctggactttattgtcaaaggactgattgaccaccccggtcatatcaggcgcaggttcgccttttggggcttttgccggcggggctttcttcaggttcatctcggataccatccaggttcctgccccacccgcaccaatacccagcacaagcgcgataaacagagcgagctgacgacgacgaacgattttgttaacgttggccatctgttccctccccgttttcacggataacggtgacagtcagccgtcccccgcccatcagggtctgtgcattgctgtcaaacatgacggcacgaacaccgggcttccagaagtcctgctcacgcagagccaatccccacgtattggcattgcgcagttcataacgatcgacccgtaactggtcgcccgcccatgctttcttcggcgtagcggaaaaaccacctggtacgttgataccgtctgcaagcggtttcacctcgccatagccatcaggcattttgtcggtcagcacagaccgggtgagtgcgatgagcagtttttcgtaagcctgggcggtttcccactggcgggtttcgggccgcgacggtggttctgcgctcatcagtcggtagactcgcccttcacctttgacgggcgtggccacgaccgagaaggtttgtcccagggcagtttccacatacaacgtgaaggcccgggtcgccacggaggtgaacagcaccccgccggcagatgtcagtcgtttatctgccagcatgccgttctgagctgtgatggccgtgactttatctcccggaatgaaaatcatattgggatcggtattactgatactgagccggaactgccccccctgcggaaagctgagtgttgcaggagactgtgcatatacagtcccgggcgaagagaccatcatggcggtgcccaaaagcagcgccggaaagttatttttcattggttacctcatagaaacggccaatgcgggtaaagccaccggcgtacttaaggcggagacgatagttttttaattccgtggtgggttttgagttgccgatccacattttcagcacgcccctgacatccacgcgtccgtcaacgggatagactttgatttccgtggtgtagaatgtggaattcacatcactggcctttatctgtgcagcctcttcctgcagaacttttttaaattcctctctgacttctggttcgacaaaagacatcagaaaagcgtggtttgaatctaccgtttcgggggagacgttaagacgcagggccaggaaggacagcgtcatcatccggaaaaactcggtatccgcttttgtttcagataccgcgaaaggcgcgttataggtcatcggggtaacgaccgtacgctgttcatgaatgagtgttctgttagtcaccgccagccaggtaacagcaaaccccagaataaataccagagccgtgagagacagaataataatggcaataattttggtggatgagttacgagcgcttatttccataagatggccctgtaatattttattttatccatttcctgtaactggagtcgggaataacgcggtagacaacccggaataattcaacaggcagatgccagtagcaccagttatataaccagcgggaactctttccgcgttttgccgcccggattagctgccagaccactgtcgcaataatcagaccaaatacatatttcttggcgaaaaatccccacagcactaacacagctgcggggatggcttcatcaagtggcagtccgataatacggttctgctctgacagagttttcgggaaacggaatttttctaaatcgtttcccgacatatcagctgacgaatgtcaggccaacggtggtgaagacaataaccacgacgagtcccagcagaatcagcaggttcttggttcggatatacgtcgcaacaccgataacgatttcagcgatataaatacacatgatgacaaatgagtcggcaccaaaggtcgcttttacatcgtccttgccccccgccagcaggtcagtggcatgggccatctgccccatacccagtaacagcagcggagagaacgcagccagacgggacagtgctttttggttacacactccacgccatgccatctggcaataatgccatgcacggttttttacagacgcggggcggccgcctttaaataaggataaattcataaaaactccatttatgttatttacaaaaaacccagagcggtattgacaggttaagtcaatccggcacagaaccatcaaaagctataaatggtcctgtaacagatgtcttaaccgacgtgataatttttattatcttcttcctcgaaataagaactgataatttgttcagccatctttccaatcttcatcttcgaaaaaatcgcgcttttctttaactgttcataagttgtcatatccaaaaatacatgcacctgctttctgacaggccgaacaacattcacatcgtcactcctcatatgtcctccgaagatgattcagggctgggaaaatcgtgacaaaaaaataaaaaggcatcaacttgtataattcaacctgaaaaaatcgatataaatacatgatttttaatcgaaaaacagacttttactggaaaaaccctacaaccctaaattgatcaatatcaaagaaaaagtgtgatgtaaatcacatcacacttttgagagatatcacttaaggatgctcttcataactaaaacgaaggtggttatagagatcgagtctcaccgtgtagacagttttaagcatatctgtagtaggtacagcatacacttcacataattcacgtaagtttttggatatggcttgaacacttacacctttgtagtaagcaatgtcttttgtactcatcccgtaaacaaaaaatgtcaaaatttctattttttgatcacttatttcaggaaagatcttgcttaatttagacataaagataggattgataataaccatcgtaacctctggtttaaaatgaacaggttattggtggccagcgatagcagggggggccaacccctgttatcgcgacagtagcaaatcaattttataaatgcattcaactccctgggaacaattgatttaccttaagttgaatatacaacatcactgatcccctctcaataaataccccctttacacattaatttatgattgagctcacaaaaaatagatgtataaattaacacaaaacatgccccctttatcacatgagtaaaacagaaagggtataatttaaggcaagattatttatgaaggggatgaaaaagagttactaaagaaaaccaaaagatgcagcatccaatcatagtgtctaatataaaaatcctagcacttcgacaggaaacacttaacacactcctttctgtaagagcaaagcagatctcagtgtttatctgataaaaaatatgataccactgccccttaaaaccaacttcattaagagaacagaaaagcaactcgccattttatcaacaatcatttcgggttaaataaaaatgttctccctagagggcctcccacaaacagataaaaaaacaggaggcatgagtgacatttcgtagacttaatccatttcttcttctggaaagaaaacccttacctggtcttctgcgaatttggttatagatcttttcattacttcattatcaaaattaccattgcttataacttcatgacttaatgcattcatcttcattatttctgaacacattgccctgactctggctatgttatccagcataatcttgttgtactccatctgattaaaaccactctccttcttttctctctgaatcctgtatactctgagaccgagttctataagcattgaagtaacagacgataccgtagcatcgttttccgtcgccccctcttgcctcctttctgttaccagagattcaatttcttcacggacctgattactgacaaaagtttgtatgcgtggcatcgctaatccttttcaaaccaacaaccatcttcaatataaaatattgtctgaataaatttatccatagtataaggcgagtataccattaaaataagcagagtatagatgcgagtatggaaggctgcggagcaagagtatactcgcgagtacactctacataacagattgaatttattaaaatactctaattagagtatacccaacactctaattagagtgtcataagagtatagttatactctacatcacaccctttcttccaaaataccacataaaaataacagtaaccatatgtttttaaagacatatcatgcaagatcaaatcttgcgacgggtgtgggattttgatgttaaggagcaggcatatgaaaattagcttgccgggcaggattcagtattaacgggcattgccgtttttattaaaaaatggcactctggcacagggaaagataataatggaattttgcagatgaagagcgttctgcttgttggattactcatgcttagctctccggttattgctcaggactgttttgaactggctggaagagattacaaaatagaccctgatttactgagagcaatatcatggaaagaatcccgttaccgggttaatgccattggtattaatccggtaacgggatatggcagcggattgatgcaagtagactcccagcattttaacgaactggcccgctacggaattaagccagagcatctgacaacagatccctgcatgaacatttatacaggtgcctattatctggcaatagcatttaaaaaatggggcgtatcctgggaagccgttggtgcatacaatgccggattcaaaaagagtgaacgccagaaccggaggcgtcttgcctatgcatcagacgtttaccggatttataccgggataaagagcagtaaaggcatccaggttgcgaccacgaagaaatcacacccccaaattaacagtgtgcagaacaattaatattgtatacattatcaaataccggttatgccacgatagcggcatggaaggccacacacaaaaatatcatattagtgataatactgactggccgaagccccgcaaagcgggaatccatcttatatatatccggtaactgcgcagcctcctgccagaccatttttcgcgggcacaatatttacagactaccgaaaagccagttgatgaaattgaggcatatcagacgacatagcaatgccgcaggatgataatataagtaaagccccgaaaaatttttcggggctttacttatattatcatgacttccactccctgaactgttcggcaatcatccataatgctttgttgattcggatatcaccgtcaatgcctgtaatagctcttgtcctggtatttttatcggaggcactttgccccgataatccaccttttatcatattctcctgaacccgctgtcaggtcgtccagagatcgttctgtttatcctcccaacggcggggagtaattatttgttcaggcgtcactggcgttttattttcatcttcatacctgaccatcaatgcagctctgccaaataaatgttgttcgtcactgttaagatgtatctctttcattgtctccatattttcagtgactttatcaaagacaccgagcacttcatacgctccctcaataacctgcccgacaatatcacctttatgtggaacacggatttcgccaaaattattcccgcacaccaggccatttgtgcagacaaaacgaaaaattccggggatcatctgataagtggtgttaaaagaaaatgcgctcataattcctcctgtatctgatgttttcagcccccatcatctgttgagtttcgggacccgccgcaacgacggagagcgcgtgcgcgaaacggcgttgccctttacatcccggcgtctttttgccgggatgccaggagcgcaggccacggcgcgacagaggcggcgcgaccgttccggtcgctgcaagccagggttttgcgtcagggatggaagcccgccagggcggagacagctccgctggctccgttcacgacagcccgccccgctaggggacgcccaagaaaggcacaggcaggagaacaacaaaacagacagtaatcaggacagcagtaatcagaatcagaacaggagggaaaagagaataatcacagggaaggtgatgtgatttctgacaggccataaactgaaccgccccgggtttcctggagagtgttttatctgtgaactcaggctgccagatcatcgtttccgatggaagcataataagctttttctgcttctgccggaggagtatggcccagcctttccagcaatcgtcgattgttataccagtccacccacgtgagtgtggccagttccacttctgcacggtttttccagctcttacggtgtattacctccgctttgtaaagaccattgatgctctccgccatcgcgttgtcatacgagtcgcctgtacttcctgttgatgccagtaatccggcttccttaagccgctgtgtgtaggccagcgatacatactgagaacctttatcactgtgatggaccgtgccggacggtcgacgggcccataacgcctgctccagtgcatccagcacgaatgtcgtttccatggacgatgagacccgccaccccacgatgtatccggcaaacacatcaatgatgaacgccacatagacgaagccccgccatgtgctgacgtaagtaaaatcagccacccacagctggtcaggtcgttctgccacgaactgacggtttacgcggtcgcctgcggcaacggctttccggctgatggtcgtacggacctttttaccccggagaacaccggcaagtcccataaccgccatgagacgtgccacagtgcatctggccactctgataccttcccgtaacaactgacgccagactttacgcacaccgtataccttgtgattttcatcgtatacgcgctgtatctctttcttcagccagtcatcgcgctgcgcacgggcactgcgtttatccggatgatgtcgctgttgctgacagtggtaatacgttgacggggcaatatgcagttcgctgcatagcggtccgaccccgtactgctcacgcagcttatccagcagtggcatcattttttccagaggcggtcgaactccgccttcgcaaaataagcggaagcctggcgaaggatatcgttactgcggcgcagttcacgattttcacgttccagctctttcagacgctgacgttcagcggtggtgagccctccatcaccgcccccggtatcccgctcatgctggcgaacccagacacgcagagtctccggcgtacagccaatctttggagcaatggaacaaattgtcgcccattgtgagtcatattcgctctgactttccagaaccatacggactgcccgttgacggacttcgggggaaaaacgagtatttttagtcatcctgtttacctctttctcaggaagtttagtctccaggattcccggggcggttcaaacagagaaggcgggggaaaagaacgagcgccgcaggcgcgcgttcatccccgttcctgaagggaaacgaccttcctgaagtcaggttgttcatgcccgtacaacatcagcaaggagaaaggggctaccggcgaaccagcagcccctttataaaggcgcttcagtagtcagaccagcatcagtcctgaaaaggcgggcctgcgcccgcctccaggttgctacttaccggattcgtaagccatgaaagccgccacctccctgtatccgtctctgtaacgaatctcgcacagcgattttcgtgtcagataagtgaatatcaacagtgtgagacacacgatcaacacacaccagacaagggaacttcgtggtagtttcatggccttcttctccttgcgcaaagcgcggtaagaggctatcctgatgtggactagacatagggatgcctcgtggtggttaatgaaaattaacttactacggggctatcttctttctgccacacaacacggcaacaaaccaccttcacgtcatgaggcagaaagcctcaagcgccgggcacatcatagcccatatacctgcacgctgaccacactcactttccctgaaaataatctggtcgttcagccagttcacgggcaatccgtgtgattgttgccgcatcacgctgcctcccgtgcctgctggcggctgtacttctgcatgaccagcgcggatttatggcgactgcgttccctgacacggaaccgcaccgacgggaacaagcgttctgctgcatcaccgggaaggggaaggaggcagacctcgccctgtgtttcaatcagcacatcgatggcatacaaccactgaagacggtttccgtgcagttcttctgcggtcagggacggcatgaaaaatcgcaggtcagacagcgatatcctgcggcttccgttcagacagcggaaaaacgcccccgcatacggatattccgccagcgagtttccctgatggcggcgtttttccgtctccgccaccgcccgccatgcggcctgttgctctgcgctgaggggaaccagtgcctgtgaacgtgcgctcatgcctgacctccttccgccatcaggatatggatgatgtcgttaacgctgtacccctgcccatccagtgacgccgccagtgccagtgaatggctgacagcttccggtgcaaaccgccgctgcacctgaaccactgcaaacgactcaccaccggcattcaccagaaccagcacccagacctgagagacatcgcccggtgaacataacgccaggtgaaaacgttcgtgggcaggcgtgaaacggacctggacggggaaaaatccgccaaactcgctgccgtactcgccgttcagcgtccagttgtccggcgcatccagctcccgcatcacggcgtgtgtcagctcacgacgttcatcacttccggcagcccggatatcttcatattcctgtgcgttcatggtctgcaggacattcagggtcagttcagttttcatcacggtatctcccttgctgccgccccgcctccgacggggcggcgtgataaatggtttatgactggcggtcaggcagcttctgcctggttgtcacggtattccgtggtttctgtctctgcctgtggacgtggtgcacacatccagcctggcacccagcggttgtctttcatgtggtgctctgcatgttcagccgcgtcccctttcttcattttctccgcgtcccgtgcggcaccggacagtccggcctcattcagggcagcgataatctgcggctttttcaggtgtccgaagaagttcgcttttgtcggctgccaccagtcgcgcatatggaatccgatagcggcttccagtgtgtccagcgggctgcgtgatgtgtgaccacactcccgggtctgtacgccatccacggaacaggccgtacagaaaaccatcaggctcatcagggtctgtccgtcaagtgtgaagaatgtggtgaaatctttctgccagttctccggcaacagagcctccagacgggttttctctttcatcagactcagccatgcctgaccgctctttccactgggagcatcacttgtcagccttctgtgatactcttctgtctgtatccggaacgggtggagagtcgtattgcagtaatcaaaaacacaactgcacaatcgccagaccataagtgccactgttttttcgggctgctgtatcagcgcggcctggactgccagcgtgcgttcggaagacattttcgtcagcaaaggcagactgatttcctccactgacgctttctcctgcacctgttccgtgcggtcagcgtcgtcagccgcgtcatcctcactgcgcaactgcacaccacgctggacacacacattaccgtaacgccaggacaccaccacaccgcttccggcacgcatctccggcgtccacgccctgaccctgctcatgcagtgaatcagcttcatttctgcttccagcaggtcagattcctcacactggttttccggtgcatcgtatcgagtcagcagttcgttcaggcgttcttcttccgcctccgtcagcaccgcttccggctgcggcagactgcggtatgttccggcatcctctcggcactcaccgacagcctccatgcgtccgacgcaccatccccagccctcggcttcccgaaggtgttcagcaacggcctggagtttttccagcagggcggcatcgagcgccacgcagtccacatagccaccctcgtcgtcactgaacaaatcggtgcgcagttcatctggcgagaaggtatcagcccccacgaagcggaatttactgttccctgccaccgccacttcactttcggtcaccagacgacgaatggtctgtacttccggtttaccgccccatcccgactggcaggctgcttcaaacacctgcacctgacgcgcggtgtcgttctccagcgccagcgcctgacagtgttcggtggtgatnnnnnnnnnngtcttctgccagcgcatcgaggatgacaggcgcaaggtctgccagtttcagcattcgctgaacgtggcggggtgaatagcccagcaaatcaccgatttgtgcaggtgttttgccttcctgcgccattgcgcggaatccggcaatctgttcagcagggtgcatatcccgacgatgaccgttttcagtcattgatgccgccgtcgccagctcctgcggaatgaccttcacacggacaggccagtcagccggaatgatgccacgctctgccagcatgttgagtgctgccagtcggcgaccacctgcggcgacaccgtggcggtcacctggcagggcatgcacgaccagattctgcaacaggccgacacctttaatggactccgccagttcgctgacggactccgctgaatacggcaccgtgcgcacattcagtggtgatttaatcagtgaggccagcggcacactcacttccgccgtctgcgccagcagggcagacagggcggtttcctgttcttttgacgatttacggctggatttacgcaccgtttttaccttaaactctgtaactgacatgattattcctcttacggtttagttaatgtctgccggacgcgttcccgtccggcaccttgcttacttaagaatcccgaaatcacggatgacatggttcatccagtacccggcaccgtcctcgaaattccaggtgcgccagaccattgcaccgttattacgaacaaccaggcgaaactgttcgccgtggtcatcctcgataaagacgttccggtactgtgcggcaacggcttcggcatgtttgcgggtaaaaggaccgtcaggcagtccctgaagtattctgaaatattcgctcatcctcatctctccggtgatgccccgcacaggacggggcggttgtcacagtcagtcgttcagaacgggatatcgtctgaaaacccgtaatcgtcaccctccggcggttgcggctgaggctccggctgcgcggccttacgtccacggcctttcgtttttgcgccaccttttttcgtaccggcctccgcctgtggttccggctgaggctgaccgctgaactgttgcccctcttccggctgagtctgagcacctgcggcacgccccagcatctgcatggtgcccgtggtcttaacaagaatttcagtgacgtaacgggtaataccgttatcgtcccagctacgggtacggagttgcccctcgatgtagacctgcgagcccttgcgcagatattcaccggccacttccgcgaacttgccgaacagcaccacgcggtgccattccgtttgctcccgcatctcccccgtctgtttgtcacgccagctttctgacgtggccacctgcaggtttgccactgcgcccccgttggggatgtaacggacttccggatcttttcccagacgaccgacaagaatgaccttgttaatgccacgaactgccatgatgtgtctccttctgttgatgttttcagcccccatcatctgttgagtttcgggagccgcggttttgacgttttgtggggacctgccgtttgttccctccggtattaaccatcacctgtttgagaaccttcgccgcaaggggcatcactgccacggcctgacgcacctgtccggggcagaacgcaaaattttttaccgggttttgggtaaaaattttgtgggctgttcatttaccctggacagtcagtgcggcaggttgtggctgtatcagcccccggcgacaggggcttaaacaggtgcagggcaccggacacaacaacgggcagggccccgccgcaacgacgaagagcgcgtgcgcgaaacggcgttgccccttacatcccggcgtcttctggccgggatgccaggagcgcaggccacggcgcgacagaggcggcgcgaccgttccggtcgctgcaagccagggttttgcgtcagggatggaagcccgccagggcggagacagctccgctggatccgttcacgacagcccgccccgtcagggggacgcccggaaaaggcacaggcaggagaacaacaaaacagacaggaatcagagcagcaggaaaaagaagaacagtagcagtagcaggaacaacaacatcagtaacagacaaatgacaggcatgaagaaacagaagtccccatcagaacgtccgcgtaatgaaaggggcggcgcgtcagcgcggcccctttcagcgccaccggcgcgcggtcttttcccggcgcgggcagacgggcatttatcctcccgcctgcccggcgtcttcaggcacgcagacgaataatcatcgtcgggacatcggtataagcaaacgtgccgcgcagcagctcctcgcggacgtcagaaaacggtaacagcttctcctgctggcgtggtccgttgagacagacggcgaccagcacgcccccccggacgcaacagggaaaaggcccgcaggatatgccggatatcctgcccgtggctgaacggcggattcatgataacccggctgtaatactgcgccggctgccattccatgaagtcgccacactgaaccctgacaccgttaaaattttcccgcagataccggaccagcccgctgttgatttccaccgcatcacacatggcccccggcgcggtatcccgaatcgcccgcagtatggccccggtgccggcagagggttccagaatgtgatcacggttgctgatctccgccagcatcaccaggcgatcacagaccggggcaggagtcacaaaaagctgagattcagcccggatttcagcaaccggcgcggcgttatccagccttgcgcgcatcagccggatacgttctcttaactgactgtgcatgtcattatctccgtcatcccccggggattttcccggggggatataccttatttctgtgggatttccgtgattttcatgtcggtgatatacacattcaccaggcggaaattattgtccattgtgcggcggtagcggtatgccccgtggtcttctgcttctgccacactgcgcacggccttacagtcccggggcagggcggcccactgtgcctttgtcatttcccggaaaccttcccccggatagttgactatcggcggacgcttcgcggcctgactggcgacggcagcctcttctgccgatggtgctttgtagtccgtgatgcgatcgggcgtcactttcatcgtgccgctgtacccgagaaaactgtaatttggcgttgtgactgaactcaccgccccgttgcttttgttcacacggatgatggtcagccactcgccccggctgaaaacctgtccgcccggctcaaaatcctgtgtccgggtaaccacgccgccgctttcgtccagcatggcacgctcatagatcaggcggttctgatagtggttaacccagcgttgctgatgctgaatctgccgttcatgacagcggatcgcaatttcgcgggcctgctccgtggtgatgatgtcatcatccagggccgaccataacgatcgacttccttcatactggcttttttctgccgggcgcggatacgtatccagcgggaaacaggcgctgatatggtcatgactgctgatgagttttgccatattcagatccagcgattcagcccgccacatcgtcagatatttctgcgactgcgcgatggtcttttcagccttgcgcaaatcagcttcgatttttttgatacgacgccagcgaacgtccggacgttctttatacttcgcgtgaagcagtgccgaccgcgcccgctcttcccagtattccgcacgttcaaagagcatcacagctcgtttcatgccgttttcaatacgctgcgcatcacgacgggcgcggcgttcgctgtgatgccccacaagaatgggctgaccgggcgggatcatcgcggccagtctttccacttcatcaagtgcctgtgcggattcactggcccgctttccgctgtatccggtaaaccgctccgcccgagcttcctgacgttcagcgagcgtgctgtcttcatcctcaatctctccggcaagtgagaggagcacgtcttcccggcccggtgtccaggccggcgcgacaaacagcgcctgttttggtgcccagcgaaaaccagcatcatgcacttttttatacgtctccgggtcaagacgtgacacggcatacaggcgcagtttgttgtcatccggtgagtaggtcgcgcggtacatctgcacagggctggcggcttccggggcggtcatggtgattgctgctaatgtcataaaatgttctccttccgtctgttgccgcccctcgcggggcggctcacctcatcagttaaaagcgcgtttcagttcgagtgtgcggagcacctgcccgaaggccgtgtttttcatggcggggatgtgtacaccacgcccccggtgaaaactccgggctatgtgtcgcccgaaggctttcagcacggggtcaatttccggcgcggggatgtcttcgcgtctgaaacggggatgacggcggggctttacagccgctgaggaaggtgaaacaatacttaccgtcataaatgaatctccttatgactgttgaatggagccgcaaaactgttccagcagtctctgcggcgtggattaagcaggtccctgacctgcttttttcatatctgcgtctgacgttctccggtgttttcctccttctgtttctgcgttctcattacctgccagccggatgactgacagaacacataaatgcgtattgccggagcctgaaataaatcctgatttttaaagaacatcacccgttgagtttcgggagccgcggttttgacgtttcgcgggaacctgctgctgtattccctgtggtatgaacttcacccgtttgagaaccttcgccgcaaggggcatcacggccacggcctgacgcacctgtccggggcagaacgcaaaattttttaccggtttttgggtaaaaaattttgtgggctgttcatttaccctggacagtcagtgcggcaggttgtggctgtatcagcccccggcgacagggactcatacgggtgtgtggcacccggcaggcaatgagcagggacccgccgcaacgacggagagcgcgtgcgcgaaacggcgttgccccttacatcccggcggccttttgccgggatgccaggagcgcaggccacggcgcgacagaggcggcgcgaccggaacggtcgctgcaagcccggggttttcacgcatcggaccgtagcggcagcccgaaaccgcgccagcgggttcggcggagactggcaggtgcgccagcagctgcctgtcggagtcgggcctgacgaccggatgccgccaggcagccgg

SEQ ID NO: 182 - DNA, 43598 bp, Escherichia coli
  source 1..43598: mol_type = genomic DNA
tgcacgcgaaaaacagcgtgttgctgcagaaaatgaacgtagagcgaaacgagaagccgagctagcaaatgacaagaagcgagatcaagcttatgaggatgagcttcgcaagctgcaactcgaaagcatgaaactcgaactgcaagcaaaagcggctcgtgtccagcgagaaaacgattttatagagcaggagttgaaggagagagcagctaagacagatgtaattcagtctgaggctgatgcaaatagaaatatttctacaggaagtaaagatttactgcaaagcgaaggaaaagctagagagaagaaagctagcagttggtggtagtaatcactacgattgcgagcatactgtcacaaatgacaactcgtagaatctgttaacaaactagattctacgaggtttcaatgacaccacgacaattactcgaagacgtcaaatcccgcttcacacctttgattgcggatgaacctgccttactggaatccctgctaagaaaagcattgggaacctaccaggatagggcgggacacatcaagcggatacgcttcactgatcagacctgtaaatcacttgcttgccctgctgattttcttgcgctcgtatcggttacggatcataccggcgatcttgtctactccgatgtttacgatgggaatatcgagcttgaagatactcatcgagcggtatacccgctgaatgtgtcatatctggctaatttacgtgatatggatctggataatggggaagtgccacctgaaatcattgggttactttctgactatctggaagtgttaatcgcgatacctaacactgatcgcctgcgaagaatatctatcgcggggaaactcgatgcaagcaatttatccgacgagaacacgctgtatcagcgaaagctggatctggaagagaaaatgagcgcaacaagggcaattatcccggggattgttcttttctcatccatgttgaagtgagggggctgatatggggcttaatgttgcttcagtaaagtcttatgtatcttcggcattaacgacgacattatttggctccggcgttggtgagcgggaagttggtaagctgacgtcaatcatcatgaacaaaatgctgttcgcgcaaggatggcagttctctgtcgaagttgatggactggagggggcagacttctttgccaaagacattacctaccacgattacagcatcgaatatgaaacgattaaaatcggcggagggaatatccttcaaccaacggagcgttcgcctgggcagataacaatgatggtcagggataccgttgatggcctcgttttagactggtttaagacggcaaaaagtcgggtgatcaatccggacggtaccgggaatataccgtctaaatatttgctcaatgtgcgtatttatcggttgctgtcttccggcttaaccaaactggaaaatgagatgacggtattcccggtcactaccggcgatgtcacctatgcgcgggatcaggttacggaatttaagtcattcccaatgaccttcgcattgcacagcacgtttaaccaatcctcaagttctttggcttcccttctgggctttagtttttctctttgaattaaggagcaaggatgcttttaccccttttcccgctaccatcgcggccaactgaattgatccagttccgtcagccaaatattgctgatgcgatgcgtttcaactcgataacaccggaggaacaagaacaacagacaacggcgtatttaaaagccttgctggctgaacccgcgaaacatgatcccctgacatggacggcgcaggaccggattaccgcgttatggtggatatttaccggctcccgtgaaacaccggtcgagacattcacctacacctgtaaacattgcggtaaagagcattattacgattgcgatatgaatgctctggctgaagatatccaggtcctggaagtggaacctttcattgacgatattgaggtgtctgtagagggagtaccttatcaatggcgtatcgtgccgcttgatggttgggcaatggaaatgctggagatgcgccgtgcagcattgccacctgaagacgacgcggaattcaaagaagcgatcgttgatttgcgtttttgggaattcgcttatcagtgtgagctttataacgatgttagcggtactcgtgaagatcaggctgagcgtcgttatgaaacgattaaacggatggccattgatactgaatttatgaagctggcggcacacatccgactggctcatgaaaagctcgaacatggtttaccgtgctacatcgataaaggtgaaatgcgtcttcgtctcccgccgcataaatgcccaaatcaggataaaaaggagtccacagagggtgcatatacccgtctgtgggtgccctttcgggctaccgacttcattccacaggtggggattgaaaagctatcagaccttagtgtccaacctggttttgtatgggggtataccgattcaggacgctgaaaggcttactgaatcctatgcgtttttcctgttggagaaactggaagaaaaacttaaaccgaaacggtaggcgataagatcatggaaagaaaaaacgccaatattgacgatgttataaggacagttgaaaccgccagcgcgaaagagctggaagagcttgcaggtattcgggaagctgttgaagatttgaaaggggaacgagttgcaactgttgatcctgtctctcgcagtgtgtcggcattaaatcgcacaatcgaaaattcacgtcctgactttgtgaccaatgcgccatcagtggaccctattgttgacgcaataaaacggcttaatttaggggacgtttctcgtatacgggaggacaaagtcactaaccgtgcacagcaggctgcaccaacagcgcacaatcccccaaatagacgaagagaggcaataacagaggatgttaaagcacagcggttagaaacggttaaactcgctcgtgatttgaaaggggaacgcgttgcaacggttgacccagtatctcgcagtgtgtcggcattaaatcgaacaatcgaaaattcccggccagactttgtggccaatgcgccatcagtagaccctattgttgacgcaatgaaacggcttaatttaggggacgtttctcgtgtagttcaggagggcattgctcaacaggaacagcaggccaaatcaactacaccaaagggtaaaaaacgacgcaggaaggctataccagaggatataaaggcacaacggaccgaagcagccgaacacgctcgcgaaatgttcgatcaaaaaggcggtgcgcaaaaaagccaaaaccaacgcgatgcgcgtggtcgttttattggaaagtcagggagtaaggccgcagcggaagatgcccgtgctgaacgtgctgaaaaggccaggcgtaaagaggatgatgagcgtctaaatgctgaatcaggtttattaaaaaaactgtcaaaagtagctgaaggcataggtaacccttcagagactcgtgccgttgatgcgttaggttatgccgttgctggtccattgtgggcagcagggaaggagcttggcgggatatcaaaagaagttggtggatcgcttaatggtgccagaaagtctattgccgatgtgattcgtggcaatgacgataacagccgtagaaaaggtttttttaggcgtaaatcgcaaaatagtgccgatgtcgttcaggttaacacccaaaaacggacagttcaggaacttcaggagcagaccagcgaaattaaagagggcaatgacaagattctcagcgcccttgatcagatagccaaaaacaccgggaaaaagaagggcggcttgctgtccaaactatttagcctgttagggaagggggccggtggcgtcgcgtcgttgttaatggggcgtggcatgctgaaaaaagctggagcactcgcttttggcgctctgggggcaaagaaacttgtaggaatgctacgcggtggtggcaagaagactatcgcccatgaaggtggagatttggctgcccgggcagcaggtaaacttggattaaaggcagttggtaaaggggcgttacgcgcaattcccttagtcggcacagtggctggaggtatttatgatgcggtaaccggttggaatgatacagaagcgcaacgtcgagcgtttgggcttaaatcaggacaagatccatcattccagcaaaaagccgcttatacgttagccaatgttcttgatatggggggactggtatctggtattagcagcgccattggtgaggttctcaaatcacttggatttgaggatatcggcaatatgttgcaatcattttcgacggaaagtattgcccaggccattgatagtgggattaccaacttagaaacatatatttctaaccttggcgacaccatttctaccaagttcgaagattacacagcaaagattggtgatgctgtttcagcatggtttagcgatacatctaataagctgcttgaaaagctggatgccatcaaagacttctttactgttgataacctgaaacaggttttcagtgatgcaattgatagtgcaattgatttcattaagaacccagggaaacacattaaagaggcggctggtaatatttgggatggggttaaaaatttacctggtaaagcattagatgcagcggttgatgccgttaaaaatacccctgcggcaatgattgtatcaaaaatacccaatccgatcggcgaggctaatgcgaaagaaatcactccagagttaaaagctccggttaatagcgaggctaatgcgaaagaaatcgctccacagttaaaagctccggttaatagcgaggctaatgccaaagaaatcactccagagttaaaagctccggttaatagccaccaggagacatctgattctaaaactgaatccgatgccaaacagactaatattgttacccgcgtgataaatgcggcactggacacggcgaaagatagcaataaaacagttaaagaaactgcgaatcagattatcaatgcaaatgccgtagaaacgggcaatagcgcgttgcagaaaattgataaagctattggtcaaaatagctcgtcatcatcgtcgcttaataccactggcaccaggagtgacattcagaaagctgcggatacctacaacaatggccgcttggatgtaaaagtcggaagtcttggatctgaaggtaaggcaaatctcgataagttggctccgtattttgctgaactagagaataaatatggtcttccagaaggcactctttacgcgattgctgcaactgaatctggtggtaatccgtatgcaaaatcccaaaccggtgctctgggaatgtttcagttcacggggattgctcgtgaagagactggcttagctgaaggtgaatcgtttgatcctgtgaaatcggcagaagctgcggctcttctcatgagcaagtatctgaagcaagccaatggagacttaaacgaggccatcactgcatataacgctgggtttggcactatcaataagtggaaaaaaggcacaggtgacttatcgaaagaaaaccgtgagtacgcgatcaaggtcaatactcatcgtgctcgctatttaggtggtgaaatctatacacctggagcaggagcacagggtggggcgcaatatggagtgaggggaccactgcctgataacgctgttatcgatcagtctactggcctggcgtttacccctggtgatagcccgtttgagaaaggcggtctggtagacaaaatcggcaatgctgttggcgttaacgatctggtcaacaaattcatgaatggccggggtatgcgtcgggaagtcgttcagggaacgctcgaagaacgtgcacgagggaaggggaccgcaacagcagctggcaatgtgtatgttgatattccgatgccagttgaagaggcgcgtccggtggccagcaactcaagttactttgaccaactcggcgcacaaatggggattgatggactattcgataaactccgcaactcgccggggatgcggaaaaataatgcgcctgaaccagcctccacgtccaaggtgacgactgccgccaacgatttgcagcaaccaaccggtcgtatgcagatagacgggcaggttattagtgaccttggcggttccggtgccaagccgacaatgcagttggctgataataccgtttcacttgatggtgaaacgaagcggctgtttgcgcagatgacctcattgcttgccaggattgaagagcacaccaaagactcggcgaaaggccagggaactgtcgtaaaggtcagcacgcctcagccgggcgttatgcgcacggtaccactgtcaattgatgatccgttgatgaatgactacgcgagagttgattgatggccaacaataacgaaattgatcctttgctgacgctggagttatccggcgtaaaaacgtatgagtcccaggaggaggcctggggcgctcgtttatatgagtggctaaacacttatcagggtgaggtatacggagatccgtcatggggcaatgttttaccgcagtttaaacacgaaccgaccaacttgtcgcatgttcaaattgcggttgaggcaatgctgttgcaaaaactgacggtagatttacctgacataccgatttctggcttgtcagtagccgagggagatgcttttgataagttgaaaatatccattcgtatcagggatataactatcacacaggacgtggtgctatgagtaaaacaacaccgactaaagacagtattcgtgcagagtttgaagagcttgtcgagaaagattcattctggtcgaagtttgtcggctctcaatttgtctcgatgctgacattgtttattacccagattgtctacaggtgctttcagtatgccgatgcggcgctggctgaaggctttatatcgaccgcgacgcggcgttcctctatcctggcagcggcagaaacgaatagttacgttggtaccaagccaacaccgtcatcggggatgattgagatcaccgccacaagtgaagatgccccagcggtaatccccaaaaacatgcctttaatatctgacgaccagtacccttacatgactatggatgtatgcaggttggttgacggcaccggtacggtagaagtggcacagttggaaatccaggaggtgacatataccgttacggcagccaaagaatttctggaagtcgtgttatcaaaggctcttactgctgtctgctataagctggaagtattcgtgacgaccgatggtaagaccacgcagtggtcttccagcactatgttccggttagccggtagtaaaagccaggtctacgttgagttttataaaccatccgagcagttgggggttcgattcggcgatgggctaattgggcaaataccgccagaaggttcgacaattacgcttaaggtatggtgcaccaacggcgatataaccctggttgctggccaaaacctgacgcctgtcgattctgcggctaatttagctaatttgatttcagttaagacaacgacacctataaccgcaggtaccgatgctgaaacaacggagatcacacgtaaccgtgcacaatattaccttgcctatgatgatcaggtcgtatggggcggggactatacgtattttctggttcgtaacatcccggggctgtcctgggtaaaggcatggggcgaaggccagcaagagaaattagatggtgcttataatgttcagaatatcaataagatatttatttcaggatggcatccaaataaaagccagtcagagcttgaagaaatgatcctgactgcctttaagaaggtaccgaatgaactgaacaagaaattctcttataaagaggtcagaaaactaccatttaagataaccatcaccgggcggatatcggcaagcctgactattgagaacgtgactgatgagttgaagtcggcactggaaacaaaatttgggcgcgactcaaatttctttgatccgaacggtgtcggcaagtacatcctgatcaagaaaaaagacgtttgggcatttatcgaaacgctgggttatttccgcgacttttatctggaatttgtcgagtggaatgagtccaacggcttttacgatttcgtttatctggatacagaaaactccacctttaatatttcgtatgaggaggagtgatgcaacgttcctggtttaataatcggcttacatcagctaagcaaaagtcattgctctataaatcattggctgatttggttcagtcaatgatggacacctttgttgacccatggttggagcgaattaccaaccggaagtctattttttccatgagcaaggaggatctggagaccaggacaaatgaacttggccagttctttactatcagaacctcaaactcatcttccgttccgatgttgttacaacagcggcttgatgagattcactttaaggggactgaacgccctataaaccagacaatttaccgcgaatttaatggtatttctgttttatgggatccgatatatgcaccggtggaccttgaacgtcatccctatggcacagttctaataccagaaagcacactggaaactaccggcggcacattcggtgagatgtttctgacttccagagggatgatcagtattcccataaacgacctggcccggacaatgggtattactggcacgatagatcagtccgcaattacagaagaaattctcagaaagtttaatcagttcgtaaagcctctactgccactgcatatagtgtttgatgggcttacgctctatttgtcggttgttgtgaatgaacaggccgacatgatcactttgaacgagatttctgataccgaaaaagcgtactgctggtttgaaacttcggatacaacttcgcttactggagttacgtcgattagcgccccgatcaccgcaacgcctggtggcactattgtgaaagcgacacctacgtttgatcgcacacgcgcagatgatttgttgctggatagcgacgcctgacaatcaccccgtccgcagggcggggtgacaagttacttctcttacaatgaggcttcacaacattgattagggaaaatcatgtctgacgtctcaacaaacctctataagagtcagttgttggactattactatcagcggcgcgctgaatcgtccattaacaaaggctctcgatttttaatcagcaaggccgttttcggtaccagttcactggttactaagaaaggagatggcacttatgagattggagaactgccaaaggctttcgagctggcagaactgaccagtaaattttgcaccatcaacctcgtcccaacctactcaggcgggataattactgtccgaatggaccttgatcaaagccagttgcagaaagggaaaaactacccattcaacactctggttgttctggataacgagaacaagccaatcgccattatttgtgtccaggaagactcgctgtatgtgggcaaaacatataccgcagttatggccataaacacgactacagcataaggatatgcttgatgaatgacgttacagttgtcacatcggttacttacccatcacccgagtcgttggctctggtggctgatgtgcaataccacgaaccatatctgtcagccgcgctaaaccgaaaattcaggggaattgttgaccctggattttatgccggtttttttcctaagcctggcggtgggatgaacctgttaatcacctcagtggatggtgataaaaccgctggcgcggcgtcagtgaatattggtgaattctaccaggtaactattcagcagcgtaaggatatttctcttgcacttagcgcaggtaagaaatatgcaattgtgctgaagggaagatacctccttggagaagattcttatcaggttaataccgcgtcacatattcatgcggctgaatttgttgccagaacctataccgattcatatcagttaggagatggagaactgcttgtttgtacggtgaatatccctgctggcgtatctgctattactaaggaaatgatagatgtatccgaccgcatcgatctcgcgataggcattgaaatttccgactctgtaaccagtaccagaagtgatgtcgctgcaagttcgctggcggttaaaaaagcctacgatctggctaaaagcaagtatacggcgcaggatgcaagcacaacacaaaagggattagttcagctcagtagcgcaactaacagcgacagcgaaacaatggcggctacccctaaagccgttaagtctgtaaaagagctggctgataccaaagcgccaatagaaagcccgagtctgacaggaacgccaaccgcgccgacggcagcgcaaggtacaaacagcacgcagatcgcaaatacagcctttgttaaggcagctataacggcacttatcaacggtgcacctggcactctggatacgcttaaagaaatagctgctgcgatcaataacgacccgaatttcagcacaactatcaacaatgctctggctcttaaagctcctttagcaagtcctgcattaacgggaatacctactgcgcctaccgctgcacagggtacgaataacacgcagattgctacgaccgcttatgtaagagctgctatctctgcattggtcggctcatcacctgaagctcttgataccctgaatgagcttgcagcagcactgggcaatgacccgaactttgcgacaacaatgacaaatgcgctggcaggcaaacagcctctggatgcaactttaaccgcgcttgctggtcttgcgacaggcgcaaataaattgccgtactttaccggtacagacactgtttcccagactgatttaacgtcagtcggtcgcgatatcctggctaaaacaagcacactggctgttatccaataccttggtttaagagaaatcggaaccagcggcgaaaagatccccctgttgagcacagctaatacctggagttctcaacagactttcaaaggtaagacagcgttttcagctgctgctacattcagtgccgggatagcaggagccatcgagccggaaaaaattggcgaccagacggttgatcttaacaacctgaccatcagctcagatgtcggggcaattaaatattattattgtccaacctttggaggtggtgcaaatatcaccaacaagcctgacggcgtaaacggtaactttttgctccgtgtagagtcgactcgcaaagtttctgcttcggattatgcgaacatgcaaacgctgatcagcaacgacacaaaacgtatatacgttcgctttgttgttaatggaagctgggcagcgtggagtcaggttgttgtttccggatggggtcaggatgtaagtgttaagtctcttagtgccgtggctcttagtggatctttgacaggtaatgcatccaccgccacaaaactgcaaacagcacgcacaatcggcggagtgtcgttcgatggtagtgccaatatcgacctgccgggcgtgaataaagcaggtaatcagagcactaccggtaatgctgcaactgcaacaaaactgcaaacagcacgcacaataggcggagtgtcattcgatggtagtgccaatatcgacctgccaggtgtgaatacagcaggtaatcagagcactaccggtaatgccgcaactgcaacaaaactgcaaacagcacgcacaatcaacggtgttaagtttgatggttctgcgaacatttcgataccaacaattgcgtccagagggcgtgttactgcgctcaccgatacaacacaaggtgcttctactggattgcagatgtatgaggcgtacaacaatagctacccgaccgcgtatggcaacgtattgcacatgaaaggtgcgagtgctgctggtgagggcgagttgcttattggctggagtggtacgagcggtgcacatgcgccggttttcattcgctcccgaagagatcacactgatgcggcatggtcagcgtgggcgcaggtatatacatcaagggactccattcctggtgtgaatgccactggcaatcagaatacaactggcaatgcagcaactgctacaaaactacagacggcaagaactatcggcggagttagctttgatggtactgcgaatattaatttacctggtgttaacgttgcgggtaatcagaatacatccggtaatgcagcgacagcgaccaagttacaaaccgctagaactataaatggggtgttgtttgacggttctaaaaacattgagctaactccaaggtctataggcacgatcaactcaacaacaatgtcttttagtggtggtactggatggttcaagctggcaactgtaaccatgccacagtccagttccgtggtttacataagcctgattggtggttctggatataatgttaactcccctatgcaggctggtatatctgaacttgttcttcgtgcgggaaatgggaatccaaaaggtcttactggtgcgttatggcgacggacatcggttggatttactaattttgcatgggtgaatacatccggtgatacctatgatgtttatgttgaaataggtaattacaccacacgtgttaatattcagtgggattataccagtaacgccagcgtaacgattcatacatcaccatcttatacagcgaataaaccaacaggcctgacagatggaactgtatatgtaatttacagttcgcacattaaaccgaccgccacggatgtcggcgcattaccaataaccggaggaaatctcaacggcggtttaacggctactggtgagatcatttcaaaatcggcgaatggtctgcgcattgcctacggaaactacggattctttatccgaaacgatggttcaaacacatatttcatgttgaccaattcgggtaacagcctgggaacctataataatttaaggccgcttatcattaacaatgccaatggtactgttacgatcggtaatggactcaatgttactggcggcatcaatggtagtttgaacggtaatgctgcaactgcaacaaaactgcaaacagtacgcacaatcggcggggtgtcatttgatggtagtgccaatatcgacctgccgggcgtgaataaaacaggtaatcagagcactaccggcaatgctgcaactgcaacaaaactgcaaacagcacgcacaataggcggagtgtcattcgatggtagtgccaatatcgacctgccgggcgtgaataaagcaggtaatcagagcactaccggtaatgccgcaaccgcaacgaaactacagactgcacgcactatcaacggtgttaagtttgatggttctgcaaatattactttaactgctgctaaccttggcctgagcgattcaagcggatatgttgggcgtttggtgaatacccaggttttcacttcatcaggtacgtataccccaaccccaggaacaaaacggatcagggtcacaataacgggcggcggtggcggagggggcggctgcaaggcatactcgagcagcgagacgtttttcggtgctggcggtggggccggtgggacaataatttcaataatgaccccgacacagaatagttatccagtcactatcggcgcaggtggggccggtggtgttagtgcgacgaacggcaccagtggcgggaatagcgtattcgcatcgttaattgctcctggtggctcaggcggcggaaagtcaggagtcacaaacacaaacggtggtaacggcggtgtgccgagtactggcgatatccgcatcactggtggacatggaggcgacggtcagtccggaaatatcggcgtcagcggtgaaggcggaacatcgtactggggcggcggtggacgtgcaggcgctggcggtggtgttatcggtaaagcatatggttcaggcggaggtggcgcatacgatgccggttatagcggaaccagtatgacgggcgggaaaggcgcttcagggatttgtattatcgaggagtttgcataatgaatacgtcatatgcagttattgaaaatgggatggttgtgaatgtcattgtctgggatggcgaggctgaattcacagtgccggataatcagcagctcattaatatttctgatatcagtgagcagcccggaatcggctgggtgtattcagacgggggatttactgcgccacccactccggaacgttctcatgatgaactggtagctgacgctgaacagaaaaaacagtcgctgattgataccgcaatggcttccattagtcttattcaactgaaattacaggccgggcggaatcttacgcaggctgaaaccacccgtcttaacgctgtgctggattatatcgatgcggtgaccgcaacggataccagcactgcaccagatgtcaattggccagcgttcccggaggcgtagtccatttaatgaaatatctggatcgctggaagcatcgactggttccagtgcgtccggataatcgagctacaagttatcagatgattaccgttcatgcctcaagagtgagcgcatgctgcacccacgcaaatttaactttcatacgaccagagtttacctatcaaaagcctttttcactctggtcgttcagccttttttccactcgccttgtcctcaaaaattagctcacatcctgcgctttcaagagcgtttcgttgtaaagcagtgttttgttcatttgttgatacgcgtacatagcctattagcatattttctgctcactatcgttatttatagcaagctgcggattttaattaacaaaaaccagtatgtgtggaaatcacaaagtacataccgtttcccaatgatatttaattcactattaaggaaatagttatgtgtgatttcacaataatgctcctctccatccttggcggggtgcattcgtttctgaatggggttcgtgaaaaacgttacgaagcgtcatgcaggcaattgatggccgagtgtattgctgccgtacttgcaggctttataggcatgtatttcgcggaatataagggtatggatgaaagtcttcagaattgcgtgactattatttgcagcatcaataacaggctcattcttgaaaagttacaaaggattatcgattcgtacctcaatagaaatgcctcttaagcaacaaatgaccggttgagaagttactttgcataccattacctcctgacaacgtaggagggaacttgtgcttgacacacaggaattagctccagttgctattgcgctcctgctttcagtaattggtgggataggcacgttcctgatggatgtccgagacggtcgccagtctggcaatttgttgggattggttacggagatctttgttgcagtgacagctggcgcggtggcgtacctattggggcaacacgagggctgggagttatcaattacgtacttaatggtaacgatagccagcaataacggtcatgaggtgatttcagggatgaaacgagtgaatatcgatagcattctgaatgttcttacaagtttggtgaaaaagggaggcgggaaatgattggctggggtgtatgcgttcttgcgttagccttagccgatcgctatttgctaaaacgcaaggacatcacgcatttagaacttggtgatgtggaaattaaaccgggtttcatccgggtgccgttcaagtaccggtctaaattcccgtttttgcgcggcgcaacggtcagatattggatccgcgatgttcagaagccgacgacagtgattgaaggtgaacaacgttgtctgacgtcggctgaacagggcgaaaacagtgaatggttgtacatacccactgaatatatgggtaaaggagagcgactgtggcatttcaacatcatggttacgcatggcgactcgttcattaacccgttgtatcggattttccctgttactcagcaaatccgcagaagttacgtaataaatctcgcacaggatgtgtcagatgacgaaaaataagtatgcaacggtcgattttgaccaggttaatgaaaaggggctgaaatcccttatcgcggcgatcaataaaaccggtgttacggtaattgaggttgactccagcaaccgcgcaacaacgaaagatggcgttaaagttaaaaccgcaaagctggttcttaacgacggacaaattcttgccatacaggtaaacgatactggcgatatatcgtctgtgaaactgaatggaaaagctattcctaacgctcagtcgccggatatcaagacgcttggtaccgtcatgggacaggcggcccgcaaaaactccgcaaaattccagaaatcactgatcgccaaagcgaagcgtgttgccaatccggtagacaagaaaccggcagttaaatccaactttcagcgcctgcaagaagcaaaacagcggaatgctcaggtggttgccgcttataagtccgcgcagaattcggtgtctttcaatcaacagcagatcactgatttgcgggcgaagctggataaggagacgggccgactcaataacgaaaaggcacggaatggcgaactcaaacgtcgtcttaagcaactgaaagcaggaaattaacatggaacagttaaatatcaataaaggggtgacgatcaagcctgggcttgacgtgcttcccccgccagtgactgatgatgaatatcgcgcattaatggccggtgaggaccgctatctgatgacggaatccaacaccctggaggaaatcgaggctacgttcttctatgacacgccgatccactggtgtgctacggatttactggaggcgattagttctactcgtttgcagttacaccggaccatgcaggcatttgtccgggcattgaaccagaagctgaatggtaccggaatctctgcggggagtgataaaacgggggaggtggcccagagcggcgcgcgcgcgatcggcggtgctgaaattggccgggcacgtaacgttaacgggctgccggtcctgccagccattattnnnnnnnnnntcagtgattgtcagactatcagcattctgtttcatagcccgacagcggaaaaccggatcaccaatagcgatacgctggttgctttccagttcttactgaataaaaaagacgttactcacaccgttgctccgatgagtggacgtgatatgacgctggcgcaggtcaccatgaaacttgccaaccttgcagagaaaaactcggcaaaattccagcgtgcgcagaagaagaaaaaagccctggttgatgaaataacccaactacaggctgacagtgaccagaaagaggatgccatgagcgacctcgcggatcaggtggcagcggtagaagggcagaaggtagatctggagcagaaaattaacgctgttgcatcggaagcggattctctttatgaagagaatgagcgtttgcagacggagattgatcagctcaatcgcacaggtgggcgcgataccattgatccagcggggatgactggtgggcactcgcgcgcgctgacggatcgccttgccagtatcaaaaatcgtatgcatatgaacggggaagtgacgctcagtaatggagcatcaatgaagcaattcattgggggcggcgaagggtatatccagttaaccgatccggatggcagcgtatacatgatcaaggctaaatccatacagggtgtggacatggcagatgcgatcggcaagctgtttaaagcctataaagcgggtaatgtatcggaatacctggtccaaccagaagaacataaaccggaaaacgtcgaacctgaaccagcggaggataccggtagctcttcgcctgaaccagaagtctctgtaggtgcatatcgatatgccctgcaaatgcgtccggcggcccctggcgcaatacctgaaggtaacaaagcaattctgccgcgccctgatgaaggtgacccgtattatgaatatgcacgctacggcattgctacttacgataccccgctttctgatcagcaaatgagtgagtacgacctgaagttattgcctcgcgaggattctttcgacttcctggcgaagacacttactaatggtccgtttggcaaatatgcacaaaaagctctggagctggccaccagctcaccagacgagttccgcgtaatgctgaaaactcagtttcaaaaaactttccccaatattgcgtttcctgggggcgctggcaccgagaaaatggtgcagagcatgatcaatgcattgcaggccgaagtcggtgagattactcagccagaaccggccccggcacagcctgatgaaacggttagcgaagcagatgcagaggctaataaagccattgaatatctcaataacgtgatggatatacaaagcactgacatggcggagatccgtaacgcccggggcaatgtccgggaagcgattgcagcccttcaggctgccggacgttttgaggaaaacgaagagctggttaacggcgcagctcgccacctggctgatctgttggtagcaatccagaaagcgggggtagcggcatgacactatcagctattgagttaatggatctcagcgataagttggatgctctgatgtccaaagcggctaccgcgagtggcatggagttgctggatatcagcgatgaaattgaccagatcatgcaacagatggggtacggtgtgtccggcggcagtagtggcgaggaaaaacaaccttcggtacatgatggtgtgccaaaactggttgctgatttcctggctgataaattcgtcgatcagagcaccgatgcatttatcggtacgttgcaggacttgagtcaatatgttggcacatacatcgatctggaccaggttaaacagcacacggcggcatggatagccgccaacattaaagaggcagagtaaggcgtaacagggatgagcttaagcgatcaggtggtaatggccaccagcatagaaacgctgatcgagctgctaaaaaacctgcccaattacgggcgggtttcgtatgtggtgacagcgaagggagacgaggtaaaaacagcgtttgatatcgtcgatgcctcagctcttttggtatccaatactctggacgggaaaattaaccctgactatccccaggaacttcagccgcgcgaccggacccgcgcatccagtcttcttcaggtcaaccagatatccaaggatttgcgtcctgcccagcttaccgattccggtttatccagccatggcgcgccgataattggtgaggacaatgccgttgagtcaggtaatggacggaccatggggatcatcaaagcctatcaggacggcaatgcggatcggtatcgtgagtacctgattgatcatgcgaccgaattcggcatacgacctgaaaaggttgaatcaatggcggctccggtactggtgcgccgccggttaactaaggttgaccgcgttcagtttgccaaggactcaaatatttctgatcttcaggaaatggcagccagtgaaaaggcttttgttgatgctgacagcataactccggcgatgatggcgctgtttaacccatcagaaagcggagatctgcttagccgcagtaatgacgcgtttattcgcggattcatgacgcaagttggtgccacacaggctgctggccttgtaacggaagatgggcgaccaacacggcaacttgtagaccgtatacaaaacgcgatctttgccaaggcatataaggatgcgcgcctggtaaggatggttgcagaagaacctgatccggatatgcgtaatgttctgacggcgcttaatgcggcagccaatgattttgtccagatgcaggctttatcaggagaagcgcacaagcaggctgtgacaactattgttgatggtattgagacagcggatagtctcgataaaaaggcgctggcggcattgaaagatgcggtagacctggtaaggcaatcgaaggagtcaggccaacatattatcgatgttattgctcagggggatatgttcagcgaaacagccccggaagtgaaagcgctcgcgttgttcatcgtcgcgaataaccgtagcgcgaagcgtatggccaccgcctttaaattgatggctcaacgtatcaatgatgagttacagcaccagggccaggcgctgggggatatgtttggcggtggtgatgtgtcgttacaggatatccttcgccaggtgtctcaggaactggaaaacgaaggcatgcaagggatatccggcggtcttttcgagtccgtttccggcggtagttacaacggtgttgctccgtataccagtttgctattacatcgggcatccggcatcaaagacattattcatctgatcaggctgctttcccgcacagatccccaggatgaacagcttgtacaagtgcttgcgcattttgttcgaatgcctgttgccgacgtgaaaaaatggtgccgattattcggtatcagcaattcgttacttcgcggcttgttaaatcacgcatcctcccttgggcgcgatggctttgacgagatagcgcaggcgataaaaaacggagatatgccaccagctattgactggttttccattcgcccaaccagggtgaaagcattccttagcgcggcgcattcggcatcaccattggcagaaatggttcagaggttgtcgctcatattcacagaccataccgcgttgggtgatctgactctggacgagatgaaagaagcctccattcagtgggccgatcaacaaaatgaggttaactctgacttcttgccagcattcaggaaggccgttagtaaagctgatgatgcccgtggaattctgaaggcatttaaggcattgcaaagtcaggttaataaacatgtcggtgatatcgatggggtaacggcggaaggcagggatatccttaaagagcacggcataacgccagagtttattgatgagatcaggacggatatgcagcgtgaggtcgtatcgtccctgcaaatcgtagccagagcgttggcggatgctaatccgaagagtgcggccattgttaaccgtgttattggtgatattgaagcatcggagggcatgggggcgctgaaactcttcctttcgcgagcgtttaatcctaacggcaatattctccccgacattattggtgaggctaaaaagtatgtcagcgaagaagaacttgagcatcttgaccaactacttaagcgattctcatataacccgcagacacgctggcaaatgaatcagcgaagtatgggttcggtccacgagaaagtgttatctgccatgaatagtgcgatagccaactcatccgtatctgaagaaaaagctcttgagtgggccgactcttttatcacggaagaagtggaagaagcccgcgctggacagagtggtgggatagacctgcgcaaggaacttgctgatatttatcgcctgaccggcgggaaaatatcgaccttatcaaaggtggttcaccaccagggaagggcatatgcaaatcttaatggtgttgttgctgtcaatttgaacgatgaaaatgcaagtgcactgtggcacgagctgggtcatcatcttgagtacagtaaccctggtttgttagagaaagcccggtcattcctgaaggccaatgttgaaggggataagccatctttcgttaatatcggtgggcgtggcaagcctgaatggtgcttcagatctcgattgagtaatatttatatggcgaaggtatacccgccagcctcagtaagtaacaccgggaaaattcggcagaaatcaccgactatttccaaaacgtcagcaacggaagtattctctatggctcttcagttgtatcatgacaaagaggccgctgccgcatcactgatgaatggtgacggattgctggaactgttattaggtgtggcaaaggagctaaataatgcagattaaaatcgcagcgccattaggcggagatgccattatcgaatttgatgataatgaagaagtttccgggcgtttaagcattatctccggtgacattaccgaggacatgatcgctgaagccatagctggggcaaatcccaatagctatatgggattcgttaacacccttgatgctcccgcaagtgatgttctccgaacgctgcatctttacgctggctggtttgttgattggccagcagtagatggtggcgatgaggacgacgacgatgattttggtgatcatgcagaccagatcgtatattgaagaaatcccgccaatcggcgggatttgttgtttatgccaggcgggctatgcgtatcttacaatcatctaggtggatgcgtagcgcttctaaacatggagtaaagttagctgagaatttgtcggactcacaggccaatgcataaaatttttcagccaattcaagagattcatcccatatttttcgacttacaaagtctggtagtgctgtttttctaagctcattagatattgctcccccagagcgtggagcaaaacccataggtaacatgtcataggctggagcaatatgatatgggcgtccgtggctactaataaacgataggttaccattatgcatatcggtattgcctattagcaaaccaaaagaccatagccttgttgctataataatcgcatcaggatggacgcacttattttttaccaactctttaaccagcaagggccatgttgctcttgcattcccaacaaattctgcatcaagtgcacgaagtgagaatacacctacccgacctagttgaccaacacgatcaaatcggggaatttccaagaatctctgaccgttataatcaaaaacttctgtttctacccccagaacttttaatgcgagatgttcagcaaacaagagatctctccaacgctcacttataggggtgtcgttaggcgcagagaatttcactaatacatgtccacgctctgtgaaagtacaaaatttgggttgttcacctccagcagatgaaccgggcacatcaccttcaccagcagctaaagctaatacaggatattcactttcacgattaacaggaacaggaggctgcatctctaaaaaatgcgtgcgtgcttgctctccaattaacaaattaccaacaacatcatgcccatgcttaagtaaggctttgatcacgtcagtatctgaccattgctctggatttgagggaaggttaagttcaagagcatatgctgatgcatatgctcttccaaggaagccttgtggacgcatatcaaataaccaccaaggtaacccatcgctatgcctgttatttttcccttcctcaaccataacatagccttctggcctcaccggaatgagagtaccaagaacgcaaatacacccctcttcagttatacgataaatggggactgattcgaatcctctaaaagagtctcgtaaagcatattgaatagatcttccatttccgatcctaacgatttcatcaccaagatctcttaatgctctagatatcgttggttggctaacacttagtctttcaaccaattgtcttggtgtcataggaccttgattgagcaaattacggattgttgttgcatgtatagccatagttttaattactattgtgaatagattaatgaatagattcatgaatgcgtacaatagcaagcaaaacgggaggtgtcactaatttaggtaagttaaaaagacttctttaaaagatgatgactaggcgctttaactgctagctgacataacaattggccatttgacgtggagttccccgccaactgacggggtttttattagtcactttctgtttcttctggaatgttttcttgcggttctgttaatgcagcacgacacaggttccgggcattggctatagccacacttttgacttcatccgtcatcgtgcaggtaatgtactgatcgagttcttcagcgcggatgatgcttttgccaatcagaaactgtatttgccagagcagatcagcatccataatcagaatttctgccgggccttcaggaccagccgggaaggaaacataagactgtttgcccaggccgataactcgacaacttgcttcaagaattgcgcgattgaggtctgactttgtaactgaaacaggttgattttcacctgcgattacgccgttgacatggatgtggaatggcatgtagcttgaaattcgctctactttccatacgccagcaagcgatccttcatgcagcacaatgggggtaaccgcgagtttcatctcaccatataactgctggcagatagctggattgctgaatacatccaaaggttcacactcaaacagcggcgcaatctgtatgaggtccatcatggtcataccaggggtacgagcagtaatgaatctgcgcatgccagtatccattgtgcgccagatagctacaccatgctttttgctcacttcttcagtaaagccaaggtggcacatgatggttttttcgatagccagatcagagatcgaaaccttttcgccaggtacaccatcattattgatggtcacttcgacactctggccattacgcaggcggtattgaattgttttagtattttgtgctgtcatagtcttttctctgcttaaaaactgatgtattgcgccttcaggtgggtcaggaatgttttcccaccagcgaaagcaatatctcggggtgttcttttcgtgaaaagcgcgtgccattgccaactttggcgtttttttgcgagttcgtgcttttgtcggcgtcttgaccaccgcttttctttcagtcgttttttactcataaactctaaaacggaatatcgtcgtcaaagtccattggaggttcgttattggcgttgctctgaggtttaccgccaccactgtattgctggtggttttgaggttggttcgattgcccccagccatttgaggactgtgaatcgtcacggcgagcgccgatcatttgcatggtgccgccctggctgacgataatttccgtcgtgtaacgttctacaccggcgtcatctgtccacttacgggttttaagtttcccttcgatgtagacctgagaaccttttcgtaaatactcactcgcaatttcagcaagtttcccgaacaaaacgactctatgccattctgtttgctctttctgttggcccgtttgcttgtcgcgccatgattcatttgttgcgatgcttagtcttccgaccgctccgccatttggtatatacctgatctccgggtcttgccccagggtaccaatcaggatgactttgtttacaccgcgttgtgccacttatcttacctaataaaataaaatgattagagcaataatgtatatctttgaaacgtagctaacaagtgatttgcattatcctgtgccttctaaagggatcgagtcagtcggtattggctgtgaatgggtgtttgtcctggagcgtaaaaattcgcttatgaggtctttatgaagggaaaaacagccgcaggaggcggtgcaatttgcgctatcgcggtgatgattaccatcgtaatgggtaatggcaatgtgcgaaccaaccaggcggggcttgagctgattggtaacgctgaaggttgccgacgtgatccatacatgtgcccggcgggggtatggactgacgggatcggtaatacacacggggtaacgccgggtgtgcgaaaaaccgaccagcaaatcgccgctgattgggaaaagaatatcctgatcgctgaacgctgtattaatcagcacttccggggcaaagacatgcccgataatgcctttagtgcaatgacaagcgcggcattcaatatgggatgcaatagcttacggacctactacagcaaagcgcgaggcatgcgagtcgaaacgtccatccacaagtgggcgcagaaaggggaatgggtgaatatgtgtaaccatctccctgattttgtgaacagtaacggcgtgcccctgcgaggtttaaagattcgccgtgaaaaagaacgccagctttgcctgacgggactggtcaatgaataaactccggcagctccgcagactttcgacaatgaagttatcgctggcagcgatagttttcgactcgattttcatggcggtatatgtgcttaatgaaacgtggccactggaaccgctattgtatgccgggcttcggctgtgcctgacatttttgagcatggctgcgagattgatgcagcagaaagaaaccgcttcagattgtccacgccgcgcggtgcgcaaatatatggcacgcaggcgaaagcgataatagttaacgataaccccggcagccgccggggttatttttggtggttatttgaacggattgattgaattattaaacgtgatgatgcttgtctcacgcggtgcctggatgttagccgcttgcggaacctccttaattttcttggtgacaggcaagttgcgtgctccaactttgatcagagattcgaaaagtgtggcaacgatttttgcatcaccaggttctttgaggcggaatgcgtctttttgggcggcggagacgaagatcgggaggttatccagttcgtcttgcattgctgccagcacatcgtcgcggatacccgctgtttcctccagcaaagcgattcgcgcttcagcatctgcgatcttggccattgcttcgaggtggcggccctggctttcgagtagtgcggtttccagttctgccgtacgctctgtcgcctccaccatcatttccagttcagccattttgccgtaatgggatataacggcctgcactgactcgtcggagtacccatgcgcagccagggactctgccagtagagatttagaatccgcgctttcaaacattccggcgctggcaggatgatccagactgatatagttcggcgtcgtcacataatccacaccatggaagctggtggttacagcgattttcccggactcgcgcccaccagtggcccagctccagccaccagcacggctttcgatcatcgcggcgacaattttacccggctctgtgttaagaatttcctgtgtatgggtaacgatgccgttgtcgtcaacggatatagccactgtgcggcaagctggaacattgtcgataacgaccgggcgaccttccaccatgatcacgctggtttcaggcacctccagtttaccggttagctggcggcgaccgtgaccgtaatagccgaaaagctctccaaggcgtaaaccttcctgagtttccttgctttcaagcatggcctttaccgcgcttaatacatactgtcgcccgttctggcgaccttttcgagcattactatagagacaaaagcggtcagtgaccgttttcaaaacatcagtcattatcgtttccctctttaaagaccgattcaaggatttgcgccagttcctgtggcggtgttttgatgatggaatccatcaggtgatcgtcgtcctcgcttttcgctttcagttcgttcaccagtgcttcagagattttttcgtcaatctccagcacatcgctgaacaggtaacgtttgaatgcatcggaattggcgaggacgctgttattgctgacggcatcgaggatttgcgtaacgatggtggcgtagttcgcctgcgagtcgcggttatcgttgtgctcttgttgcagagcggtattaacggagtggaattcgattttgtacgggcgatcaccttccgggtataccttgccgtacttgaaagcaagatgaatatcgatagcccgctgaatgaactcttctacgccctgctggatccatgaggcgcgcatggcggcctgaattgccgtgcgcaggaatccaccttcgccaagcccgccggacatttgatctgcccaccccaggagggtgtaatcgaggccaagtgctgccgccagctggcgcatataggtgagaatgtcttcaatgccgttgatgtcagcctggatggtctgagtatcaatagtcatctgtcccttgccgtcgcccataataggcagcagggtattggtcaccgtaggcatgttattcgcgccacgtgcgcgtctttccatcaggtcagctgctcgtttaagcgtctgagtaatggtgcgcgaataatcggctgctttaaccggatccagactattcatcgccaggccgatgattcggtcaattttcgacgcattaaaacgcgttgctttcagcgagcggatcgcagaacgcagattcatgtacggctcgtaggcgtattcgagcaagctggtcccgtaattctgggtttcaatcggcgtgcggtcttccggattatccagcaggctgaaagccttatggccagtgtgcacaggcataaggtttgacttaggccgccagtaggggattttcatagggataatgtcccacggatcggcgaaaaccattttccctgacgcgtccttcagataatcgccgctaaatcccgccaggttgccgctgacctcgaactctttgatgaagctcggaagggtgtaataggagcactcaaaagatgtgatccctatgccttctttggtgtatggcctgacataagccaccccaaatacagacatgataaatgcccacccggcgacctctttgttgatggttcgcccgatgtcgttcatcagctcgccacacaacgcctgcgcggcgtcatagtcactatcgtttccgttatgtaccggcacgatagagaaggtttgtccggtcttcttatcgaaagagagcgcgtgcgtaatatggatgttcagcgcggtggcgatcgtgctgtaaaccgccatctcttcgagtagcggatagcgttgcaagcgatcttctggcagttgaacttcatcaaagataaagcgacttccgtccaccagcccatcgccagccatgccactatcgcccggtttgccgcctaagaagccggacagttgtaccggtgcccctgcgcgagaaaacaaatacccacttccgccgtgcacagccagcgcggacaggaggatgttgtcccgttctccgttgtctttaaaaacccccgccagcgccttcctgaccgaggatagcgtgattttattgtctgccaagattgcaccttaattagaataattcgcatcgtgtttgaacggaaatttaacactagtcacttgttaaggattaccaatgaacaagctatctatgggggtgtttcgctgttcaagtgtcagcgaaatattgaaatacattagggcaataacatctcaccgagcgccgattaaatacggcgtggaaaaggtggaaggcaaaagctatgaccgactgcgccgtgaggcgaatcagaaggcgatagatttgcttaattcgctggtggacggcgcgacactgacagatgaacagcgccagatcctggctgggtacaccggtgaaggcggcattggcgggtccgtctccgaatattacacaccaaagccgatagctgaaggtgtctgggagatcatgaagctctacggcgcggacgtaggtaacactctggaaccatcggcgggctccggcgtttttaatgagataaaaccggttggcacggtgatgaccgcgactgagatcagcagtgtttccggtcgtataaaccagctgttacatccggaagacagcgtacagatttccccgttcgaacaactggctgtaagcacgcctaacgattcattcgaccatgttgtgggtaacgttccgttcggtggtcgtgataacacacgcaacatcgataagccttacgcagaagaaacggacatgggttcttacttcatgctccgcatgctggacaagataaagccaggcggattcatgtgcgtgattgtgccgccgtccattgtttcaggttcaaacatgaagcggttacgcctgcgcctatcacggaaagctgaatttcttggtgcccaccgcttgcctaccggtacttttgacgcaaacgggaccagtacggtcgttgacgtggtgctgatgcgcaaacatccggcggagatggctgagaaaatccccctggtggatgaaggcactcttgaatcggcaaatgtgctttggccaacgtttatttctggcaagtggtttgaaaaggacggccgccggtttgttcatggcactcaggagaagggattccaggggcgtattgaggttcgtgccgacgggcagattgataaccaggctcttaaagcgaagctgattcatcgtttcgaaagtcgtatcgactggtctttgctcgatatggctgaaccgtcaccgaccgcagatgttgttgatgaaggggaaatgcgcctgattaatggcgtatggcaaaaatatgctggtggtcgctggattgaagctgatgccgggaaggagctgaagattgatgttgccagttatggcgcggatagctgggaggctcttcagcgtaacctgactacaacagaaggccgtctcggtatgacatttacccagatggcaaatgtccgcgataagtacaccacatcaatcagcgacgatatggtgcagctggtggactggattaacagccagcctgaaaaataccgtgaacgcttgtatcgcggggcgatgattggccggatgttaattgaatatcaggacatgaaggccgccgggcatagtgctgaacaaatcgaacagcagcgcctttctctggtatcccgtttgcaggcagagattgaccgttttggtaaccccggccgcggtccgatagcgaaattatcggggagcggtgcgcgcgcctggtttgctttccgtggtgcaattaagctggatggcactatttctgacgagctgacaggaaaactggttacgcatgattccagcgccagttatgactccaccagctatcaggacaccctgcgttatctctacagtgatctcactcgcgatccaatccagctcgatgatttccgccttgcgtttaccggcgaactgccagccagtgatgacgagttgcttaatttattggccagcacccctggcattgcggtttcaccgtatggcgggattgttccgtttgcccgcgccaccagcggcgacattaacgagatagtggctccaaaacaggaattccttgccacactccccgacggtccagtaaaaaacaacgtccttaatcagctggcagcgattgaagagaagcgcatcaagacgccagcagagaatatccgctttaagctcaatagccgttggttcgaccgctccgtcattctggagtttttgcaggaaaacggctatccggatctgcgctatgtgcagtcagtgcagctggaaggcgacgaaatggtttctgacacctatcacggtggtgatggtctgttcgtcgggcaccgatacggtgtcgtccagcgcaaggataaagaaacaggcgagatccgctacgagtgggaccgtaaatcaggtgaaaacgcgaccgggttcccggcacagctggaaaagtatctcaatggtgcgcgtatcggtggcaaagatagcgcgacggcgaacggctaccgcgagcagatggcactgcttgaggaccagttcaataagtggatcaagacgcacgatcgctacgatgagctggttgccaaatataacgatgtgttcaatagcaatatcccgtatgaacactctggcgatccgcttgggttgaagggattaagcggtaagcgccagccatttgattaccagaatagcgaggtgcgccgactgtccgaagatgggcgcggcatcctgggcttcggcaccgggctgggtaaaaccacgaccgcgctggcgcttgaggcgttcaactatgagaacggtcgctccacccgtactgcgtatgtagtgcctaaatcagtgctggaaaactggtattacgaagcaaaagaattcctgagtgaagaggcattcagtaactacctgttcgtcggtcttgatgtgctgatggatggcgatcagattcgccaggtgccggtgctcgatgagaacggtaaacctgttcttggtactgatggcactccagttatgcgcgatgctcttaagctggcagatgaagccactatcacggcgcggatgaacgcgatcccgcactcaaattaccgtgcagtcgtgtttaccaaagaacaatacgcccgcattccgctacgtgatgacaccgtagatgagcatgcacaggatatgctttatgacttcgttgccgccgggcgcgtagccagcgcaatggattccgactcccaccgcaaagaggccgcgcgtcgccgggtattgtcggagtattcagataccggtaccgaaaaagcagagaagtatccgtactttgaggatatgggcttcgacagcgtgattgctgacgaaggccacaactaccgcaatagctataaaaatggtcgcgaagcgtcacagctggcctatctgcccaccagcgcggtggcgcaatcggcgcgagatatggcaattaaaaacgcgtacctgatgaaaaagaatggcgggcgcgggccggttctcctgactgcaacgccagtcgttaacaccccgatcgatgcatacaacatgctttctcatgttctgccgaaggaatactggcagaacatggggatctacggtcctgatgacttcgttaaattcttcggcaagaccaggctggaaacggtacagaaaattagcggtgaagttgaagaaaaaatggcgctggtgggctttgaaaaccttgatgcgctgcgcggtatattccatcgctgggtaacgcttaaaacggcggaagacgttaaggataccgtggagatcccggagctggacgaacaccagcaggatgcaccacttactgaagaacaactggcggcgtatgaagaattgcgtcagcaggcggaagcggcggccaaagccaacaatggcgtaacgacctcggtcaatgaagacggcgtgattgagcacgagaaagcccgtccgatcttctcaataatcagggatatggaccgcgtatgtactgacatggacctgtactatcgccggatcacctatcgtttcctgccggagtacgccgatgcggtgcagcagctggcggacagtttgcctaaacaagccaccagcgaagacgacgacagtgatgattcaatcacgcagcaatcgcaatactccctgatagataagggcgagtttattcagttgcaggttccggaagcgttcgagcaggaagtgaataagcgcctggccaggtttggcattgacgaacagaccgtaactcaccccgttacgcccaaatacgcgaagctgatcgccacgctgaaggagtttttcccggaaggtaagcaaatcatcttcaccgatgaaaaaacgcagcaccagaagctcaagcgcattatctgcaatgctctaaaccttgaaccttcaaaggtggggatcctgaatgctcagacggttgccgaggcaggtaaaaccggtaagaaactgaaagcggttaaaccgccgaaagagctaccggatgaaccaacagatgcacagatagcgaaatacaacgagcaaatggctctgtatgacgcctatatcgcgcagcaaaatgaaatgtcgttgggcggtctggaaaagattgcagccgacttccaggagggccggactccgatcatcatctgcaacaaaaaggcagaggtgggtatcaacctgcatcgaggaacgacggatatccaccacctgacgttgccgtggacaccagccagtatcgcacagcgtaacggtcgcggtgcccgagttggttccaaccgtgcaagcgttcgcgttcactactactgcggcaaggggtctttcgatgaataccgactgaagacgctgaagcgtaaagcaggctggatctccgatatcctccgttcagataagtcagaaatggagaacgccgacgccaatgacatgatcgaaatgcagatgtataccgcgaaggatgacggcgaacgtctggcaatgatgcaggttcaaatggataaggcgaaagctgcgaaacgcgctcgccagaaagaacaggctactatcgaccttcagaactacatcaaggcgcagcacgcagctggcgaggatgtggaggtacttaccgctgaattagagcgaagcaaagcggaacttgaaaagaccaccgccgaggtagctaaattcaaacaggcggcaatggccaaggcagcggataacgcagactggaaggcccgctgggggagtgtccatcacacagaccgtatgttgttagcacagtatcgcgcgtcgttgaaaagcgccattcagcgcaaggctaatatctctcaggccatctcccgctatgagaaattattgaaccgtactcagaaggccgcgacggatatcaaacgcctgcgcccgctggtggaggatgcaataaataaaggcattctggatgttgatcctgatctggttaaccatgcgaatgagttccttgttatcggcgatcgctcatggcgtgtaggccaatactacgattgtgccggtgatatcgttcgcattaagtcgctggacttcgacagccagcgcgcagacgtggagagcatctttaccttaagaggcaccaaatcgggtaactgggatgtgaagacgctggataaacaggtggatgtaactcccgatgaagatgctgttatgcagaaaatcagtggtggcgtctccatcgccgggattaacgacatcatttcctgtgacgatttctaccgtttccagcagcgcggcatgatcaaaatcactgactcgtacggcgttcagactacagagtcaggctatagcattgattttgttggtacctatacggacccactgaagcatgcggtttacccggatcgccgtgacggcgcgctgaagtcgtcaattgcaaaatgggtgcttggtatgatgtcggaagggaataaccgccagatccgttcggcagaaacattcctggttgaattgtttggctccaattatggcgatgtaattgcgtcatacggagatacgctatcccctgaagcaattcaggagaaaatagcggatgcgatcgccagaatgccggaaaaaacaagccaggggtctactcgtaacggggattctgaacttgaagtcaccaatgccattttcggtaccaatgagttccgggcgtcagattatgagatcaccacagcacagtttggcaccattggcatttacagcaataaagacgagatcaagcaggcaatggacgcagcaaacgcgcgcatcgcagcagaacgggaagccaatctgaatcatgcagtcgccgcactgactcaatcgtgggtaacagcaatcagggaggccgccaccacagggaaaatcacacctgcaattgcggatgtcgtaaacgacggctctaaatttatggatgcctatcaaatggatgcggtgcagttgccatcagcctatggccaactcagctatcgcatgacctacaacctggtatcaatgttttccgaccttgccatccttgggctggtggatcttaacgaggttacgccggaattgctcagcatgcgcaagaatcatgtggagatattgcagagaattaacacggttcttgccgggcgcaccgatgaagagaaacaggccgacgctgatcggataaacctggcccttggcaacatcacggaggaagaaattgccgccagaaacgagaaacaagaagagttatcatcaatacagggtgatgccaccagcatagctcagtctcttggtctgaattatcacgtatccaccgccgacctgaagatgatgtacgcaccaaaattcgccgctggcgaggtatttgggcttcaggaagcctcaggcatgaaaggcgttcttttccgtgcgaaagacgcaatcaaggcgaaattcggcgctcgctggctgccagcgaaggcgaagaacagcgatttcccgggtaactggtggattatcgagacaaaacacaacgtggcggacgttctggccgtcatccaacaatacgcataacaggagcgcccggttcgccgggcgtcgcataatatggccacactatctgatacaataaaaccgaataaaacatatcttgaggcggtactccgtacagcgttgttaggaaagacagaagacgaatacgttgatttcttcctgtcagggctacgcgggcgattactgaaaaatccccgtctgtaccgcagctatggtccatactggccggaaattaaaaaattattactggagcgcggttatggtaatttcggtcgtctcgttgaccgtgacgttcgcaaaatttaccgttatgaccgcccggcgctgacgctcatagccgcgacgctctacagccaggagcgttttgataatggtcagatatactcagcctggcatttactgccagtgcctgaagaggttgacgaccaggactatgagtttgagtcttacgatttggaagttgaagccttagcacaggctggagagaaaacttgaaaaagcgatactacacagtaaagcatgggacgctacgagcattacaagagtttgctgataagcataacgttgaggtgcgcagggaggggggaagtaaagctctgcgcatgtaccgtccggacgggaaatggcgtacggtcgtcgatttcaaaactaacagcgttccccagggcgtccgcgaccgggcattcgaagaatgggagcaaatcatcatagataatgcattgctcctgaatgctgattaagtttgtctagcccggttaataccgggctggtttagacatcttaagtgggtgttaatttttaattatggttaatcatatctaacagtatttttagcttcctgcatgtgttatcaatatctttacataatatgacatcaaggatgtttggtagtcctaataccatatgagaaatgaaaccctcgccaacttgtagattatgggtagtctcatctggattcacgtattcaatggttttagttttatttatcccataatctttataacagatgattacaggaatgttcttctgttcagcaatctgcaactctattcctagccctgttgatggaaaactacattctgcaattattacatcagatttctcaaccatatctctgtcccaaatgtaacaaagtctagatttgttactttcagggcgctttgataattctgggtcactatttatcaaagcatattttacgttgttattttgagatagaccttttgcaaggctgtgaatccaattactgtactcatggaaaatttcccttggaacatgagttaaagcgcatgcgatatatatattcattaagaagcagaccttacgtttgggataagaaattggtgtccagtaatttcagatgaaattgcatctataaactgtgacggagattgttgaataaattcagcaataatccagttttctttttcatttagtaactgtcttagcttaagtgggtcataccgacatagctcacttaatcgatgcatagctgctagggttataaccaatggcgatattgaaacagaagtatgctcagattgattgtttttacgtttgagataccaaagagtctctgcgccattgatatagtaaagatttcttcttatttttttatgaaattcagttaattgcggcatgttggacgattgattttcattataatcaagtaatgattctactgattttattttgtacttttctctttcaaacaattcgaacgctggcggtagaatgtcgaaaactgtgtcgaaccgaaaatccttggataaaatcgcagtgaaaaacaggctattgtctgactcattcaaaacgaactcagcatcgatcagtggaataaatatatcatcagttacatcataagtaaggcaatatgtacgatgaatatatggcaatccagaaaaaaggttttttatattgtacaccccctcatgagaggtgccgtcaatatattttgaaaaagacggaagtataccctcattttttatttttacttttatatcagataagttatcaatttgggctgcattttcacccctagcaacaccatgatgctgtttgaagtttatattgcgagatgaaagtaacgcctttactgcattcatgaatgaataatagtgcaaaagtggggctgattggttgggtaaaccattggccgcctgattaaatacttttgcttgctcccaataaaaaagagcctcatctttttcgtttcgctttaaccagagttcgacaaaatcccaatgactgtatgtaagtacattccttgcggttaggtcagggtttaataatgctttatgaggcttcatgaccttgttcctaattttcagcggcttaatattcatcattgtaataatcccccacccaaagttactagattgtaaaatatatatttttgttccacaacaaaaatctctattggctactgacgtaattaattataaatagttttctttgccggtaagtaagccttgaggaactcgcttgtcggctagacattgggttccgcgaattatgttaatcagagggcttagtaacgatggttcctggcgagcctcaacttctccagccattgccctgatgtagtcggcgcttgcaacgttgttatattccgttgcgaagcagcataacaacgacagaacgtgctctgtcgttatttcgctccagttgatgttgaaaaattcatcgccttttttgtcgtgttcggaatcgaagatgctttggtggaggatgtatttgccggattctttgcgcggtaacttggggagcccgcagaattcggaaaaaatcgtacgctaaggttttccgggcatccgtaagggccgaaacttcccgtcttccagtctgcggctctgccgccagacgtaatcgccggttaggttgatgtgctcccagcccagcggcgacaggaattgcagcagctcgccgtccaccggcttgccggcctcgaccaacccctgggtggcgcgttccaggtacaccgtgttccacagcacgatagccgccgtcaccaggttgaggccgctggcccggtagcgctgctgctcgaagctccgatccctgatttccccaaggcggttgaagaacaccgccctggccagcgagttgcgcgcctcacctttgttcaggccggcatgcacgcggcggcgcagttcaacactttgcagccagtccaggatgaacagcgtgcgctcgatccggcccagctcgcgcagggccacggccagtccgttctggcgcgggtagctgccgagcttgcgcagcatcagcgaggcggtgacggtgccctgcttgatcgagctggccaggcgcaggatgtcgtcccagtgggcacgcacgtgcttgatgttcagggtgccgccgatcagcgggcgcaacgtcgggtaggcttgcacgccctgcggcacgtacagcttggtttcgccgaggtcgcggatgcgcggcgcgaagcggaagcctagcaggtgcatcagggcaaagacgtgatcggtgaagccggccgtgtcggtgtagtgctcctcgatccgcaggtcggactcgtggtacagcaggccgtcgagcacataggtggaatcgcggacgccgacattcaccacgcgggtgctgaacggcgcgtactggtcggagatatgggtatagaacagccgtcccggctcgctaccgtacttcgggttgacgtgcccggtgctctcgccccggccacccgcgcggaagcgctggccatcggaggatgaggtcgtgccgtcgccccagtgggcggcaaaggcgtggcgatactggtggttgaccagctcggccaaggccgccgaataggtttcgtcgcggatgtgccaggcttgcagccaggacagcttggcgtaggtcaggccggggctcgactcggccatcttggtcagcccgaggttgatcgcatcaccgaggattgcggacagcagcaacgtcctgtctttggcctcggccccgtccttcaagtgggtgaagtggcggctgaagcccgtccagtcgtccacgtccatcagcagttcggtgatcttgatgcgcggcagtaactggctggtttggtcgatcagcgcctgcgcccgatccggcaccgccgcatccagcggggtgattttcagccctgactcggtgaggatggcatcgggcagctcgttgtccttggccaggcgggtgacggtggccaactgctcgtccagcagctgcaaacgctcttccaggtactggtcgctgttcgggttgatcgccaggggcagggcctgctcgcgcttgagtgcggcgaacttctcggccggcagcaggtagtcgtcgaagtcgcggaactgccgcgagcccttgacccagatgtcgccggagcgcagggcgttcttcagctcggacagggcgcagatttcgtagaatttccggtcgaggccttccggggtgatcaccagcggcttccagcgcggcttgatgaaggccgtgggtgcatcggccggcaccttgcgcaggttgtcggcgttcatctcacgcagggtctgcacggctgccagcacgccttgcgcggccggcgcggcgcgcagttccagcacctccagcaaggccggcgtgtaacggcgcagggtggcgaagttctcgccgaccaggtgcaggtggtcgaagccttccggccgggccagcagctcggcctcgctgacgctctcggtgaactcgtcccagggaatcaccgcctcgatggcggcataggggtcgctgccgctttccttcgcttccagcagcgcctggccgatcctggagtacaggcgcaccttgtcgttgatcgccttgccctgcttctggaactgctgctgatgcttgtgcttcgcgccgctgaacagcctgaccaggatgcggtcatgcagatcgaccagctcatcgatcacggtcgcggtgctctccagcaccacggcggccagggtcgcgtagcggcgctgcggctcgaacttaccgaggtctttgggcgtcatctgcccaccctcgcgggccagcttgagcaggcggttctggtggatgtgccggcccaggccttcgggcaagtccaccaactgaaatgtcttcagccgctcgatgtgttccagcatgtgccgagagttgggtttcagcggtgcctggcgcagccaggtcaaccaggtgatgctgctgccggccttgagcttcaacagctcgtccagcttggcccgatgcgagtccgtgagtggttcgaccagggcgcggtagacccgccgattggctcgcgcaatggcttccgagcaggcccggtcaatcacgctcagcgccggcaggatgcgtcgtttctgccgtaggctctccagggcctgaccggccagcagcaagcctttgtcggtctgctgggccagctcggttagctcgcgcaccagggcgcggaagtcggacaggccgaacggggccagttgcaggtaggtgcgcagttcctgggcatgctcgcgacgggtcacgtcgcgctcgccgtactttgcccagctcgccggctcggcctggacttgcttcgccacccacaggatgaccggctcgggcagctcgctgtcggttcccagcgcgtaaccggggtagcgcagcaggcagagctgcacggcgaagccgaggcggttggcgtcgccgcgtcgctggcggatcagcgacaggtcggagtcgttgaaggtgtagtagcggatcaggtcatcctggctttccggcagcgcaagcagggtgtcccgctccgtggccgagaggatcaagcgacgcggcatgtgtcagtcgtccgtgcggaggtactggtagagggtttcccggctgatgttgaactcgcgggcaagctgcgccttgggctcgccggccgtcgctcgctgccgcagggtagcagcctgctcatcggacagggctttcttgcggccccggtacgcgccacgctgcttggccaaggcgatgccctcacgctgccgctcgcggatcagggcgcgctcgaactcagcgaaggcccccatcaccgacagcatcaggttggccatcggcgagtcctcgccagtgaacaccaggccctccttcaggaactcgatgcgcacgccgcgctgagtcagcttctgtaccaagcgacgcaggtcatcgaggttgcgggccagccgatccatgctgtgcaccaccactgtatcgccttcgcggacgaagctcagcagcgcttcgagctgggggcgctgggtgtccttgcccgatgccttgtcggtgaacaccttgctcacctgggtttgttccagctggcgttccgggttctggtcaaagctgctgacccggacgtagccgatgcggtgcccctgcacgatgtctccttggttgaaggcggcttaagtgcactttctgttccgttgtgcctcaaagcccatttctgtcaggctgaaatctataaccttcgcgggcatgtgtcaaaaaatgggaaagcagactctattctgacgaagcggcgcggccctgcctgacatcaagttagggtatagcctagattgacatgcgcgatgcaacccttaacttgcttgcacctatcgtttccatgctagctttatcgtaacgctcaagaaattgggcttaatgccgaaaacaataaaataaaacagccaacccttgaggttcttatgcgccagaatttaccagtgacgggtcgaaacttagaactcccaaaagatgccaatattctttcgactacctcccctcaaagccatatcacgtacgttaatcctgacttcattaaaatcagtggtttcactgaggaagaactattaggccagcctcacaacatcgtaagacacccagatatgccgcctgctgcatttgagcatatgtggagtacattaaaatctggccgctcatggatggggctagtaaaaaatcgctgtaaaaatggcgaccactattgggtaagtgcttatgtaacgccaatagctaagaatggttcgattgttgaataccagtctgtaaggaccaagcctgaacctgagcaggttttggctgcggaaaaattatatgctcaattgagaagcgggaaggccgcgaggccgaaattggctgctagcttttccgtgaaaatactcttgctcatatggggtagtattatatcaagcgcaatggctgccggcatgcttactgatacatcaataagcagcttattgttagccactttaatgtcaggaagcttaagctctgttagtgttttggctattctctctcctcttggaagactggttgaaagagccaagaatatttccaataacccattaagtcaatccctctacactgggcgcaccgatgagtttggccaaatagagtttgctttacgaatgatgcaagctgaaacaggcgccatagtaggtcgcataggtgatgcatcaaatcggcttagcgaacacacccgaggcctactaaaggatattgagtcaagcaatgtacttacagttgagcagcaggcagagacagatcaaatagcaacggcagtaaaccaaatggtggcaagcattcaagaggttgcgagcaatgcacagcatgctgcagatgcggccggaagggcagacactgagacggcatctggccagcgtctggtagcccacacaagccagtcaatcactgcccttgaaggtgaaattaggcaagccactcaggttattcatgagcttgaaggtcaaagtaacgagatatcaaaagttcttgacgttatacgagggatcgccgagcaaacgaatttgttggcactcaacgcagcaattgaggccgcgcgtgctggtgagcaggggcgtggttttgctgttgtcgccgatgaggttcgcagtcttgctgctcgcacacgtaagcgtcaacggagcaccgtattgacgcttatttattggtgagtactacgttccatggcaggagttcatcaactcggttggaaggccattccggcagta

SEQ ID NO: 183 - DNA, 41385 bp, Escherichia coli
  source 1..41385: mol_type = genomic DNA
taattatttaaggcgttaagggcatctatttctttcagtgtccatttttcaccaagtaagtatgaaatcgattcattacacatataaggcattaatagcagatgttctttccttattgctaataatgcattgttcaatggtttttctaataaatccgtaatcgtagaatcaactgagtttttacaactcacctgcgagtaatttaagtcatgaggattatttaactcctgcggaatatttaatagacgagctatttccttgttagcttcgcgttggtaacacgccagaaccttgttagtaatcaggtgtaatgaactatcatcttttctttcaaaagacttaccttcataacgaaaactcaaaaaatcagattgtggaaatataatggctgtatgtccttgacgagtccccatagtagtggtagtagaaagtgaaatttctataatcaccttagatgaatccgcacgctcaccttcaggattattcataacaaaattcattatttcactgccatcattatttttgatataagatgaggactcaatatgagccatcatatttctacccgcttcgttggagcgtttgctaaaatccacataacccagggtaaatatttttgccaaaaactccaaaaatgctctgggagaaagaatattccttctgctatcctgccccccggcaatacgggcaaaatcattcattccaacacgccaggtatttaaaacttcacttttttgtttaaaattgtcggctaatgtaatgtgttgagaataattcaaatctgatattttgctcatgacggactccttgagttaataagaacgtctaagcattacaaattctactcacaaaaaaatatcaaaaaacgctcttttcataagctcgccgtaaacctggagttatttacggcgaaaagtcatcacgccatcagcatcttcactactgctttgcgaacctgggctggtgcgcccactgcgcacagcggtttatgcacttcccccggataaaacacaacaaaatcaccttcatttaggataactgttttctcatcaacgccttccggcaaaaatgcgatgtctttatctgctaaccagtcggtctccggcgtacctgcaggttgcgtgctgaaggtcatgccttcctgaccttttaacacaatctgaatgtcgagatagcgggcatggtactccacacggcgagcttcgtacggctcggtcatatcttccgagataagataaaacagacgattgccttcgatatcgtgcttgccctttggcgtttctgccgtaacgtgtgctttgatatgctcaatcgcctggcgtaactcctggggtagccacggctgaagattatgaatatttccgatgatcatcttttccactccttaattaaaacaatgtttcatttctatcgttatacgaaaagatgatcaattccgccagccttaacgcgtgaattattgtcttatcacaacttatcggcaggcgcgttcccgcctttcgggtcaaggccagcatcactccttgagaatagtttttatcgcttcccccgccagtgcagctgttgcacagagttgttcgatggagtgcccctcccgtgccttcgcagaaagccctgacatcacggtactcataaaatcagtcacacattgtgcgctttgtggatgccgcctggcgatatagtcataaatggtcgtttctgcggcgtgataatattgaacggcaatatcacgcgcttgtggatcatgactatgaataccttcaagaaccatacagccagcgcagccgccgttttggctatatctgcgcgccgcttcttttaatacctcaaccaggcactcgcctaccggacgatcatcacgaagaatatcggcaagcggaatagcttccgtaccgacatattcattgagtacacggctaaataacccagccttactgccaaaagccgcgtagaggctcggggggttaataccaagataatcagtaacttcagcaacactgacagcatcgaaacctttttggtgaaaaagcacttttgccgcagagactgcctgctcaggagcgaaacgtctgggacgacctggaacgcgagattgttttttagtgaccattacaaaacttgttgacagaaagttaaaacagttttgtaatgcatgttacataataaatcaaggagtccttatgggcgcttttacaggtaagacagttctcatccnnnnnnnnnngtggtagccgtggaatcggtgccgctatcgtacgtcgtttcgtcaccgatggggccaatgtacgattcacctatgcggggtcgaaagatgccgctgaacgcctggcacaagagactggagcaacagcagtattcacagatagtgctgacagagacgctgttattgatgtcgttcgtaagagcggcgcattggatatcctggtggtaaatgcaggtattggcgtctttggcgatgccctggaattaaatgccgacgatattgatcgccttttcaaaatcaatattcatgctccttaccatgcctctgttgaagccgcccggcagatgcccgaaggcgggcgcatcttaatcatcggctccgtgaatggcgatcgtatgcctgttgcaggcatggctgcttatgccgccagtaaatctgccctacaaggcatgtcgcgcgggctggcccgtgattttggaccgcgtgggatcaccatcaacgtcgtccagccagggccaattgataccgacgctaatcccgccaacgggccaatgcgcgatatgttgcatggttttatggctatcaaaagacatgggcaaccggaagaggtcgctggtatggtcgcatggttagcagggccagaagccagttttgttaccggcgcgatgcataccattgatggcgcgtttggcgcataaccgactacgctcaattaagcccagccattatccatgatgtctgggttttgtttactcacgtcgtccgctaaaagcggctcccggtaaagagaaatcttctgttcatgtcgtaaatcttgaggataaccaaatggtagaaagaaccgctgttttccctgctggccgacattcactgtatgctgagcatcgttattctgcggctattcgttcctgcgatttgctgtttgtttccgggcaagtaggaagtcgagaggacggaacaccagaacccgattttcagcaacaagtcagactggcatttgataatttgcatgcgaccctggctgctgcgggatgcacttttgacgatatcattgatgttacgagcttccataccgatccagaaaaccaatttgaagacatcatgacggtgaaaaatgaaatatttagcgccccaccttatccaaactggacggcggtgggtgttacatggctggcaggctttgattttgaaattaaagtgatagcgcgcatccctgagcagtaagcaatagtgttagccgttcgctttcacactccgccctataagtcggatgaatggaataaaatgcatatctgattgcgtgaaagtgaaaaaggaaaaagcagggaatgtctgcaattattgataccgaaggacagttcccctgcagaatcacatcaaataaaaatgcatatactttgacttttaattcaaataaaccgtttgcgctgacaaaatattgcatcaaatgcttgcgccgcttctgacgatgagtataatgccggacaatttgccgggaggatgtatggttcagtgtgttcgacattttgtcttaccgcgtctgaaaaaagacgctggcctgccgtttttcttcccgttgatcacccattcccagcccctcaatcgaggggcttttttttgcccaggcgtcaggagataaaagatggctaatccgctatatcagaaacatatcatttccataaacgaccttagtcgcgatgaccttaatctggtgctggcgacagcggcgaaactgaaagcaaacccgcaaccagagctgttgaagcacaaagtcattgccagctgtttcttcgaagcctctacccgtacccgcctctctttcgaaacttccatgcaccgcctgggtgccagcgtggtgggcttctccgacagcgccaatacatcactgggtaaaaagggcgaaacgctggccgataccatttcggttatcagcacttacgtcgatgcgatagtgatgcgtcatccgcaggaaggtgcggcgcgcctggccaccgagttttccggcaatgtaccggtactgaatgccggtgatggctccaaccaacatccgacgcaaaccttgctggacttattcactattcaggaaacccaggggcgtctggacaatctccacgtcgcaatggttggtgacctgaaatatggccgcaccgttcactccctgactcaggcgttagcgaagttcgacggcaaccgtttttacttcatcgcgccggacgcgctggcaatgccgcaatacattctggatatgctcgatgaaaaagtgatcgcatggagtctgcacagctctattgaagaagtgatggcggaagtagacatcctgtacatgacccgcgtgcaaaaagagcgtctggacccgtccgagtacgccaacgtgaaagcgcagtttgttcttcgcgccagcgatctccacaacgccaaagccaatatgaaagtgctgcatccgctgccgcgtgttgatgagattgccaccgatgtggataaaacgccacacgcctggtacttccagcaggcaggcaacgggattttcgctcgccaggcgttactggcactggttctgaatcgcgatctggtactgtaaggggaaatagagatgacacacgataataaattgcaggttgaagctattaaacgcggcacggtaattgaccatatccccgcccagatcggttttaagctgttgagtctgttcaagctgaccgaaacggatcagcgcatcaccatcggtctgaacttgccttctggcgagatgggccgcaaagatctgatcaaaatcgaaaatacctttttgagtgaagatcaggtagatcaactggcattgtatgcgccgcaagccacggttaaccgtatcgacaactatgaagtggtgggtaaatcgcgccccagtctgccagagcgcatcgacaatgtgctggtctgcccgaacagcaactgtatcagccatgccgaaccggtttcttccagctttgccgtgcgaaaacgcgccaatgacatcgcgctcaaatgcaaatactgtgaaaaagagttttcccataatgtggtgctggccaattaattgcggttggtaataaaagtctggctccctataatgagccagactttttaccgctgtaataaaggagaaatcatgagcaaaactatcgcgacggaaaatgcaccggcagctatcggtccttacgtacagggcgttgatctgggcaatatgatcatcacctccggtcagatcccggtaaatccgaaaacgggtgaagtaccggcagacgtcgctgcacaggcacgtcagtcgctggataacgtaaaagcgatcgtcgaagccgctggcctgaaagtgggcgacatcgttaaaaccaccgtgtttgtgaaagatctgaacgacttcgctaccgttaatgctacctacgaagccttcttcaccgaacacaacgccaccttcccggcacgttcttgcgttgaagtcgcccgtctgccgaaagacgtgaagattgagatcgaagcgatcgctgttcgtcgctaatcttgatggaaatccgggctatcatgcccggattaagtctgatgacaaacgcaaaatcgcctgatgcgctacgcttatcaggcctacgtgattcctgcaatttattgaatttgttggccggataaggcatttacgccgcatccggcatgaacaaagcttactttgtctgcaatctgaatcggggctatcgtgcccagtttattctttattgccagccgtaacgacggctatagaaccctttcaccaactgggttaatgtcatataccctgccagaatcgcaaccagccacgggaaatagcttaacggcagcgcctgtaattgcagataactggccagcggtgaaaacggcaatgcgatcccgacaatcatcacgatcacggtcatgatcattaacggccacgatgcacagctctgaataaacggcacacggcgggtgcggatcatatgcacaatcagcgtttgcgacagtaagcccaccacaaaccatcccgactggaacagcgtttgcgtttccggcgtgttggcatggaatacccaccacatcaggcaaaacgtcagaatatcgaagatcgagctgatcggtccgaagaagatcataaagcgccccagatccgccgggttccaacgctgcggcttttgaatttgctcgtcgtcgacgttatcaaacgggatcgccacctgtgacacatcatacagcaggttctgaataagcaagtgtaacggcaacatcggcaggaagggcaagaaagcactcgccaccagcacgctgaacacattaccgaagttggagctcgccgtcattttgatgtatttcagcatgttggcgaaagtgcgacgtccttcaataaccccctcttccagcaccatcaggcttttttccannnnnnnnnnttttccagcaggatgatatcagccgcttcacgggcaatatctaccgcgccgtccacagaaatgccgatatccgcagcgcgtaaggcgggcgcatcattaataccatcgcccataaagccaaccacatgcccttcgcgcttcagtaaggtcacaatgcgttctttatgcatcggcgtcagacgagcaaacagcgtggtgcgctgtgcgagatttgccagttcgtcgtcagatagcgtttcaatatcactaccaatgaccacctctcccgcgtccagccccacttcatggcacactttcgctgcaactaactcactgtcgccagtaaggatttttacggtaattccactcgcttttaatgccttcagtgccggagcagttgtctcttttggcggatcaaggaaagcaatatatccttcgaggatcaggtcggattcatccgcccgctggtaatctccttcacgcgctggcaggtatttcgtcgccaccgcaaccacgcgcagcccctgacgattcagcgtatcagtaacccgcttaatcttacgcagcatgatgtcatcgagcggcacaatctcgccattgtgacgcacctgcgaacacacattgaggatttcctgcaatgcacctttgcaaaccagctgatggtgctcggtattttctgccactaccaccgacatccggcgacgctcgaaatcaaacggaatctcatcgattttttgccaacgactggccagcgagcgcgctgactcttcatccgtaccttcgagcaccgctgtatcgagcaggtttttaagtccggtctgataatgactgttcaaccacgcgctatgcagcacgcgttcgctggttttaccggagatatcggtatgattctccagcacaattttgtcctgtgtcagggtgccagttttatcagtgcacagaatatccattgcgccaaagttctgaatagcatccagatgtttgacgatcactttctgtttcgacagctttactgcgccgcgcgccagcgtcgaggtaacaatcatcggcaacatttccggcgttaagcctaccgcgaccgaaagcgcaaacagtgccgcttcccaccagtcgcctttggtgtaaccattgattaacagcaccaccggagccatcaccagcataaagcgaatcagcagcatactgacgcggctgatcccttgctgaaaggcattcggctcgctttcctgctcactaacacgccccgccagttgaccaaaccaagtattggcacctgtagcaatcaccattgcttgtgccgtgccgctcaccacggtggtgcccataaaacacagggtgtcgcactccagcggattgctgtgctccggctggcgagtggtagctgctttttctacgggcagagactcaccggttaacgacgcctgagcgacgaacagatcccgcgcctgcaagatacgtaaatctgccgggatcatatcccccgccgccagttttataatatcgccgggcaccagctggtcgatcgggatctccagccagccattttcgcctttgtcgttaattacgcgcagcaccgtcgcagtattgctgaccatcgctttcagggcatctgccgctttagtggaacgtgcttcctgaataaagttcagcaacgtagaaatagcgaccattagcgcgataacgcccgcggcaaataaatcttccgtggcgtaagaaatagcgccgagaatggtgagtaaaatattaaatgggttgcgatagcagacccataaatgtacccaccacggcgacggttgttgtgcgggtaatttattttcaccatgttgttcgcgggcagattccacttccgcctgatttaacccttccggatgggtgtcgaacgttttccataattcttcttcgggcatcaccgccattttcaggcaatgcgcacttaaggacggcgggaccgccgtattcactgtctgctgcgcgccaggcaatggatcgcgatgaaccagacgggaaggtaaatggcgaatgagccgggtaaaaatttctttaaacataaggagtccctccgcactgtctgaaacagtacagaaatgtcttcaggcgtggcgaagccttacctgaaggtaataaagctgagcagggacgttaaaacgtcacggccttacgcatccggtaacgccgtgaaaagacgggcttaccggaaaagttttaatctccgtcgagggagaggcgtgggatcaggttccatataacctccggtaagtgaaaaaagcgccgcaaataataaggagaatccaataatattcgtagcatctatggcgatataatacctgctggcaactaaaccaacgataaaccagactttacccattgctgaatgcacgggtaaagttaggctcaaataattaaacaacacgttacaggacaacaggatgcaaaatcggctgaccatcaaagacatcgcacgcttaagcggcgtggggaaatctacagtttcccgggtgctgaataacgaaagcggcgtgagccagcgcacccgcgagcgtgttgaagcagtgatgaatcagcatggattttccccttcccgctctgcgcgcgctatgcgtgggcaaagcgataaagtggtcgccatcattgttacccgtctggattcgttgtcagaaaatctcgccgttcaaaccatgctgccagcgttctatgaacaaggttacgacccaatcatgatggaaagtcagttttccccacaattagttgccgaacatttgggggtgctgaaacggcgtaatatcgacggcgtagtgctgttcggttttactggcataacagaagaaatgttagcccactggcagtcatcgctggttctgctggcgcgtgacgcaaaaggctttgcttcggtctgttatgacgacgaaggggcaatcaagatcctgatgcaacggctgtatgaccaggggcatcgtaatatcagttatctcggcgtgccgcatagtgacgtgacaaccggtaagcgacgtcacgaagcctacctggcgttctgcaaagcgcataaactgcatcccgttgccgctctgccagggcttgctatgaagcaaggctatgagaacgtggcaaaagtgattacgcctgaaactactgcgttactgtgcgcaaccgacacgctggcacttggcgcaagtaaatacctgcaagagcaacgcatcgacaccttgcaactggcgagcgtcggtaatacaccgttaatgaaattcctccatccggagatcgtcaccgtagatcccggttacgccgaagctggacgccaggcggcctgccaattgatcgcacaggtaaccgggcgcagcgaaccgcaacaaatcatcatccccgccaccctgtcctgatcgtttcctgaacgataaattgtgatcttcgctgcatttcgggaacgttcccgtttttaaatttttccgcgcaatatattctgcagccaaccaaaaatgtcatctgccatggggctttatgatgagcaaaataaaccaaacggatatcgatcggttgattgaactggtcggcgggcgcggcaatattgcgacggtgagccactgtattactcgcctgcgctttgtcctcaaccaaccggccaatgccagaccgaaagaaattgagcaactccccatggtgaaaggctgtttcaccaatgccgggcaatttcaggtggtgattggcaccaatgtgggtgattactatcaagcactaatagcgtcaaccggacaggcgcaggttgataaagagcaggtaaaaaaagccgcccggcagaatatgaaatggcatgagcagttgatctctcatttcgcggagatcttcttcccgttgctgcccgcgttgatcagcggcggtttgatcctcggttttcgcaatgtgatcggcgatttgcccatgagcaacggtcagacgctggcgcaaatgtacccttccctgcaaacgatctacgattttctgtggttgatcggtgaagcgatcttcttctacctgccggtcggtatttgctggtcagcggtgaaaaaaatgggcggcacgccgatccttggtatcgtgcttggcgtgacactggtttctccacagctgatgaacgcttatctgctcgggcagcagctgccggaagtgtgggactttggcatgttcagcatcgccaaagtaggctatcaggcgcaggtgatcccggcactgttagccggactggcgctgggcgttattgaaactcgccttaaacgcatcgtgccggattacctctatctggtggtggtacccgtctgttcgctgatcctcgcggtgttcctcgcccatgcgctgattggtccgtttggtcgcatgattggcgatggcgttgcctttgcggtacgtcacctgatgaccggcagctttgctccaattggcgcggcattgtttggcttcctgtacgccccgctggtgatcaccggggtacaccagaccacgcttgctattgatttgcagatgattcaaagcatgggtggtacgccagtgtggccgctgattgcgctgtcgaatatcgctcagggctccgccgtgataggcattatcatttccagccgcaagcacaatgaacgcgagatctccgtgcctgcggcgatctccgcctggcttggggtcactgagcctgcaatgtacggcatcaacctgaaatatcgcttcccgatgctgtgcgcgatgattggttctggtctggcaggattgctatgcggcctgaacggcgttatggcgaatggcatcggcgtaggcggcctaccgggaattctctcgattcaaccgagctactggcaggtgtttgcgctggcaatggctatcgccatcatcatcccgattgtactcacctcgtttatctatcagcggaaataccgcctgggcacgctggatattgtttaattttcttcggggcgcaattgcgccccctcgcatttgcaggaataacgtaatgactaatcttccccactggtggcaaaacggcgttatctaccagatttatccaaagagttttcaggacaccacgggtagcggcaccggcgatttacgtggcgttatacaacgcctggactatctgcataaactgggcgttgatgccatctggctaacccccttttatgtctctccccaggtcgataacggttacgacgtagcgaactatacggcgattgatcccacctacggcacgctggacgattttgacgaactggtgacgcaggcaaaatcgcgcgggattcgtatcattctcgatatggtgtttaaccatacctctacccaacatgcctggtttcgcgaggcgctgaacaaagaaagcccttaccgccagttttatatctggcgcgatggcgaaccagaaacaccaccgaacaactggcgttcaaaatttggcggtagtgcgtggcgctggcatgcggaaagcgaacagtactatttgcatctctttgcaccagaacaggcggatctcaactgggagaatccagcggtacgcgcagagctgaaaaaagtctgtgagttctgggccgatcgtggggttgacgggttgcgcctggatgtggtgaatctgatctccaaagacccgcgtttccctgaagacctggatggcgacgggcgtcgcttctacaccgacggaccacgagcacacgagtttttgcacgagatgaaccgcgatgtgtttacgccacgcgggttaatgaccgtaggtgaaatgtcctccaccagccttgagcattgccagcgatacgcggcactgacaggcagtgaattatcgatgacctttaattttcatcacctgaaggtcgattatcccggtggtgaaaaatggacgctggctaaacctgactttgtggcgttgaaaacattgttccgccactggcaacaaggaatgcacaacgtagcatggaatgccttgttctggtgtaaccacgatcagccgcgcattgtttctcgctttggtgatgaaggtgaataccgcgtgcctgcggcaaaaatgctggcgatggtgctgcatggcatgcagggaacgccgtatatctaccagggcgaagagattggcatgaccaacccgcatttcacgcgcattactgactatcgcgacgtggagagcctcaatatgtttgccgagctacgcaacgatgggcgtgatgccgacgagttattggcaatcctcgccagcaaatcccgtgacaacagtcgcacacccatgcaatggagcaacggcgataatgccgggtttacggctggcgaaccgtggattggcctgggcgataactatcaacaaatcaacgtagaagccgcgctggccgatgattcctcggtgttttacacctaccaaaagttaatcgcactgcgtaagcaggaagccatcctgacatggggcaattaccaggatctgctgccaaacagccctgtattgtggtgctatcgccgtgaatggaaggggcaaaccttgctggtcattgccaaccttagccgtgagatccaaccctggcagccagggcaaatgcgcggcaactggcagcttgtgatgcataactacgaagaagcctcaccacaaccctgtgccatgactttacggccttttgaggctgtctggtggttacagaagtaaatctcccctaagccccggtaatgccggtcattccggggttttgtctgtcagcatgttgtttttgttgatttttcaaccagcaaattcattaaaaaatttacataacgctgtagcgcccgtcatccgtacgctctgctttttactttgagctacatcaaaaaaagttaaaacatccttgatgcaaagcactatatatagactttaaaatgcgtcccaacccaatatgttgtattaatcgactataattgctactacagctccccacgaaaaaggtgcggcgttgtggataagcggatggcgattgcggaaagcaccggaaaacgaaacgaaaaaaccggaaaacgcctttcccaatttctgtggataacctgttcttaaaaatatggagcgatcatgacaccgcatgtgatgaaacgagacggctgcaaagtgccgtttaaatcagagcgcatcaaagaagcgattctgcgtgcagctaaagcagcggaagtcgatgatgccgattattgcgccactgttgccgcggttgtcagcgagcagatgcagggccgcaaccaggtggatatcaacgagatccagaccgcagttgaaaaccagctgatgtcgggtccatacaaacaactggctcgcgcttacatcgagtaccgtcacgatcgcgacattgaacgtgaaaaacgcggtcgcctgaaccaggagatccgtggtctggtcgagcagaccaacgcctcgttactcaacgaaaacgccaacaaagacagcaaggtgattccaacccagcgcgacctgctggccgggatcgtggctaaacactatgcacgtcagcacctgctgccgcgtgacgtggtgcaggcacatgagcgtggcgatattcactatcacgatctcgattactcaccgtttttcccgatgttcaactgcatgttgatcgacctgaaaggcatgctgacccagggctttaaaatggggaacgccgagattgaaccgccgaagtcgatctcaacggcaaccgcggtaactgcgcagattattgctcaggttgccagccatatttatggcggcaccaccattaaccgtatcgatgaagtgctggcaccgtttgtcaccgccagctacaacaaacatcgcaagaccgcagaagagtggagcatcccggacgcagaaggctacgctaactctcgtaccattaaagagtgctacgatgccttccagtcgctggagtacgaagtaaacaccctgcataccgccaacggtcaaacgccgtttgtaacttttggttttggtctgggcaccagctgggaatcgcgcctgattcaggaatctatcctgcgtaaccgtatcgcaggtctcggtaaaaaccgtaaaactgcggtgttcccgaaactggtgtttgcgattcgcgatggtctgaaccataaaaaaggcgatccgaactacgacatcaaacagctggcgctggagtgcgcaagcaagcgcatgtatccggatatcctgaactacgatcaggtagtgaaagtcaccggttcgtttaaaaccccgatgggctgccgcagcttcctcggcgtgtgggaaaatgaaaacggcgagcagatccacgatggtcgtaacaacctcggcgtgatcagcctgaacctgccgcgtattgctctggaagcaaaaggcgatgaagccaccttctggaagctgctggatgaacgtctggtgctggcacgtaaggcgctgatgacccgtatcgctcgtctcgaaggcgtgaaagcgcgtgtggccccgatcctctatatggaaggcgcttgtggcgtgcgtctgaatgctgacgatgatgtttctgaaatcttcaaaaacggtcgtgcatctatttcgctgggttacatcggcatccacgaaaccattaacgcgctgttcggcggcgaacatgtttacgacaacgagcagctccgcgcgaaaggtatcgcgattgttgaacgtctgcgtcaggcagtggatcagtggaaagaagaaacgggttatggtttcagtctctacagcacgccgagtgaaaacctgtgcgaccgcttctgccgtctcgatactgctgagtttggcgtggtgccgggcgtaacggacaaaggttactacaccaacagtttccacctcgatgtggagaagaaggtgaacccgtacgacaagatcgactttgaagcgccttacccgccgctggcgaacggtggtttcatttgctacggcgagtatccaaacattcagcacaacctgaaggcgctggaagatgtctgggattacagctatcagcatgtaccgtattacggcaccaatacaccgattgatgagtgctacgagtgtggctttaccggtgagttcgagtgcaccagcaaaggcttcacttgcccgaaatgtggtaaccatgacgcctcccgtgtgtcggtaactcgccgcgtgtgcggatatttaggtagcccggatgcacgtccatttaacgccggtaagcaggaagaagttaagcgccgcgttaaacatttgggaaatgggcagataggttaatcttcactctacgttaagcaaatgccggatgcggcgtaaacgccttatccggcctacatttggcaactgctccaggcctgataagacgcgacagcgtcgcatcaggcattgattaccggatgcagcctacacgcggactgataagccaggcgaaataatgaattatcatcagtactatcctgtcgacatcgtcaacggccccggcactcgctgcaccctgtttgtctccgggtgtgttcatgaatgccccggttgctataacaaaagcacatggcgggtaaattctggtcagccatttaccaaagcaatggaagaccagatcattaacgatctgaatgacactcgtatcaaacgccaggggatttccctctccggcggcgatccgctgcatccgcaaaacgtgccggatattctgaaactggtaaaacgcatccgcgccgagtgtccggataaagacatctgggtgtggacaggctataaactcgacgatctcaacgctgcgcaaatgcaggttgttgatttgattaacgtactggtcgacggcaaatttgtgcaggatttaaaagacccttccctgatctggcgcggcagcagcaatcaggtggtgcatcatttgcgatgataagttccctgttacctgagtgcaggcaacagggaaatgaggaattaacgatacttctggtgataggcgttgcgggtcgttttcagttgctctgcggcagcctgcgcttcttttactttaccttcatttgccagcttcagcgcgtcgtcaatctgaccaaccagaatatcgaaaccgtgacggaagtctttcatttccgggctgtccggtgatttatcttcgagcttcggcggcgttgctttttgcgcatccagcgctgcggcgcgcatcttcgttaacgcgtctttgacttgcgccgcgttatcggctttttcgaccacttttaaagtgtcgttgagggtttccatattgtcttcaagatcagcggcaaacgacgccgaactgaataccaacgaggagactgcaagaatagctaacaggcttttacgcattgctcacttccttttttatttacacttcatccttcacactgcctcatcgacggctacgctcattcgcccgggtcacgtactgcgagtacgctccccggccctcattcactttccgtctcgatgcagtgcgaatgattttgtgtaattttttagtttatagcgcggcaggtcgcgccagttttttactgcccggcgattttcatctccggcaacagcacagaaccacactgtatattactgcgtgtttcaatatcgttaccgacggtgacaatattgcgccacatatcttttaaattacctgcgatggtgatttcgctaaccggatactgaatttcgccattctctacccagaagcccgctgcaccacgggaataatcaccggtaatggcactcacgccctggcccatcagctccgtcaccaccagcccggtacccatctctttgagcatttgttcgaagcttagcccttgtccggcaatccgccagttgtgaataccgcccgcatgtccggtgcttttcagccccagtttccgcgccgagtagctggtcagcagccactgagtcaggatgccatctttaataatatcgcgacgctcggtgcgcacaccttcgctgtcaaatggcgtcgatgccagccctttcagcagatgcggatgctcttcaatggtcagccagtccggcagaatttgtttacccagcgaatccagcaggaaggtggatttacggtaaaccgatccacccgctatcgcccccaccagatggccaaaaagcccggttgccacttcattggcaaaaatgaccggcgctttcatggtggagagtttacgcggtgacaggcgcgataaagtacggcgagcacagtcggccccaacccactctggcgtttgcagatcgctcatcgcacgaccaatggtgtaggcgtaatcacgctccatatcgccattttcttcggcaattacacagctggagaccgaatgacgcgttgagcagtaaccctgcaacatgccgtggctgttgccaaaaactttgacaccgtagtggctgttaaagctaccgccttcggtattggtgatgcgtttgtccgcctgcaatgctgcctgttctgcgcgggccgccagttcaatggcttcatccggggaaacttccgcagggtggaacaaatcgagatccggtgcgtcaaaggccagcagctctttgtctgccacgccggcacagggatctggcgaggtataacgggcaatatccagcgccgcctgtacggtgcgggcaatggcctgcgggcttaaatcggtggatgatgcgctacctttgcggttctggtgataaacagtgatccccagcgcgccatcgctattgaattcaacattctccacttcaccataacgcgtgcttacgctaatgccggtggtcttgctgacggcaacttccgcaccgtccgatttacctgaggccaactccagcgcagtggaaactgcttcttccagaatcttgcgctgcgcttcaacttgagagattactttcattgcaagtgccataatgtagagagtttctctgaagtctaacagagaaccgtttttcagtgcgcatcttaactggtaacattagcctctttttttaaggagcctgagatgactaagcagcccgaagactggctcgacgacgttcccggtgatgacatcgaagacgaagacgatgaaattatctgggtcagtaaaagtgaaattaaacgtgatgccgaggagctaaaacgccttggcgcggaaattgttgatctggggaaaaacgcgctggataagatcccgttagatgcggatctgcgcgcggctattgagctcgcccagcgtattaagatggaaggtcgccgccgccagttgcagctcatcggtaagatgctgcgccagcgcgacgtagagcctattcgtcaggcgctggataagctgaaaaaccgtcacaaccagcaggtggtgctgttccataaactggaaaacctgcgcgatcgtctgatcgatcaaggtgatgacgccatcgctgaagtattgaatctgtggcccgatgccgatcgtcagcagctgcgtactctgatccgcaacgcgaagaaagagaaagaagggaataagccgccgaaatccgcacgccagattttccagtatctgcgcgaactggcggagaatgaagggtaattttcgttgttgatgtgagtatggtttgccggatgcggtgcacctgtaggcctgataagacgcatcaagcgtcgcatcaagcactatgctcaaatgccggatgcggcgtgaacgccttatccggcctacgcacactatatcaggctaaggccgaattactgcgcggcttccgccttcttcgccagaccatccagcagtttctgatggatcccaccaaaaccgccgttgctcatcaccagaatatggtcgccaggctgagcggttttcaccaccatatctgccagcgtatccacatcgccactccagtgtgcaggctgaacgcaggcttctgccacttctgccacctgccacggaatatgcgccggttgcagcaggaagacttcatcggcacgacctaatgaaggtgccagatcgtctttgcagatccccattttcatggtattcgagcgcggttccagcacggcaataatgcgcgccgtaccgccaactttgccacgcagcgccgcaagcgttgccagaatcgccgttgggtgatgggcaaaatcgtcatataccgtgacgccattcgcttcaccacgcaactccagacggcgacgagcgttaataaacgaacccagcgcgttagcggcatctgccggcgctacaccaacatggcgagccgccgcaatcgccatcaggccattgtgcatattatgttcgcctaccagcgaccatttcacttcgcccactttttcgccatccagcaaaacttcccattcggaagcatcggtggtcagctttttcgcctgccagtgcccctgctcacccaccagctcctgctcgctccagcagcccatcgccatggtctgtttcaggttgatgtcgttttctggccagataatacggccctgccccggaacgatacgcaccagatggtggaactgtttctggatcgctttcaggtcgtcaaagatatcggcgtgatcgaactcaaggttgttgaggatcagcgtacgtgggcagtaatggacaaatttagagcgtttgtcgaagaaggcgcagtcatactcatccgcttcgataacaaagaagtcgctttcgcccagacgcgccgaaacctcaaagttccccggcacaccgccgatcacaaatcccggtttgtaaccgcactgttccagaatccaggttgccattcccgcggtggtggttttgccatgtgtaccggcaacggccagcacccagcggtcgcgcagcacaaaatcgtgcagccactgtggacctgacatataagggatggtttttttccagtaccgcttccacacacggatttccacgggtcatggcgttgccaataatcaccagatccggctgcggatcnnnnnnnnnncggatcgagctggctagcatcgtaaccctgaatcagttcaatgccttgcttctcaagtaaggtgctcatcggcggatacacattggcgtccgaacccgttacttcatggcctaactggcgcgccagcatcgccagaccgcccataaacgtgccacaaattcctaaaatatgaatgcgcatacgtcactatccttttttaatctgccgctcattttacgcatatgtcgggcaagtgagaaacgcatttcaggataatccgcaatttgctggcgcgattcacctgagcgcaacattgagattatttgttaagattgttgcggtcgctttactccataaacattgcagggaaagttttatgaaaacgttaggtgaatttattgtcgaaaagcagcacgagttttctcatgctaccggtgagctcactgctttgctgtcggcaataaaactgggcgccaagattatccatcgcgatatcaacaaagcaggactggttgatatcctgggtgccagcggtgctgagaacgtgcagggcgaggttcagcagaaactcgacttgttcgctaatgaaaaactgaaagccgcactgaaagcacgcgatatcgttgcgggcattgcctctgaagaagaagatgagattgtcgtctttgaaggctgtgaacacgcaaaatacgtggtgctgatggacccactggatggctcgtccaacatcgatgttaacgtctctgtcggtaccattttctccatctaccgccgcgttacgcctgttggcacgccggtaacggaagaagatttcctccagcctggtaacaaacaggttgcggcaggttacgtggtatacggctcctctaccatgctggtttacaccaccggatgcggtgttcacgcctttacttacgatccttcgctgggcgttttctgtctgtgccaggaacggatgcgcttcccggagaaaggcaaaacctactccatcaacgaaggaaactacattaagtttccgaacggggtgaagaagtacattaaattctgccaggaagaagataagtccaccaaccgcccttatacctcacgttatatcggttcactggtcgcggatttccaccgtaacctgctgaaaggcggtatttatctctacccaagcaccgccagccacccggacggcaaactgcgtttgctgtatgagtgcaacccgatggcattcctggcggaacaagcgggcggtaaagcgagcgatggcaaagagcgtattctggatatcatcccggaaactctgcaccagcgccgttcgttctttgtcggcaacgaccatatggttgaagatgtcgaacgctttatccgtgagttcccggacgcgtaatctcctgcgcctctccacacggagaggcgtttttatcgctgcgcaatgttgactcttgtcacaggcgaactctgacgattctcccacagcaccgttaatccacgctgtaatgctataaaaataaataacaaaataccgatggcgattttcgtccaccatgagctcagcgtgccatcaaagttgatataagtctgtattagcccctgaatcgccacgccaaaaagcgtccctaataccgttccaacgccaccgctcagaagcgtaccgccaattaccactgaggcgatagcatccagttccacacctacgcccgccagcgcatatccggcctgggtataaatcgagaagacaatccccgccagcgttgccagtccggtggagagcatataaatgcgaatagtggtgctgcgagtggaaatccccatcaggttcgccgacgttgcgttgccgccaatggcgtatacctgattaccaaaacgggtacgatgcgcgaggaaaataccgataaccaccaccgccaacatcagcagtcccatcgcacttaagcgaccgccgccagggattttccacgcaaggcttgagagcgtgtcataaatgggatggtttatcggaatcgactcttccgaaacgagatagctgacaccgcgcaaaaagaacatccccgccagggtaatgataaatgccgggatcttcagggcgtcgatcaaaagccccataaatgcgccgaaggcacagcccatcaccagcactagcggaaacgccagtagcggcgagaggccgaaatcgccaatcacttttgccagaaacacgccagtaaaggcgatcaccgaaccgacggagagatcgatcccaccggagaggatcacaaaggtcatgccaacggcaatgatcccaagaaaggcgttatcggtcaggatattgcagatcactcttgtggaagcaaaaccgggaaactgggtcaggcagtaaagataacccaacacaaagacgccgatggtgatcatcagtggcaaattacgttttatcacggctacgtactcctttaatcagactgataaagcgttgcgactggacaatcagcacgcaaagaaccaccaccgcttttacaacctggttcatctctggcggaaagcccgaaagcaaaattccggtgttcatcccctgaataatcagcgcccccaccaccgaaagcagtaggttaaaacgtccgcccatcagcgatccgccgccaataaccaccgcgagaatggcgtccagctccagccataacccggcgttattggcatcggcaccgcgaatatccgccgccacgataatgcccgcaatcgccgcacacagcccgctcaacacgtaggtaagcatgacgatgatccgcgtgtttaccccggcattttttgccgcccgaatgttgataccaacggcttcgataaacatccccagcgccgttttgcgggtcaacagccagaacaggataagcgtcagcaccgcgataatgaccggcgttggcaggaacaacagcgatccactgccaaaccatgagagatccggcgagttaaacgtgacgatctgtccggaggtgatcagttgcgccacgccgcgcccggcgaccatcaggatcagggtggcaacaaacggctgaattttgaggatcgctaccagtatgccgttccacaatcccgccaggatgccagtgcccagggcgcttaacaaaacaatcggcaggctgaatcccgcgaccgtcatcgcagccgttgtggctccggcgatagccatcaccgcccccacggagagatcaatcccacctgttgcgatcaccagcgtcattccgatagccaacagcgcaacgggggccgcacggttaagaatgtctatggggctaccgaataaacgcccatcctggagcaccacctgccagaaatgcggggccaccaggctatcgaccagcagcaccagcaacagtgccgccagctgcggcattcccgttggccagcgaaagcgccttttcggcggcgtagtgtccgggagagattgaggcatcacactgttctccttacgccgcaatggcgttcatgatcgccggaacggaaagctctgccagcgggatctccgccacctgtttgcgatcgcgcatgatgatcacccggtcggcatagcccaccagttcttccagttcggaggagatcaccagcagcgccagaccatcggcgcatagcgtttcaatcaggcggatgatctcggcgtgggcaccaacatcaatgccgcgagttggctcatcaaggatcagaaattgcggtcgggtcagtagccaacgtgaaagcaacactttttgctgattgccgccagagagaaattcaatcggttgttcagttgaaggtgtgcgaatgccaagctggcggataaagcgttcggcaatctcttgctgttctttgcgggaaatgggacgtagccagccgcgctgggcctggagagcgaggatgatattttcccgcaccgaggcggcagcgatgatgccatcggttttcctgtcttccgggcagaagccaatgcccagtaccgaagcctgatgtggcgatcgcaggttttgcggtttgcctttgatcaacgccgtgccgctgtcagcaggtttgataccgaagatcacttcggcggtttcggtacgtcctgatcccagcaatccagccagaccgacgatctcgccggggcgtacttcgagatcaaacggtgcgatcgttccttttttgccgtaatttttgaacgcggcaacgggtttgtcgctcaacaatgttcgcccggcacgctgtagcgcgtgggtatccagctcgcgccccagcatcatttttaccagttcgatctgcggtagctcgcacgtttcccgacagcctacgaaactgccgttgcgtaagacggtgatccgatcgctgacctgatagacctgatcgagaaagtgagtgacaaaaatcaggctgacgccgcgatcgcgcaactgacgcatcaggtcaaacagtaactccacttcctgggtgtcgagactggcggtgggttcatcgaggatcagcactttggcagagagatcgatagcccggcaaatagcgacgatttgctgcatcgcgactgaaaagcggttgagcggttcgcgcacgtcgagggagaaaccgtaagatgccatcagttcggtggcgcgcttttccatctctttgcggcgtagaaggccgaagcgtttgggttcgcggcctataaatagattatcagcgaccgacatattgggtagcaggtttacttcctgatagacggtgccgataccgagttgttgtgcatgggcggtatttttcggtgagatagcctggccttccagccagatggtgccgcgatcggcgtggtatacaccagttaatgctttgattagcgttgattttcctgccccgttttcaccgagcagcgccatgatttcgccgcggcgcaggctgaaatcaacgttgtctaacgctttgacgccggggaaaaatttacttaatccttcggtgcggaggatctcctggtgttggttagtcgtcatggtttcccccggtgtaaagcgtgctcccagtaggcatgataagacgcggtaagcgtcgcatcaggcttcagcgcaccaccgccggatgcggcgcgagcgccttatccggcctacgaatcggcatcaggcatagcaaccctcaataccccatatttttcttcttctctaactcttcttttgcggtatcaggcagataaagggtggatttggtcagcgtcagcttttcaggcatggtgccgtcttttttgtatttctccagcgcgtcgaaggcgggacctgccatattcggcgtcagttcaacactggcgttcgcttcgccatcaatcatcgctttgtagatatccggtacgccgtcgatagaacctgtcagaatatctttgcctggtttcaggcccgcttctttaattgcctgaattgcaccaatcaccatgtcgtcgttatgggcgtaaaccatgcagatgtttttgccgttgttttccgctttgataaagctctccatgacttctttgcctttactgcgggtgaagtcacctgactgcgagcggataattttgatatttggcgcattcttaatggcttcggcaaagcctttcttacggtcaatggcgacgctggccccaacagtgccctgcagctccaccacgttgcatggtttgccattcacttcttttaccagccagtcaccaatcaacttgccttcgagaatgttgtcggcagtgacggtggtcatatagagagatttgtctttcacatcaatagaacgatcgagcaagaagaccgggatttcggcatctttcgcctcttttaataccggttcccaaccagtcgcaaccaccggagcgataaagatcgcatccaccccttgcgcgacgaaggaacgtaccgctttaatctggttttcctgcttttgctgaccatcggcaattttcagcgtaattccgcgtttttcggcctcacttttcgccacattggtttctgcggcgcgccagccagattccgatccgacctgcgaaaatcctacggttaatggagcggccaacgccatagacgacatggctgccgagactgcagagactacaagtaagcgtttccacatagggttgtcctcgtcggggtaattattattggtgaaaagatgttcgcgaaaaaactatagacaattcgttatgtaacggattgcgttacatcacacttcaaagaagtaaataaaacgttaatcacaagtttgtaatcgctttcatctcactatgaaaaatgcggctacggttatggattttcctgctctgtataccgtcttaaaattggcgaaaaaggaaaatgaagacgaaaacaagcgaagacattcggcgcgagttggctataatactcggcacttgtttgccacatatttttaaaggaaacagacatgagcttactcaacgtccctgcgggtaaagatctgccggaagacatctacgttgttattgagatcccggctaacgcagatccgatcaaatacgaaatcgacaaagagagcggcgcactgttcgttgaccgcttcatgtccaccgcgatgttctatccgtgcaactacggttacatcaaccacaccctgtctctggacggtgacccggttgacgtactggtcccgactccgtacccgctgcagccgggttctgtgatccgttgccgtccggttggcgttctgaaaatgaccgacgaagccggtgaagatgcgaaactgattgctgttccgcacacaaagctgagcaaagaatacgatcacattaaagacgttaacgatctgccagagctgctgaaagcgcagatcgctcacttcttcgagcactacaaagacctcgaaaaaggcaagtgggtgaaagttgaaggttgggaaaacgcagaagccgctaaagctgaaatcgttgcttccttcgagcgcgcaaagaataaataagttcttctagcgcaataaccctgaacgccgggcttcggttagtaagggtttttttatgcccgcgataaataaactctctattccaccatcattattctcagcggttgcaaggcttgaacggtaagaacaagcaaacccgaccaccattttgctgttcatagccacttgctggaagttagccgacctcactcatactcaccgttcaaagcgtgcccccgttttacccctgcacatttgtgaacgccagcagagttttttatgcgattgcagatatgggaagcggctcggagagaaaagcaaaagatggaaaagttacaaaaaaaaatcgcgagatacatcgcataaaacaacgccacccgaaggtggcgtgcttttattattacttatccctgtctaaccagtcgccgctttcaattagctttaatccatcgacgggtcgttgataaacgtacatccatgcactcccgtacggcgtctgaatcaactggcgcgcgtattcaccgcccctggtgcgcaaggcatcaagttcggccagcgtggcgttgtcaatacgataaacttcaccgtgtactgttccgttccccggaactgcgcctggatagtggcccaggctatacaactggtagttatcgatactgaaatcgcccagtaactgggcattggtcatccagtgactgttgccttgtttgtggcgtaaactgccgtagacaaatattcgcattgctaaaactcgaactgatagagcaaatccagtgcctggtctacaccagacacggcttccagatatagcttaggcatcaggcgataacgtaacgtgagtgttgctatagagtcaaatatacccacgccgtatttcacttgcagacctggcaatacatagccgctgaccaccacctgggaggagtcgcctactccctgggtgtcgagcgctaaattgcttacgccaaacgtctcgccgattttacccacaatctggccactttgcgcaacccccagaccaatcagcatcgaggtcattgccgcactgtcgctctgatcgctctccagcccttgtccacgtagcaaataagacaatgcagcttgttgcgacatcgccgggtcagagaagatctccgctttcggttcgtccgccagaccagtgacgcgaactccggcgattacgtcgtcttctgtagcatccgggttacgaatagcttcaatattaagatacggttgatccggcggaccagagaacagtaactcacctttacgcacaatcagatcctgaccataggcatggaagcgcccttcagggatgttgatctgcccgttcaggcccagcccttgtttgtcctgaacgacgttaagatcgcccgtcagccgcgctttcaggccaaaggcgtcaatgcgcacattgttgccaacgtggacaatcaggttactgttaatcggaatcgacgccgttttcggctcttccggttgcaggttatcgttaagcatcaccacatcgctggagacgcctactgcgctttccggcagatcgtgcaccacgatgcgcgcccacgggacatccacgcgaccatcgagggtaaacaggtttggtgtagcctcgaagacaacatctggcgatacatccattcgtaccatcggcggcacggtgatccgcactttactgcctttcgccgttacccgcgcccgccagttttcaatttggctccagtcggcatcaccgttcaggtagatttcaccctgctgggtccgtactgtaccggcaagcgtcgagcgcataccattaaagttgaccgcaagctggctcggttgcatatcaaacggcataaagttgccgtcgatatccacacccgtaacctgaagctgaccaaacaactgcgggctttgcacatcaccacccagacgcaagttggcactcaccatccccgctgctttttccccacgggtaaagatggggtttatcatcgcaaggttgaagttacggatattgacgttgccaccaagattacggcggccttgcggatcggtcacctgcacctgtccatcaaactggccgttattggtcaggcggatggtccagcccaattcggcacggttgttacgcaattccgccgtcagattcagtgtctgaaacgccacgggcagcgccgcatcgttgacggtttgcgttacctgcacgttacgccccgaaagggtgatacagccctgcggcagcccctctttggtggtgtcccaggcaacgtccgctttacccgtgaagataccgctggcctgagtggtttctggcataaatggtttcagcatggccaggtcgaagcggttgagattcaccaccgcacgcccttcggcacccgcatcgatagtttgcggcacgcacagttccgcattcgggttaagccagcagtgtggcccgatgctgattttttgctccttattgcggtaatccagcgcaatatcgcgggtcagcgaccacgggccgaccggcgtctggaagcgggtattgctaagagttcccttccagcgttcttctttgcgatcaaaacttcctaccagattaagctgcccggagacaggctcgccctgaatccgcaactgtaactcgtgctgtttttcgctgcctttggcattcagggtgacgaggttgatatttacatccggctgcgaaatttgctcaacgcgtacgtcgagtttcccggcgatctgatcggtggatttaatgtcgccttccacgcgaacctgcgccacggaaagttcctgccagcgcaggccgcgcgcggtgatatctgccagtagttgtggcgcttccaccgtgccgcgtactttcaccagccctttcgctgtaccgccaagccccggcagcgcgttatccagccccggcgcgttgatggtggcatcaagattgagatcttttacccccagctcgcctttcacttcggcactgtttggccccagttccagatgaagccctgggatcatccactgcatataactgttgcctttcagcgtgccgtcaacgttcactttgttctgtttgacgttaccggtcagcttcagttctggcacctccatctgccaggtgccgccgtacaggctaccgcgggttttaatcaagccattgagtttcgacggccactctgggatctctttggcggtgttaatgccgttaagcgttagctcaccgcgccaactaatggcctgctgccagtcgagcaacgccttgagttcagttttcccttccagcgccgcgacggtgagtttgtcgagattgacctgctgttcattacctttggcatcaagggtaatggtggctggcgggatctccagtcccttcactgccgtacgcatagagagcgtgtaatcggtcattttgccggtaagtttcagtttcagatcatccgcctgatactgcttctcaccagtgaacggccagtaaatctgtttgctgttcacttccacgttgagcggcaatccggcttccgccagtcgcgtctgggcgcgtaaatccatatccaccggaccggaaagattaacgccaatctccagctgttcgcgcagcgcgccgcccactttcagcttcaccttttcacctttcaacggctccacgttcagtgtactattgagagtgatgtccaccggccagttgtctgacagctgcgccgtgccgctggcgttgacgatcccttgactggaatcgatatccagggcgtccagtttagtattgccgtcaatgctgctcactttcagcagcatggtgcgcacggtgatgtccgtgtcgcccgtcacgcgtaactgctcgcctttaaactcttcaatgttcaggttaagcggcaaatgcacgtcggtcatttccggcaataccgggcgagaaaagagatctttcagcgtttcgccgagcggcttttcctccggctgcggattttcaattttcggttcgaccacttcttcctgcgccacttccgccactttcggcagagcaatcagcaggcctttcagcgacgtcggtttcagggtcagggttttctcctgccagttcaggccggaggtgaagtccatcaccgataccgtggtgtcatcaatcttgatgttgacgttgtccagtgccacccgtgttagggtgatgggatacggcgtggagagatccagcggaccgctatcttcctcttcttcaacctgttcagaagggggcatttttttgctgtcgatattgacctggatgtctttcagcgccagatcattaatacaaacactgctgttccacaggcactcaagcccgaccgccagatgcagattgcctgcttttaccgccacgcctggctgctcataacgaacgtcagacaaggtgagatcgcgccagccgccggtgaccttgccaacatccagtcctggcacccagcgatccgccgctttaaataccagatgcaggccgctggtggtgcccaccagaaacgccaccgatcccagcaacagtaagataacgataaccacgccgaggctgatttttttccataaactcataattctggccccagaccgatgtaaaactgtaacccgtgttcgtctttatccgcgaccggtacggcaaaatcgagtttgattggcccgaccggcgattcccagcgtacgccgaccccggtaccggttttaaagtcgctgcggcgaatatcgcttaccgcttcgccactatcgacaaacaccgcgccccaccattttccggtcacgttgtactggtactccagcgatccggttatcaacttcgaggcccctttcaggtcaccgttggcgtatttcggagcgatagatttgtatttgtagccacgaatactgcggtcgcccccggcgaaaaaacgcagatccggcggtactttgtcgaaatcaccggtttcaatccagcccagcgtgccgcgtgtcacaaaacgatggcgatcgtacagtgtgcggatccagacgttttgtgcctggaaaacggagaaatcgacatctgagccccaggcagtgttggagtagtcgatagagtagcgttgcgagtcgccccaggttggcatcaggccaccacgagaacgcgtgcggctaatcatcaccccaggataaaacagcatcgtggtgttggtaatttcaccctgggtaaagtggtcgagactccagcgcaggttaatggcacgctgccagccgctggagagatcccagtagcgagaagccaccagcgtagtggagtcagattcggtatcgttcaggtcagtgcgcttaaaaccgccctgcaccaaataatattgttccagtggattcttcagcagcggcattttatagctgaagtcgaggatctgttccggcgcggaaatactggtactggtggtcagactgtgaccgtatgagttcatccacggttttttccacgtcgctttcacgcgcggtcccacgtccgtagagtaaccgaccccggtttcgatggtgttttctgttcgcggcgaaaccacgcccgtcaatggtaatactttcgtttcgcgcgctttatcaaattgtggagccaccaccaccgagttaaaccagccggtagcagaaagtcggcggttcagttccgccagatctttcgattcgtactcatcgccctctttaaacggcaccagattttgcaggtattcatcgcggatttgtgatccttcaaaggtcacatgcccaaagcggtaacgttcgccactgttataatcaatatcccagaaggctttatgcaggccgagcgcaatgcccagctgcgctttggtaaattcgctatcgaaataacctttacgcaacgcaatgctggttaaggactttttgaaattttcataatcgccctggttcagcaccgtgccaatagccgggcgagtatcgagcaatttcaaatagtctttatcggtccgcgcgccgccgcgcaataccacatcggtgccgccaattaacaccggcacgcctggcgtgactttggcgatcaatacctgccgccctttctttggcggtggacggagatcaaattcaatggtcggctggtaataacccagcgctttcagaccttcgcggatggcatcatcgacgcgtgcgcgaaagcgacggtctggcgtcacttcatcactttcaatcgtagaaagctgcgcacgaacgttcttttccagctgtcccgataacccctcgacctgtagacggacgttcgcggcgacggcagatccgcttaagcagagtaagcttacacagcataactgtcggatatagcgcacattttctcctgaatatccttttttcctgcccctggaacgccgttaaacggcttaacaaaaatccagtaatatggattaaaaagcagactaaaccccaaatatttcttatgttttactttagacctattcacggtggttattgtgtgcaaatacgcctcttgttacaaccttaaccccaatgaccgattttcgggagagcgacaccatgagtttatttgataaaaagcatctggtttcccccgccgatgccctgcctggacgtaacaccccgatgcccgtagccacgctgcatgcggtcaacggtcactcaatgaccaatgtacctgacggaatggagattgccatttttgcgatgggttgtttctggggtgtggagcgtctgttctggcagttacccggcgtttacagcaccgccgcaggctataccggaggctatacgccaaatccgacttatcgggaagtgtgctccggtgatacgggtcatgccgaagcggtacgcattgtttacgatccttccgtcatcagctatgagcagttgctacaggtattttgggagaatcacgatcccgcccagggaatgcgtcagggcaatgaccacggcacgcagtatcgttcagcgatttatccgctgaccccagaacaggatgccgcagctcgcgccagtctggaacgttttcaggcggcgatgcttgccgccgatgatgatcgtcacatcaccacggaaatcgctaacgccacaccgttttattatgccgaagatgaccaccagcaatatctgcataaaaacccgtatggttactgtggaattggcggaattggcgtctgtctgccaccggaagcatagcgttacgggtacaaatgtagattgttgataaagtgcgctttatttatgccagatgcggcgtaaacgccttaccaggcctacaaaatcgtccaaattcaatatattgcaaggactgcgtaggcctgattggcatagcgcatcaggcagtattgcatttatcagcagtctgaattttaaccctctggcgactttacagtaccttacgctatactagccactgaaaatgccggttcactttcttcgaatcggctttcaatgtgtatttcacacaaattaatcaacttccccttccgaggatctggcctgaaaggtcggataagatatgttaaacagtattttagtcatactctgcttgatcgctgtaagtgcgttcttctcgatgtccgagatctcacttgccgcctcacgcaaaatcaaacttaaactgctggctgatgaaggcaatataaatgcccaacgcgttctgaatatgcaggaaaatcccggcatgttctttaccgtggtccaaatcggtctgaacgcagtggcgattctcggcggtatcgtcggtgatgcggcattttctccagcttttcacagcctgttctcccgctatatgtcggcagagctctctgagcaactgagctttattctctctttctcgttagtgactggcatgtttatcctgtttgcggatttaaccccgaaacgcatcggtatgattgcgccagaagctgtcgctttgcgtatcatcaacccgatgcgcttctgcctgtacgtttgcaccccgctggtgtggttcttcaacggactggcgaacataatcttccgtattttcaaactgccaatggtacgtaaagatgacatcacttctgatgacatctacgcggtagtggaagccggtgcgctggcgggcgtgttacgtaaacaggaacacgagctgattgaaaacgtctttgagctggaatcccgtaccgttccgtcgtcaatgacaccgcgtgaaaacgtgatttggtttgatctccacgaagatgagcaaagcctgaagaataaggtggcggaacatccgcactctaagttcctcgtctgtaatgaagatattgaccacatcatcggctatgtcgattctaaagaccnnnnnnnnnngctgaaccgcgtgctggctaaccaaagcctggcactgaacagcggcgtacaaattcgcaacacgctgattgtgccggatacgttaaccctttcagaggcgttggaaagttttaaaaccgcaggtgaagacttcgcggtgatcatgaacgagtacgcgctggtggtggggatcatcaccctcaatgacgtgatgaccacgctgatgggcgatctagtcggtcaggggctggaagagcagattgtcgcccgtgatgagaactcatggctgattgacggcggcaccccaattgacgacgtcatgcgcgtgctggatattgacgagttcccgcagtcgggcaactacgaaaccatcggcggctttatgatgtttatgctgcgtaagatcccgaaacgcaccgattcggtgaaattcgccggctacaaatttgaagtggtggatatcgataactaccgcatcgaccagctgctggtgacccggatcgacagcaaggccaccgccctttcgccaaaactgcctgacgctaaagataaagaagaaagcgtcgcgtaacccccagaaacatcaacggctcctgaatcaggagccgtcttattactgcatagcactttggttaagccatctctgtttgcagacgcataacctgacggttaacttcggacatcactgacaaatgcagcttatccttcacttttgggataagaatcttacccttatcaaattcaaaagcgccaacgtccttgatgtataaccgtccacggaacaggatctttacgtacttcgccacctgaagtgggttgtaccgttggaaaattttcattgttatctcctgctgagtattacgcctgtgcggtgccacaatcggcccaactattatgaggcgcaaattttaatgcttagtgactatagactatccgggcaatgtttccaccgcgtataactttttttacctaaaggttacaattattcagaattatctttttaccgaagcgcggtcttcagtataagcattcatttttcatatgatttgtgcgcttgaccgcaaactggcatcacacttgcgggaaattcgataaatagcacatatgattaaaactcagacccaagtggtcggatcacctgcatatcataagaaggaaacaccatgaccctacgcaagattctggcactcacctgcctgctgttgccgatgatggcttccgcacatcagttcgaaaccggtcagcgagtgccgccgattggcattaccgatcgaggcgagttggtgcttgataaagatcagtttagctacaaaacctggaacagcgcacagttagtgggaaaagtgcgagtactgcaacatattgctggtcgcacctctgcaaaagagaaaaacgcgacgctgattgaagcgattaaatcagcgaagttaccgcacgatcgctaccagaccaccaccattgttaacaccgacgacgcgattccgggttcagggatgtttgtgcgcagcagtctggagagtaataaaaagctttatccctggtcgcagtttattgtcgatagcaatggcgtcgcgcgcggtgcctggcagctggatgaagaaagttccgctgtagtggtgctggataaggatggtcgcgtgcaatgggccaaagacggggcgctcacacaggaagaggtgcagcaagtgatggacctgctgcataaattaattaataaatagacactctgaatcccggattcaggaacgactcgcgcggagtgtaatccagcggtttaccctgccagtcatgaacgtgcgctccggcagctgcagccacagcatgaccagcggcggtatcccaaatattcgttggtccgaagcgcgggtacagctgcgcctgcccttccgccaccaggcagaatttcagcgaagagccgatggacgtggtctgatgttcgccaagctgttgcagatactctttcagctccgcatctgcatgggaacggctgataaccaccagcggcgggcgcgcatcgcggacctgaatctgcttgcgcacaccgcactcttctttccagaccttgccttctgccgcgctgtacattatgttcattaccggcgcatacaccacacctaaaatcggtttgccatggtcaatgagcgcaatgttaacggtgaattcgccattacgtttaataaactctttagtaccatccagcgggtctaccagccagtaacgctgccagtgctgacggacttcccaaccgggaggatcttcttcagaaaggaccggaatatccggtgtcagcgtacgtaaaccgtccatgataacggtgtgagcggcaatatccgctgccgttaccggagaattgtccgctttgctgacgacgtccatcggtttcgtcccgtcgtagacctgcataatggcatcgcctgcattccgtgcaagctggcatacttgatctaacatttctccacctcgtctctgtgagcggtgttaacttattgttttacttataccctatcgttaatgaatgcgccaactgtgatagtgtcatcattttcaaagcgtaaaattgtggcattcttcactgttctataagtaaggcgtttattctcccttttctttcgtattcccgatgataaaaggatgtccctgatgattaagtttagcgcaacgctcctggccacgctgattgccgccagtgtgaatgcagcgacggtcgatctacgtatcatggaaaccactgatctgcatagcaacatgatggatttcgattattacaaagacaccgccacggaaaaattcggactggtacgtacggcaagcctgattaacgatgcccgcaatgaagtgaaaaacagcgtactggtcgataacggcgatttgattcaggggagtccgctggccgattacatatcggcgaaaggattaaaagcaggtgatgttcatccggtttataaggcgctgaatacgctggattatacggtcggtacactcggcaatcatgaatttaactacggtctggattacctgaaaaatgcgttggcgggagcgaaattcccttatgtaaatgccaacgtcattgacgccagaaccaaacagccaatgtttacaccgtatttaattaaagataccgaagtggtcgataaagacggaaaaaaacagacgctgaagattggctatattggcgtcgtgccgccgcaaatcatgggctgggataaagctaatttatccggaaaagtgacggtgaatgatattaccgaaaccgtgcgcaaatacgtgcctgaaatgcgcgagaaaggtgccgatgtcgttgtcgttctggcgcattccgggctatctgccgatccgtataaagtgatggcggaaaactcagtttattacctcagtgaaattcctggcgttaacgccattatgtttggccatgctcacgccgttttcccaggtaaagattttgctgatatcgaaggggctgatatcgcgaaaggcacgctgaatggtgttccggcggtaatgccgggcatgtggggcgatcatcttggggtggtcgacttacaactcagtaataacagcggtaaatggcaggtgacgcaggcgaaagcggaagcacggccgatttacgacatcgccaataaaaaatccctcgcggcggaagacagcaagctggtagaaacactcaaagccgatcacgatgccacacgccagttcgtcagcaagccaatcggtaaatccgccgacaatatgtatagctatctggcgctggtgcaggacgatccgaccgtgcaggtggtgaacaacgcgcaaaaagcgtatgtcgagcattacattcagggcgatccggatctggcaaaactgccggtgctttcagctgctgcaccgtttaaagttggtggtcgcaaaaatgatccggcaagctatgtggaggtggaaaaaggccagttgaccttccgtaatgccgccgatctttatctctaccccaatacgctgattgtggtgaaagccagcggtaaagaggtgaaagagtggctggagtgctccgccggacagtttaaccagattgatcctgacaacacgaaaccacagtcactcatcaactgggatggtttccgcacctataactttgatgtgattgatggtgtgaattatcagattgatgttacccagcctgcccgttatgacggcgagtgccagatggttaatgccaatgcggaaaggattaagaacctgacctttaatggcaagccgattgatccgaacgccatgttcctggttgccaccaataactatcgcgcttacggcggcaaatttgccggtacgggcgacagccatatcgcttttgcttcaccggatgagaaccgctcggtgctggcagcgtggattgctgatgagtcgaaacgtgcgggggaaattcacccggcggcagataacaactggcgtttagcaccgatagctggcgataagaaactggatatccgtttcgaaacctctccatcagataaagccgcggcgtttattaaagagaaagggcaatatccgatgaataaagtcgcgaccgatgatatcgggtttgcgatttatcaggtggatttgagtaagtaatacacttctttttcggcctataaatcatcaaccgcatccggcacttttgtcggatgcgatgctggcgcatcttatccgccctacaagtcatgaaccgtaggccggataagcgcagccggcagttatgccgcacgttcatcccgcaccgccaacacctcgggcaaattcaactcaatccagtccgccagtgcagcaaccttttcgctcacctgctcgcccagcggcgtgaggctatattccacatgcggcggcaccaccggatacgcgatacggttaagaaaaccatcctgttctaacgcctgtaacgactgcgcaagcatcttttcactcaccccaccgattttgcgccgcaggtcgctaaagcgatgagtaccttcgcgtagcgccaccagaatcaacaccccccaacggctggtgacgtgtttcaacacctcgcgcgacgggcactgttccgcaaagagattaccctctttcagttgttgtgacaggctaacctgactcatttcatacttacctttttgtacgtacttactaaaagtaagtttaggtgttagcgtatttaaacacaagacaaaacgatggagacttcccatgatcgctattactggtgccactggccaacttggtcactatgttattaaatccttgatgaaaacggttcctgccagccaaatagtggctatcgttcgtaatccggcaaaagcccaggcactgacagcacaaggcattaccgtgcgtcaggctgactacggcgatgaagccgcactgacatctgcacttcagggagtggaaaaactactgctgatctcttccagcgaagtgggtcaacgtgccccgcagcatcgtaatgttattaatgccgcaaagacggctggcgtgaaatttatcgcttataccagtctgcttcacgcggataaatctccgctcggcctcgccgatgagcacatcgagacggagaaaatgttggctgattctggcatcgtttacaccctgctgcgcaacggctggtacaccgaaaactatctcgccagcgccccggcagcactggagcacggcgtatttatcggtgccgcgggcgatggcaaaattgcctcggcaacgcgggcagattatgcggcagctgcggcacgcgtgattagcgaagccggtcacgaaggcaaggtttacgagctggcgggcgatagtgcctggacgttgacacagttagcggcagagctgaccaaacagagcggcaaacaggttacctatcaaaatctgagcgaaaccgatttcgctgcggcgctgaaaagcgttggcctgcctgacggactggcggatatgctggcggattctgacgttggcgcatcgaaaggcggtctgtttgatgacagcaaaacgctgagcaaattgattggccgcccaacgacaacgttagccgaaagcgtaagccatctttttaatgt

SEQ ID NO: 184 - DNA, 40900 bp, Escherichia coli
  source 1..40900: mol_type = genomic DNA
ataaaacacaaaattacaacatttaaataacaaaacagcatctaatatggcgctattcataattaatgatttattatttggggtatgatcgttttttgttgatcttcttcacagattatagccatttcatggatagaataactctaccttcaactgacacagcaagaggtaaaggtaaatggaaaataataaccgcttaatgcctcatataaggcggacaacccatatcatgaagtttgcccatcgtaatagttttgactttcatttctttaatgcccgctagtcttctgactaaagggcaccccaacgtacaggtctccctgactttaagcattacaggttaatacctgtattcctcggtgctcatatactgctaacccttttaaactctaaataattcgagtcgcagcacttgcaacttgaggtatgacgagtatagccagttaccgggctggtctgggttattgcatctgcaaaaagcaaactactgatttatttatcagcggtggagctttgctttttttccggcgtgatcgatttctcctttgagaaattgaggacctgctattacctgaaataaagagatgaacaaaatgtcagaattaaaaattgccgttagtcgttcttgcccggattgtttttccactcatcgtgcatgcgtgaatatagacgaaagtaattatattgacgttgccgccattattttatcagtcagtgatgttgaacgtggaaaactcgatgaaatagacgctactggctatgacattcctgtttttattgcaacggaaaatgaagaacgtgtacccgcagaatatctgccacgtatttctggtgtcttcgaacattgcgaatcacgtaaagagttttatggacgtcagttagaaaccgctgccagccattatgaaacgcaactgcgcccgcccttcttccgcgcactggtcgattatgttaatcagggcaatagtgcttttgactgccctggtcatcaggggggtgagtttttccgtcgccatccggcaggcaatcagttcgtggaatactttggcgaaannnnnnnnnncttccgctctgacttgtgtaatgctgacgtagcaatgggcgatctgctgattcatgaaggtgcgccatgtattgcacaacagcatgcggctaaagtctttaatgccgataaaacctatttcgttttaaacggtacttcatcttctaataaagtggtcttaaacgcattgctgacgccgggcgatctggtgttgtttgaccgcaataaccataaatctaaccaccacggtgcgttgctacaggctggcgcgacaccggtttatctggaaaccgcacgtaacccgtatggctttatcggtggcattgatgcgcactgttttgaagaaagttacctgcgtgagctgattacagaagttgcaccgcagcgggcaaaagagactcgtcctttccgcctcgccgttattcagctaggcacttacgacggtacgatttataacgcccgtcaggtggtggataaaattggtcatctgtgtgactacatcctctttgactccgcatgggtcggctatgaacagtttattccgatgatggctgactgttcgccgctgttgctggatcttaatgagaacgatccgggtattctggttacgcaatccgtacataaacagcaggctggtttttctcaaacttcacaaatccataaaaaagacagccacatcaaagggcaacagcgttatgtaccgcacaaacgcatgaacaacgcctttatgatgcacgcctccaccagcccgttctatccgctgtttgccgcactggatatcaacgccaaaatgcatgaaggtgtcagcggtcgtaatatgtggatggattgtgtggtaaatggcattaatgcccgcaaactgatcctcgataactgtcagcatattcgtccgttcgtacctgaactggtggatggtaaaccctggcagtcgtatgaaacagcgcaaattgcggttgatctgcgcttcttccagtttgtaccaggggaacactggcattcttttgaaggctatgcagagaatcaatactttgtcgatccttgcaaactgttgctgacaaccccaggtattgatgcacgtaacggcgaatatgaagcgttcggtgtacccgcgacgattcttgctaacttcctgcgcgaaaatggcgtagtgccggaaaaatgcgatcttaactccatcctcttcctgctgactccggcagaagatatggccaagcttcagcaacttgttgccctgctggtacgcttcgaaaaactgcttgagtccgacgcgccattagcagaagtgctgccttccatctacaaacagcatgaagagcgctacgccggttataccctgcgtcagttttgtcaagaaatgcatgatttgtatgcccgtcacaacgtgaaacaactgcaaaaagagatgttccgtaaggaacacttcccacgcgtaagcatgaatccgcaagaagccaactacgcctatttacgcggtgaagtggagctggttcgtctgccggatgcagaaggccgtatcgctgccgaaggtgcgcttccttatcctccgggtgtgctgtgcgttgttccgggtgaaatctggggtggtgctgttctgcgttacttcagcgctctggaagaagggatcaacctgttgccaggttttgcaccggagcttcagggtgtctatatcgaagaacatgatggtcgtaagcaagtttggtgctatgtcatcaagcctcgtgatgcgcaaagcaccctgttgaaaggggaaaaattatgagtcaggctaaatcgaacaaaatgggcgtcgttcagttaaccatactgacgatggtcaacatgatgggctccggtatcatcatgctgccgacaaagcttgccgaagttgggacaatttcaattatctcctggctggtgacagccgtaggctcaatggcactggcatgggcattcgcaaaatgcggtatgttcagccgtaaatcaggtggtatgggcggttatgccgagtatgctttcggtaagtccggcaattttatggcgaactacacctacggtgtctcgctgctgattgctaacgtcgcgattgctatttcggcggttggttacggcaccgaactgctcggcgcgagtttgtcgccagtgcagattggtcttgcgaccatcggagtgctgtggatttgtaccgtggctaactttggtggtgcgcgcattaccgggcaaatcagtagcattactgtgtggggggtcattattccggtggtaggcctgtgcattatcggctggttctggtttagcccgacgctttacgttgattcctggaatccgcatcatgcaccgttcttcagtgcagtaggttcttccatcgctatgacgctgtgggcttttctcggtctggagtctgcgtgtgcgaatactgatgtagtggaaaacccggaacgtaatgtgccaatcgcggtactcggcggtacgttaggtgcggcggtgatttatatcgtctccaccaacgtgattgcagggattgtgcctaatatggagctggcaaattcaacggcaccatttggcctggccttcgcacagatgttcacaccagaagtgggtaaagtcattatggcgctgatggtgatgtcctgctgcggttcgctgcttggctggcagttcaccattgcccaggtgtttaaatcttcatctgatgaaggctacttccctaaaattttctcccgtgtaaccaaagtggatgcaccggtgcagggaatgttgaccattgtgattatccagagcgggttggcgctgatgacgattagcccgtcgctaaacagtcagttcaacgtgctggttaacctggccgtggtgaccaatatcattccgtatattctgtcaatggcggcattagtcattattcagaaggtcgctaatgtgcccccctcaaaagcgaaagttgcaaactttgttgcttttgttggcgcgatgtatagcttttatgcgctgtactcatccggggaagaagccatgctgtacggttccatcgtaaccttccttggttggacactgtatggtctggtatcaccacgctttgaactgaaaaataaacacggttaaaaaagcaaagtaaaaaagggcgatcttgcgaccgccctttttttattaaatgtgtttacgcgtttttcagaacttcgctaacaatctcaaccgcttctttctcaatctgcttgcgatgttcttcaccgaggaagctttcgcagtagatcttatatgcgtcttccgtgcctgacggacgcgcggcgaaccagccgttgtcagtcatcactttcagaccgccgatagaagcaccattgcccggtgccgccgtcaggcgcgcggtgatcgggtcgcctgccagggtgctggcgctcaccatttccggagacagcttagacagcgccgctttttgtgcggaagtcgcagctgcctgcaaacggttgtagctcggcgcaccaaagcgttttgccagttcgttgtagtgttcctgcgggttcttaccggtgaccgcggtgatttccgccgccagcagacacatgatgatgccgtctttgtcggtggaccacggcgtgccgtcgaaacgcaggaaggaagcccctgcgctctcttcgccgccaaaaccgaagctgccgtcgaacagaccatcaacaaaccatttgaaacctaccggtacttctaccagcttacggcccaagtcattgaccacacggtcgatcatcgcagaagaaaccagcgttttaccgacagcaacatctttgccccactgcggacgatgctggaacaggtagttgatcgccaccgccaggtagtggttcggattcatcaaacctgccggagtgacgataccgtgacggtcataatccgggtcgttagcaaacgccagatcgaacttatcacgcagtgccagcaggcccgccatcgcacactcggaggagcagtccatacggatcgcgccgtctttatcaaggtgcataaagcggaaggtttgatcgacctgatcgttaacgatggtcaggttgaggttgtaatactcgccaatacgcttccagtattcgataccggaaccgcccagcggatcaacgcccagcgtcaggcccgctttctgaattgccgccatatcaacgatatcggccagaccttccacaaacggctgcaccagatcctgctcttttacatgaccggatgccatcgcttcgtcgagggagatacgcttcacgcctttcaggccatcggccatcagtgcgttggccctgtcttccaccactttggtgacgttggtatcagccgggccaccatttggcgggttgtacttgataccaccatcttccggcgggttatgggacggtgtaatcacgataccgtctgccagcgggccaccttttttattgtgaaccaggatggcattggaaatggcaggtgtcggagtgaagccattgttttcctgcacaatgacatcaacgccgttcgctgccagcacttccagtacggaaatgaacgcaggctcggacagggcgtgagtatctttacccacatagcaagggccagtgatgccgtttttcgcacgttcttcagcaattgcctgagcgatcgccagaatgtgcggctcgttaaagctgtggcgcgctgcactgccacggtgaccggaagtaccgaatttcaccgcgtgctccgcattccctgcttctggtttcagtacataatattgcgccgtcagttgggcgacgttaatcaaatcactctgttgtgcaggttggcctgcacgattgtggattgccattgctttgtcctttgtctgcaacgttttagatagttccgcaaaccttctcaatcaattccgccgggaattgcatcgactgcatgatgtgttcgatcatgctgcatttacggccggtgttggtgttggtgatcacccaatacggcgtgcctggcacatgtttcggcttggtctgattaccatttttcagcagcgtttgttcatctgccgcaaagtaaacgcgtgtacgaccgtgcaacgattccgttgcttcggcaaacgcctgggcgtcaagagaatatagtgtagacaacagcagcataaagcgattgaccgctcgcttttgctctgcgtattcgtccgaaagcagaagttcacgcattgcgcgaaccttgtctttaatcgttttgaccggcttcgcttcgacgatagcaggtgacgcaacgcgaacctctttcgtcaccggagcagcaggctgtgatgcggcggaaaatttcaacatacgccgtaaaatgtcggatgcgctctcgccgatatgcttagtgtggctggcaatatagctgtagagttcatcatcaacttcaatcgttttcatcttaatccagtgcagtgtcttagctgaatacaagtcgccaggagtatatgaataaatcccggcagcggatagcgtcaagcctggcttgcagaaaaactcggaataaaccttatttgttgcagccctgtggcacaatggtcaacataataccctaacccgacaacgcgaaaaaaagaactttgccatgaaattgaatatccgcgcgcaaactgcacaaaaccagcacaataattctcccatcgttcttgtccatggtctgtttggtagcctcgacaaccttggcgtactggctcgcgatctggtaaacgatcacaatatcatccaggttgatatgcgtaaccacggtctttcaccgagagagccggtaatgaattacccggcgatggcgcaggatcttgttgataccctggatgcactgcagatcgacaaagcaacatttatcggtcactccatgggcggtaaagcggtaatggcacttactgcactggcccccgatcgcatcgataaactggtggcgatcgatatcgcaccggtcgactatcacgtacgccgtcatgatgagattttcgcagctatcaacgcggtcagtgaatcggacgcacaaactcgccagcaagcagcagcaataatgcgccagcatcttaatgaagaaggggtgattcagtttctgttgaaatcttttgttgacggggagtggcgctttaacgtgccggtattgtgggatcagtatccgcatattgtgggttgggagaaaatcccggcatgggatcaccctgccctgtttatccctggcggcaattctccgtatgttagcgagcagtaccgtgatgatttactggcacaatttccacaggcacgggcgcatgtgattgcaggcgcgggtcactgggtccatgctgaaaaaccggatgcggtattacgcgctatccgtcgctatctcaatgattaacgcaactgattaaaaacccagcgtccgcgtcgctttccgcgcgtgggcgttggcgtgactcatcgcgctgatgtattatggcgcgctatccatccgggcagaggcctggctgattgtttcccccgaagtcaccaagatcatggccaaagaacaaacggaccgtacgacattagatctgttcgcgcacgagcgtcgaccgggacgaccgaaaactaatccgctttcgcgcgatgaacagctgcgtattaataaacgcaaccagctaaaacgcgacaaagtacgtggccttaagcgtgtcgaactgaagctgaacgcggaagctgtcgaggcgctgaacgagctggcggagtcgcgcaatatgagccgtagcgaactgatcgaagagatgttaatgcagcaactggcggcgctgcgtagtcagggcatcgtttaaatttccactttcatgtagcacagtgtgcagtcctgctcgtttgctgattccgcaagactgcctgttctgctatgattgcctttatccgtgggcaattttccacccccatttcaataagtttcaagaggttatttcactcatggctatcactggcatctttttcggcagcgacaccggtaataccgaaaatatcgcaaaaatgattcaaaaacagcttggtaaagacgttgccgatgtccatgacattgcaaaaagcagcaaagaagatctggaagcttatgacattctgctgctgggcatcccaacctggtattatggcgaagcgcagtgtgactgggatgacttcttcccgactctcgaagagattgatttcaatggcaaactggttgcgctgtttggttgtggtgaccaggaagattacgccgaatatttctgcgatgcattgggcaccatccgcgacatcattgaaccgcgcggtgcaacgatcgttggtcactggccaactgcgggctatcatttcgaagcatcaaaaggtctggctgatgacgaccactttgtcggtctggctatcgacgaagaccgtcagccggaactgaccgctgaacgtgtagaaaaatgggttaaacagatttctgaagagttgcatctcgacgaaattctcaatgcctgatgtgatgcggcgtagactcatgtctacgccgtattaatagataatgccaatcaaaataattgctacaaatttgtaacttttgctgttgtacctgtacaatgtcccggtgttcaagtggccttgccgttgtaaatgtaagctgtgccacgtttttattaacaatatttgccagggacttgtggttttcatttaggcgtggcaattctataatgatacgcattatctcaagagcaaattctgtcacttcttctaatgaagtgaaccgcttagtaacaggacagattccgcatgactgataacaataccgccctaaagaaagctggcctgaaagtaacgcttcctcgtttaaaaatcctggaagttcttcaggagccggacaaccatcacgtcagtgcggaagatttatacaaacgtctgatcgatatgggtgaagaaattggtctggctacggtatatcgcgtactgaaccagtttgacgacgctggtatcgtcacccgccacaattttgaaggcggtaaatccgtatttgaactgacacagcaacatcaccacgatcacctgatctgcctcgactgcggcaaggttatcgaatttagtgatgattccatcgaagcgcgtcagcgtgaaattgccgcaaaacatggcattcgcctgactaaccacagtctctatctttacggtcactgtgccgaaggcgattgccgcgaagatgaacatgcgcacgaaggcaaataagccagcctgaatgagaaaaagccaacctgcgggttggcttttttatgcaagggaaataagaaaagcgagagttacagctctcacttatttgttattactgcgaatttcctgccaaactttatcacaatcggctttcaccgcctgatcatttccggtttgcgttgcacgcagacactgctgataatccagtacgcggacactttcctggtcggcaaaatgctgatgttgtttctctttcttcagcacgtttaacacgctctggcaggcttcaattttttctggcgaaccttgtgcggtgttgatacaggcgctgtatgcctctttcagacggctgtcttcctgtggcgcggttgattgcgcacaagccaccagccccgatgccatcatggcgatgagaatcagttttttcatagcaaattcctcaaatgtgcggcaggcacaaaacctgccgcgtcgggcatcagaagatggtgaatggtgcgattaccataaatttcacgtcacgctcatcctggaagatgttgccgtaaccaccgccccagcttgggatgtcggagtggttgtcgtattcggtgaaatgcagtttgaacatcgtgcctttggcgcgaccgtcctgaatggtgtagaccgcatccaggctgtatgcagactcttcaatagtccggtttttgtcgtagtacgcatccggattgctctgccaggtcgcaggtttagcatcccatgcgtaaacgtaggaagcgccgatggcgaagcctggaagattccagtttttcaggtcatacatcgcaccgaagaagactgctttttcgccgttggcgttgaagtcagaacggttgtcccaccagatatccaggcgaccgtttgaggaagcgtaggttggagtcatacgttgcaggaagtatccctgctgaccgtcagccttaacccaggtgccttcgaggcgcaaatccactacgtcagccgcccggtaaccaaaggtcaacgcctgcagccaggcggtgccgtcataaaggtcgttgacgctgcgatcgtcaactttatcgcgggtaccgtagaactggtagctggtggttaacgggctaccggcgatatcaaatttgtagctggctttggcaaaatattgatcgatatacccttccgcctgaccaaaagccgcttccagtacgaagttatttttgaagtcgtatttcgccccaagggagtgcagataatcaactttggtggttttatcgttctgataaaactcatccatttccagatgccacggcgctttgtattcgttggtccacatgtaggagaaactcaacgcaccggcatcgccgtaatcaaaattcgctccggcttccgcaccctgataagtacccggcataaagctccagtgaggcgctaacagcgtctgaccggttggctgaatataacctgccctcgcccaaaccggaccgtatttaaatttggccgctgctttatacaggcttataccgcttttgtcgccggaccagtcttcgtcataggctttattactttttgaaaacgcgatttcgttcgggtgagagctgtcgccgttttccgccatttcaatcgccgtaaacgcggcaatatcaaggccgaacatatcagcagcataaccagactgaaaatcgaggttggcattccaggtggagtgagaaaggttggttttgtatttgtcgccgtcggtaacatctttacggtcgcgttcacgctgccagtaatagataccgccggttaaggttgaatcgtcgatgaatccttcggcgcgagcctccggcattgccataaagcccgacattgctgtaacaccggcgatagccagcgccagcgtactacgtttgccactaaacgtacgcatgggttaatcctctttgacgtataaattgctgcaccaaaggtgaacagcgaaaaaaaataaaaatttaaaaagcagcgttgagaaaagtctcgctgactacaggaacagactatttttcgcgacgcgaattatcaatctctttctgtaaccagaatgtaagaacatgagcaaccgcacatattttgatgatttttgttacaaggcttaagtttgcggttgaaaggcttgcagaagaataaaagcgtgaatttccagcaagatgaaagcggttacattttatttaattatgttttgttattttaaatttattttatggataaattgcgaagcaggattaattcgcgtagaaaagtagaaaaaaacgccacagagcgcggcgttttggattgtttgctgtttcttgccggatgcggcgtgaacgccttatccggcctacaaaagcacgcaaactcaatatattgcagagatcatgtaggcctgataagcgtagcgcatcaggcaatttagcgtttgaaactgtttgtctgttccttgccggatgcgacgtaaacgccccatccggcatagcgaaacttaaaattactcgcctactttcgcccaggtatcacgcagcccaacggtgcggttaaataccggtttttccgccgtagaatggcggctatcgaggcagaagtaaccttcacgctcaaactggaatgctttacccgcaaccgcatctttcagcgacggttcagcaaagccctgtttgatcaccagcgattccgggttaatcaccgacaggaaatcatccgcagcacctgggttaggcacgctgaacagacggtcatacaaacggatttcaaccggcagcgcatgtgccgcgctcacccagtgaataacacctttgactttacgaccatctgccggatctttgcttaaggtatcggcgtcataagtacagaagatggtggtgatattaccttcggcatctttctcgacgcgttctgccttaatcacataagcattacgcagacgcacttctttacccagcaccagacgtttgtactgcttgttagcttcttcgcggaaatcggcgcgatcaatccaaatctcaccgctaaacggcacctgacggctgcccatttccggtttgttcggatggttcggcatggtaaccatttcgccttcgccctgatagttttcgataaccagtttcaccggatcgataaccgccattgcgcgcggcgcattttcgttgagatcttcacggatgcaggattccagcgacgccatctcaatggtgttgtcctgcttggtcacgccgatgcgtttgcagaactcacgaatagaagccgcagtgtaaccacgacgacgcagaccggaaatggtcggcatacgcgggtcatcccagccttcaacgtgcttgtcggtcaccagcaggttcaacttacgcttggacatcacggtgtattccagattcaggcgcgagaactcatactggcgcgggtgaacaggaatcgtgatgttgtccagtacccagtcgtacagacgacggttgtcctggaactcaagcgtacacagagagtgcgtaataccttccaaggcatcgctgatgcagtgggtgaagtcgtacatcgggtagatgcaccacttgttgccagtctggtggtgttcagcaaatttaatacggtacagcaccggatcgcgcatcacgataaacggtgaagccatgtcgattttcgcacgcaggcaggctttaccttcttcaaaaccaccggcacgcattttttcgaacagcgccaggttctcttcaacgctgcggtcgcggtacgggctgtttttacccggttgcgtcagggtgccgcggtattcgcggatctgttccggcgtcagttcatcaacgtacgccaggcctttattgatcagttcgatcgcataggcgtggagctgatcaaaataatcggaggagtaacggacgttaccagaccagtgaaaacctaaccactctacgtcgtttttgatcgactcaacatactcgatatcttcttttaccgggttagtgtcgtcgaaacgcaggttgcactggcctttatagtcctgggcgatcccgaagttcaggcagatagatttcgcatggccaatatgcagatagccattcggctccggcgggaaacgggtgtgtactgtggtgtgcttaccactggccagatcttcatcgatgatctgacggataaagttagtcgggcgggcttctgcctcactcatcgtggattcctcaaagcgtaaacaacgtataacggcgtatgatcttataagcgggacaggctgacaactgttagttttttaaaattgataatctaacaaggattatggggatgattgatgaaaaaaaaagcggcagagaagatctccaccgcttttgccagtcctgcgtgattgtcggatgcaacgctaaagcgtcttatccaacctggactgagcttttgtaggcctgataagacgcgtcaagcgtcgcatcaggcatgaagcagattactttttgatttcatacagcggtgtttgacccgccacaacatggccctgagctttaatgatcaagccactgaaatcgtcgatattgctgcaaaccaccggactaatcatcgagcgggcgttagcgttcaggtaatccagatccatttccagaatcggttgccctgctcttacctgcgcgccctcttccaccagacgtttaaagcctttaccttccagcgctacggtgtcgatacccatgtggacgacgatctccgcgcctttttcggtttccagacagaacgcgtggttggtgttgaagattttcacgattgtccctgcggctggtgatacgacgattttatctgtcggtttcaccgccacaccgtcacccaccgctttgctggcgaatgcttcgtcaggaacctgatccagtgccacgacatcaccggtaatcggcgataccagctccgcgatagataccgcgtttggtacagcctgcggttttgctacaggagcggcagttgccggagttgcttcagctgacgcagctgctaccgggccacgggcaacgactttcttcatcgcatcgccaatggattctgctttcgcgccaacaatcacctgaatggtctgtttgttcagttttactacaccagaagcacccagacgtttacacatcgcatcgttgacgcgagctgagtcagccacggtaaggcgcagacgggtaatacaggcgtcaatcgctttcaggttgtcagtaccgccaaccgcagcaatatagttggttgccagttgagtcagaccttcttcagtattgctgttagcctcttcagttacgatctcgtcttctttatcttcacgacccggcgttttcagattgaacatgcggataaccaaactgaacaccacgaagtagatagcgaagaagacaacacccataaccagcagcatccagacgttctggctggcggccggcaggttatacatcaacgcgtagtcgatagcacccgcagagaaagagaagccagcatggatacccagcagcgttgccacaaacaggctgataccggtcagcagtgcgtgcaggaggtacagcagcggtgcaaggaacatgaacaggaattccagcggctcagtcacaccggtcaggaacgcagtaacagcaacagaaagcagcatcccgccaaccatcggaggacgctctttcggtgctgcgaagtacatcgccagcgccgcacccggcagaccgaacatcatgatcgggaagaagccggacatgaacatccccgcggtgccgtcaccagcgtagaaacggttgatgtcgccgtggaaaaccgtacccgccgcgttggtgaattcaccaatctggaaccaggcgatggtgttcagcacctgatgcagaccggttgggatcagcagacggttgatgaaaccaaagataccggaacccagcgcgcccgcagaaacgatccactcgccgcctgcatggatagcgtgctgtaccggcggccagacgtaaccaaaaatggccgccagcaccagacagaagaagccggtggcgatcggcacaaagcgtttgccgccgaagaagctcaggaagtccggcagtttaatatcggaccaacggttataggctgcgccaccaaccagaccggtaatgatacccgccagtacacccatgttaatttctgggttgatggtcaccatcgctttggttaacacaaagtaacctaccgcacccgccagcgccgccgcacctgcgctgtctttcgaccagctggatgccacaccgatggcgaagattaatgcgaggttatcaaaaatcgcaccgcccgcctgggcaataaacgcaacgttaagtaaatctggctgaccgaatcgcagcaacagtgccgccaccggcagcaccgcgatagggagctgtaacgccctaccgagtcgctggaaaaaacctaaaatattcatcttattccccctacgagaaccctatttggctcgtttaaagccgtatttttattttgctgcaaattgtactgccgatgttctgtaatcagattgttagatcatctgctacagagtgtgtgaaaatttaattcgtatcgcaaattaaatgcgtgtcttttgtgagttttgtcaccaaatatcgttatcatcactcccttttactggctaaaccagaaaacttatttnnnnnnnnnntcaggtcggattgacgcctgtctgcgcaaatccaggttacgcttaaagatgcctaatccgccaacggcttacattttacttattgaggtgaataatgagactgatccccctgactaccgctgaacaggtcggcaaatgggctgctcgccatatcgtcaatcgtatcaatgcgttcaaaccgactgccgatcgtccgtttgtactgggcctgccgactggcggcacgccgatgaccacctataaagcgttagtcgaaatgcataaagcaggccaggtcagctttaagcacgttgtcaccttcaacatggacgaatatgtcggtctgccgaaagagcatccggaaagctactacagctttatgcaccgtaatttcttcgatcacgttgatattccagcagaaaacatcaaccttctcaacggcaatgccccggatatcgacgccgagtgccgccagtatgaagaaaaaatccgttcttacggaaaaattcatctgtttatgggcggtgtaggtaacgacggtcatattgcatttaacgaaccggcgtcttctctggcttctcgtactcgtatcaaaaccctgactcatgacactcgcgtcgcgaactctcgtttctttgataacgatgtcaatcaggtgccaaaatatgccctgactgtcggtgttggtacattgctggatgccgaagaagtgatgattctggtgctgggtagccagaaagcactggcactgcaggctgcagttgaaggttgcgtgaaccacatgtggaccatcagctgtctgcaactgcatccaaaagcgatcatggtgtgcgatgaaccttccaccatggagctgaaagttaagactttaagatatttcaatgaattagaagcagaaaatatcaaaggtctgtaattgttatccctgccctggctccttgctcagggcaatattttttaaaatcgggggtcagaatgtatgcattaacccagggccggatctttaccggccacgaatttcttgatgaccacgcggttgttatcgctgatggcctgattaaaagcgtctgtccggtagcggaactgccgccagagatcgaacaacgttcactgaacggggccattctctcccccggttttatcgatgtgcagttaaacggctgcggcggcgtacagtttaacgacaccgctgaagcggtcagcgtggaaacgctggaaatcatgcagaaagccaatgagaaatcaggctgtactaactatctgccgacgcttatcaccaccagcgatgagctgatgaaacagggcgtgcgcgttatgcgcgagtacctggcaaaacatcccaatcaggcgttaggtctgcatctggaaggtccgtggctgaatctggtaaaaaaaggcacccataatccgaattttgtgcgtaagcctgatgccgcgctggtcgatttcctgtgtgaaaacgccgacgtcattaccaaagtgaccctggcaccggaaatggttcctgcggaagtcatcagcaaactggcaaatgccgggattgtggtttctgccggtcactccaacgcgacgttgaaagaagcgaaagccggtttccgcgcggggattacctttgccacccatctgtacaatgcgatgccgtatattaccggtcgtgaaccgggcctggcgggcgcgatcctcgacgaagctgacatttattgcggtattatcgctgatggcctgcatgttgattacgccaacattcgtaacgctaaacgccttaaaggcgacaaactgtgtctggttaccgacgccaccgcgccagcaggtgccaacattgaacagttcatttttgcgggtaaaacaatatactaccgtaacggactttgtgtggatgagaacggtacgttaagcggttcatccttaaccatgattgaaggcgtgcgtaatctggtcgaacattgcggtatcgcactggatgaagtgctgcgtatggcgacgctctatccggcgcgtgcgattggcgttgagaaacgtctcggcacactcgccgcaggtaaagtagccaacctgaccgcattcacacctgattttaaaatcaccaagaccatcgttaacggtaacgaggtcgtaactcaataagagaaagtatgacaccaggcggacaagctcagataggtaatgttgatctcgtaaaacagcttaacagcgcggcggtttatcgcctgattgaccagtatgggccaatctcgcggattcagattgccgagcaaagccagcttgcccccgccagcgtaaccaaaattacgcgtcagcttatcgaacgcgggctgatcaaagaagttgatcagcaggcctccaccgggggccgccgcgctatctccatcgtcaccgaaacccgcaatttccacgcaatcggcgtacggcttggtcgtcatgacgccaccatcactctgtttgatctcagcagcaaagtgctggcagaagaacattacccgctgccggaacgtacccagcagacgctggaacatgccctgctgaatgccattgctcagtttattgatagctaccaacgcaagctgcgcgagctgatcgccatttcggtgatcctgccagggcttgttgacccggacagcggcaaaattcattacatgccgcatattcaggtagaaaactgggggctggtagaagcactggaagaacgttttaaagtgacctgtttcgttggtcacgatatccgtagtctggcgctggcggagcactacttcggtgcaagtcaggattgcgaagactccattctggtgcgtgtccatcgcggaaccggggccgggattatctctaacgggcgcatttttattggccgcaacggcaacgtcggtgaaattggccatattcaggtcgaaccgctgggtgaacgctgccactgcggcaactttggctgcctggaaactatcgccgccaacgctgccattgaacaacgggtgttgaatctgttaaagcagggctaccagagccgtgtgccactggacgactgcaccatcaaaactatctgcaaagccgcgaacaaaggcgatagcctggcctcggaagtgattgagtatgtcggtcgtcatctgggcaaaaccatcgccattgctatcaacttatttaatccgcaaaaaattgttatcgctggtgaaatcaccgaagccgataaagtgctgctccctgctattgaaagctgcattaatacccaggcgctgaaggcgtttcgcactaatctgccggtggtacgttctgagctggatcaccgctcggcaatcggcgcttttgcgctggtaaaacgcgccatgctcaacggtattttgctccagcatttgctggaaaattaatgtgcttttatagtggcgcttattgttgtcaatattctgggtagtccatgaccattaaaaatgtaatttgcgatatcgacggcgtgctgatgcacgataacgtcgccgtaccgggtgcagcggaatttttgcacgggattatggataaaggcctgccgctggtgttgctgaccaactatccttcgcagaccgggcaggatctggcgaaccgctttgccactgccggtgtcgatgtacctgacagcgtgttttatacctctgcgatggcgaccgccgatttcctgcgtcgccaggaaggcaagaaagcgtatgtggtgggcgaaggcgcactgattcatgaactgtacaaagccggtttcactattaccgatgtgaaccctgattttgtgattgttggcgaaacgcgttcctacaactgggacatgatgcataaagcggcctatttcgtcgctaacggtgcacgttttatcgccaccaacccggacacccacgggcgcggtttttatcccgcctgtggcgcgttgtgtgcagggatcgaaaaaatctccgggcgtaaaccgttctatgttggtaagccgagtccgtggatcatccgcgcggcattaaacaaaatgcaggcgcattcggaagaaacggtgattgtcggcgataacctgcgtaccgatattctggccggcttccaggcaggtctggagacgattctggtgctttctggtgtttcgtcgctcgacgatatcgacagtatgcctttccgccccagctggatttacccgtcagtcgctgaaatcgacgttatctgaatagcaaccacgtctcaggacgtggttggctctgatgacaaacgccaaactgcctgatgcgctacgcttatcaggcctacgcagctcctgcaatatattgaattttcatgcttttgtaggccggataaggcgttcacgccgcatccggcatgaacaaatcgcactttgtcagcaatttggcccccgtaaaatataaacattcaataaaacccgctaaaaattatcgattcatcaataaatatatcctcacaccagaccttttttcaccaatcgacaatcaccattacgttttttattttttcaccgccaaatcgcttgcgcacagtgctgctttgcggcatttttttaaacaagcaaacacaacaagcaacaaatacaaggttaacggagaaggttatgtgttcaatttttggcgtattcgatatcaaaacagacgcagttgagctgcgtaagaaagccctcgagctgtcacgcctgatgcgtcatcgtggcccggactggtccggtatttatgccagcgataacgccattctcgcccacgaacgtctgtcaattgttgacgttaacgcgggggcgcaacctctctacaaccaacaaaaaacccacgtactggcggtaaacggtgaaatctacaaccaccaggcattgcgcgccgaatatggcgatcgttaccagttccagaccgggtctgactgtgaagtgatcctcgcgctgtatcaggaaaaagggccggaatttctcgacgacttgcagggcatgtttgcctttgcactgtacgacagcgaaaaagatgcctacctgattggtcgcgaccatctggggatcatcccactgtatatggggtatgacgaacacggtcagctgtatgtggcctcagaaatgaaagcgctggtgccagtttgccgcacgattaaagagttcccggcggggagctatttgtggagccaggacggcgaaatccgttcttactatcatcgcgactggttcgactacgatgcggtgaaagataacgtgaccgacaaaaacgagctgcgtcaggcactggaagattcagttaaaagccatctgatgtctgatgtgccttacggtgtgctgctttctggtggtctggattcctcaattatttccgctatcaccaagaaatacgcagcccgtcgcgtggaagatcaggaacgctctgaagcctggtggccgcagttacactcctttgctgtaggtctgccgggttcaccggatctgaaagcagcccaggaagtggcaaaccatctgggcacggtgcatcacgaaattcacttcactgtacaggaaggtctggatgccatccgcgacgtgatttaccacatcgaaacttatgatgtgaccactattcgcgcttcaacaccgatgtatttaatgtcgcgtaagatcaaggcgatgggcattaaaatggtgctgtccggtgaaggttctgatgaagtgtttggcggttatctttacttccacaaagcgccgaacgccaaagaactgcatgaagagacggtgcgtaaactgctggccctgcatatgtatgactgcgcccgtgccaacaaagcgatgtccgcctggggcgtggaagcgcgcgttccgttcctcgataagaaattccttgatgtggcgatgcgtattaacccacaggataaaatgtgcggtaacggcaaaatggaaaaacacatcctgcgtgaatgttttgaagcgtatctgcctgcaagcgtggcctggcggcagaaagagcagttctccgatggagtcggttacagttggatcgacaccctgaaagaagtggcggcgcagcaggttaccgatcagcaactggaaactgcccgcttccgcttcccatacaacacgccaacctctaaagaagcgtatctgtaccgggagatctttgaagaactgttcccgcttccgagcgccgctgagtgcgtgcctggcggtccttccgtcgcgtgttcttccgctaaagcgatcgaatgggatgaagcgttcaagaaaatggacgatccatctggtcgtgcggttggtgttcaccagtcggcatataagtaagaaatgcgaaacagccccggtgaaatccggggctgtttcagttattgaggtgcttgttgattctgatatgcagtaaggaaatgttccgggtttgccacatcactgtttgacaactcatcactgtaggccagtatttcatagattaatttcccaccactattgttgaattccgaatttcatcctgtatgacaaaagaatggctgtagggtgggaaaaaacacaaagtaaacaataattgacgaatatagcgccacgctgttcgcaacctaaccaaacagtcactttcgagcaattttccttgaaaaagaggttgacgctgcaaggctctatacgcataatgcgccccgcaacgccgataaggtatcgcgaaaaaaagatggctacgtagctcagttggttagagcacatcactcataatgatggggtcacaggttcgaatcccgtcgtagccaccatcttttttgcgggagtggcgaaattggtagacgcaccagatttaggttctggcgccgcaaggtgtgcgagttcaagtctcgcctcccgcaccattcaccagaaagcgttgtacggatggggtatcgccaagcggtaaggcaccggtttttgataccggcattccctggttcgaatccaggtaccccagccatcttcttcgagtaagcggttcaccgcccggttattggggtatcgccaagcggtaaggcaccggtttttgataccggcattccctggttcgaatccaggtaccccagccatcgaagaaacaatctggctacgtagctcagttggttagagcacatcactcataatgatggggtcacaggttcgaatcccgtcgtagccaccaaattctgaatgtgtcgaatacgttcggcaaattcaaaaaccaatttgttggggtatcgccaagcggtaaggcaccggattctgattccggcattccgaggttcgaatcctcgtaccccagccaatttattcaagacgcttacatcgtaagtgcacccagttggggtatcgccaagcggtaaggcaccggattctgattccggcattccgaggttcgaatcctcgtaccccagccacattaaaaaagctcgcttcggcgagctttttgcttttctgcgttcattcaatgtcgaatgcgatgttgacacgtcttatccttcaatgtcggatgcgacgctgccgcgtcttatccgacctacggttggcacgcatccggcaatgttgtaaggctacaaccctaacgcatatttcagcgcctgacgtttcaacacgccagcacgctccgccgccattaacccgagattacgcataaaacgcagtggtggcagattattgctgaatccggcataaaacagatccataccgctttgcataatgaagttatccgccatgcgccgcatctggtaacgcttgaggattggataactggcccacgcttcgccgtagctgcgggcgttgaccagaacatcaatcagggcatcgacatcacgataaccaagattcaccccctgccccgccagcggatggatggtatgcgcggcatcgcccaccagcgcaagccctggctgcacatactgcaacgcatggcgacgcgtcagcggaaacgcaccagcggcaagcggtgtaacgtaacccagacgcgacgggaaatgcttcgcgatttccgcctgtaactgcgccatgttcatattctgcaactggcgaatacgcgccggagagtcataccacaccagcgatgcccagttatcaaacaacggcagaaacgcacgcggtccgtccggagtaaattgctgccaggtgctgtcgccgggatcgttctcacactgtacgctaatcaacatacacgactgcgcatactgccaggcatgaacgccaatacccgccatctgccgcacctgcgaatttgcgccgtcggcaccaatcaccagcttcgcgcggatcgtttctccacccttcagttccagctcctgaagatcatcatggcgatgcagcgcaatcagtgagcctggcacacgtaacgttactttcggatgcgcttccagcgcctgccacagcgcctgttgcaggacggtgttttccaccatatagccaagcaacggtagcttaagttcagcggcgtcaaacaccacatgcgccgtttcccactcccacgtttccagtctgcggtaaggatggcaacgcatagcctgtactgcatcccagacccctaaccctttaagcaatgataccgaagccgcgctgatcgccgagatccgcacatccggttggctatcagcgacaaacggtgcaggttctgcgtgctcgatcaccgttaccgtaaatccgtgctgtgccagccccagcgccagtgcgccgccgaccattcctacgccgacaatggcaatttccgttggttgatttgtcatggtcaatcatcctgttagcaatatgctttaagtttacaggatttttacccccaagggctgataacgctcatactggtcacaacggcagcaaagcattacactatgcgccctgcattcctggctactatttcgcaagagcaagtcgatgaccaaaaaactccatattaaaacctggggctgtcagatgaacgagtacgattcatcgaagatggccgatctgctggatgccacccacggctatcaactgaccgacgtggcggaagaagcggatgtgctgctgctgaacacctgctcaatccgcgagaaggctcaggaaaaagtcttccatcagttgggtcgctggaaactgttaaaagagaagaatccagacctgattatcggcgtcggtggctgcgtggcatcgcaagaaggcgagcacattcgccagcgcgcccactatgtcgatattatttttgggccgcaaacgctgcatcgtctgccggagatgatcaactccgtgcgcggcgaccgcagcccggttgtagatatcagcttcccggaaatcgagaagtttgaccgtctgccggaaccgcgcgccgaagggccgaccgcgtttgtctccatcatggaaggctgcaataaatattgcacctactgcgtggtgccttacacccgtggtgaagaggtaagccgtccgtccgacgatattctgtttgaaattgcccagcttgcggctcagggcgtgcgtgaagtcaacctgctcggtcagaacgtgaacgcctggcgtggtgaaaactacgacggcaccactggatcgtttgccgatctgctgcgtctggttgcggcaatcgacgggatcgatcgtattcgctttaccaccagccatccgatcgaattcaccgacgatatcatcgaagtgtatcgcgacacgccggagctggtgagcttcctgcatctgccggtacagagcggttccgatcgcattctgaacctgatgggccgtacccatacggcgctggagtacaaagcgatcatccgtaaactgcgtgcggcgcgtccggatattcagatcagttctgacttcatcgttggcttccctggagaaaccaccgaagacttcgagaaaacgatgaagctgattgccgacgtcaatttcgacatgagctacagctttatcttctctgcacgtccaggaacgcctgccgctgatatggttgatgatgttccggaagaagagaagaagcagcgtctgtatattctgcaagaacgtatcaatcagcaagcgatggcatggagccgtcggatgctcggcaccacccagcgtattctggtagaaggtacatcgcgtaagagcatcatggagctttccgggcgtaccgaaaataaccgtgtggtcaacttcgagggcacaccggatatgatcggtaaattcgtcgatgtagaaattaccgacgtctacccgaactctctgcgcggtaaagtggtgcgtactgaagatgaaatgggtctgcgcgtggcagaaacacccgaatcggtgattgcccgtactcgcaaagaaaatgaccttggcgtgggttattatcagccgtaattctcaggcccgccgttccggtgggccttgttttttctctctttatccccatctttatcgcaatgcttgcgcctttttcctgtggcgtgaataatttccttataggccggtgaatgttcagcttccggcggcatacagataagaggaacggtttgaacatagacactcgcgaaatcaccctggagccagcagacaatgcgcgtctgttgagcctgtgcggcccgtttgatgacaacatcaagcagctcgaacgtcgtctcggcatcgagatcaatcgccgcgataaccactttaaactgaccggccgtccgatttgcgtcaccgctgcggcagacattctgcgtagcctgtatgtcgatactgccccgatgcgcggtcagattcaggatatcgaaccggaacagatccaccttgcgattaaagaagcgcgggtactggagcaaagcgcggagagcgtgccggagtacggcaaagcggtcaatatcaaaactaaacgcggcgtaattaagccgcgcacgccaaaccaggcgcagtacatcgccaatattctcgaccatgacattaccttcggcgttggcccggcgggtacgggtaaaacctacctggcagtggctgcggcagttgatgccctggagcgtcaggaaattcgccgtattctgcggacacgtacggcagtagaagccggtgagaaactgggcttcctgcctggcgatttaagccagaaagtagacccgtatctgcgcccactgtacgacgcgctgtttgaaatgctgggctttgagaaagtcgagaaactgattgagcgcaacgttattgaagtcgcgcctctggcctatatgcgtggtcgtacgctgaatgacgcctttatcattctcgatgagagccagaacaccaccatcgaacagatgaagatgttcctgacccgtatcggttttaactcaaaagcggttatcaccggcgacgtcacacagatcgacctgccgcgtaatactaaatcaggtttgcgtcatgccatcgaagtgctggccgatgtcgaagagatcagctttaacttcttccacagcgaagacgtggttcgtcacccggtggtggcgcgtatcgttaacgcttatgaagcctgggaagaagcagaacaaaaacgaaaagcggcgctggcggcagaacgcaagcgcgaagaacaggaacaaaaatgagtcaggtgatcctcgatttacaactggcatgtgaagataattccgggttaccggaagagagccagtttcagacatggctgaatgcggtgatcccgcagtttcagaaagaatcggaagtgactattcgcgtggtcgataccgccgaaagccacagtctgaatctgacctatcgcggtaaggataagccgaccaacgtgctctccttcccgtttgaagtgccgcctggcatggagatgtcgctactgggcgatctggttatctgccgtcaggtggttgagaaggaagctcaggagcaaggcaaaccactggaggcgcactgggcgcatatggtggtgcacggcagtctgcatttgttaggttacgatcacatcgaagatgacgaagcagaagaaatggaagccctcgaaacagagattatgcttgctctgggctatgaggatccgtacattgccgagaaagaataatttgccaggcatttgactggcagacgtccccgccgttggtgattaacgacggcgttttgattaactaacatgagaacccatacgacgccatgagcgacgacaattcacacagtagtgacacgataagcaacaagaagggatttttctccctgttactcagccaacttttccacggtgaaccgaaaaaccgtgacgaactgctggcgctgatccgtgattccgggcagaacgaccttatcgacgaagatacgcgcgatatgctcgaaggggtgatggacatcgcagaccaacgcgttcgcgacatcatgatcccccgctcccagatgattaccctgaaacgcaaccagacgctggacgaatgccttgatgtcatcatcgagtccgcccactcacgtttcccggtgattagcgaagacaaagatcacattgaagggattctgatggcgaaagacttgctgccgtttatgcgcagcgatgctgaagccttcagcatggacaaagtgttacgtcaggcggttgtcgttcctgaaagtaagcgcgtagaccggatgctgaaagagtttcgctctcagcgttaccacatggcgatcgtcattgacgaattcggtggggtttccggtctggtgaccattgaagacatcctggaactaattgttggtgagattgaagacgagtatgacgaagaagatgatatcgacttccgtcagctgagtcgtcatacctggaccgtgcgcgcactggcttccattgaagacttcaacgaagcgttcggcacccactttagcgatgaagaggttgacactatcggtggtctggtgatgcaggcatttgggcatcttccggcgcgtggcgaaactatcgacatcgacggttaccagttcaaagtggcgatggccgacagtcggcgtattattcaggttcatgtcaaaatcccggatgactcaccccagccaaagctggatgaataaaaccgaaactggatagataactacatggcttttgcctcattaattgaacgccagcgcattcgcctgctgctggcgttattattcggtgcctgcggaacgctggccttctctccttacgacgtctggcctgcggcgattatttcgctgatggggcttcaggcgttgacctttaaccgtcgcccactccagtctgccgctattggcttttgctggggatttggcctctttggcagcggtattaactgggtctatgtcagcatcgcgacctttggcgggatgcctggcccggttaacatcttcctggtggtgctgctggcggcgtatttgtcgctgtataccggactgtttgctggcgtgctgtcgcgtctgtggccgaaaaccacctggctgcgcgtggcgattgccgccccttctctctggcaagtgaccgagtttctgcgcggttgggtactgacaggcttcccgtggttacagttcggctatagccagattgatggcccgttaaaagggctggcaccgataatgggcgtggaagccattaacttcctgctgatgatggttagtggcctgctggcactggcgttggtcaaacgcaactggcgtccgctggtggtggccgtcgtgctgtttgccctacccttcccgctgcgttacatccaatggtttaccccacaaccggagaaaaccattcaggtttcgatggttcagggcgatattccgcaatcactgaaatgggatggagatcagcttcttaatacgctgaagatttactacaacgcaacggctccgctgatgggcaaatcatcgttgattatctggccggagtcggcgataaccgatctggaaattaatcagcaaccattcctcaaagcactggacggtgagttgcgcgataaaggtagctcgctcgtaaccgggattgtcgacgcgcgtctcaataagcagaaccgctacgatacctacaacaccatcatcacactgggtaaaggtgcaccgtacagctacgaatcagccgatcgctataacaaaaaccatctggtgccgtttggcgagtttgtcccgctggagtcgattctgcgtccgttagcaccgttctttgatctgccgatgtcgtcgttcagccgtgggccatatatccagccgccgctgtcggtaaatggtattgagcttactgcggccatttgctacgagatcattcttggcgagcaagtgcgcgataacttccgcccggataccgactatctgctgactatctccaacgatgcgtggtttggtaaatctattggtccatggcaacacttccagatggcgcgaatgcgtgcgctggagctggcgcgcccactgttgcgcagcaccaacaacggcattacggcggtgattggcccgcagggtgagattcaggcgatgatcccgcagttcacccgcgaggtgttgaccactaacgtgacgcggaccaccggactcacaccgtatgcacgaaccggcaactggccgctgtgggtgctgacggcactgtttggttttgccgctgtgctgatgagtctgcgagcacgtaaacgttgatgtgcctgatgtatcctgcatgagcaaaacgtactttctcattgagctttggggcatggttatcatgcccctttttcttacggttcagggatacaagccacattgccatattggggatgacgaataattgcctgcggatcaagcgagcgcgtcctgtccagttggatcaacccgttcttcgccataacaaatatttttctaccatccgctgaaaaacgaaggtgattaacgtagctggcaggataaacgccaataatctgcccggcattaatattgagcaggatgacataaccttgcaggccatatgacaccaacgctaaatactgaccgtccgggctaataccctcaacggaataaacgctcctgctacaccattgcgtcataatgctggcttgttgatcccctacgcttatacgtgaaatcccctggctgtcggcaaaaattacatccccgttttcaggtcgaaaacgcatcgccgatatcgttcctcgcgcatcactagccggatagctttctttctgatgcgtgatggtattgatgcgtacaatgtcacctctgaccataccgggtatcaacaatattttttcatccggggaaagagccataacccaggcaccaggtttattactcgtccccgtcccgtcgtatttctccagcgggatatccgccacatgctgataagtcaccagatcaatcgctgacacactattactggtgcgattcatcacccaggcttttgtgccatcacgcgagaggataaggctgtcaggatgtgcaccggtggtaatcgactgaataatctcccctgtcgccacgttaatgaccgataacgcattcgcttcaaatgaagtcgcataaatcaacttttcatccgggcttaatgccagcgatctgacgccctgatctttacagccaccacaatgtttgactgacttttctttcgctatgggcgctgtaaaggtatgcaggattttcttttgtccgaggtcgaaaacaacaatgctgttcgtgttttcaattgcggcatacaacatattaccatcccgactgatcgccatatcatggatatcggcaatctcagcgagcaaatcaccactggcctgttcacgacttaccggagcggataatgtttccctgagggcgttgcgttcctccgctaactgctgctttttttgccgtcgctcttgttcaatctcctgtggataaaacgcttcacgcaggctttgcctgacttgtaaaactgactcatccatctgctgctgcgcaagccagatagccccggtcagaagaagactgcccgcaacaataatcccgccttccgtaacgagtcggttttgcccagataaacgcgcgctcagccaacccaacgcgccacccgcaatcaggccgccaatgtgacaagcattatctattcctgtttgccgggcaccatacaacagtgtcagcgccaccatacccaacagagaaaatactcgcctctggtttttatggtatgtgcccgcacctgaagcaaactgtgttgctatcgctgcaccagctattcccagaatcgccccggatgccccaacgctgatgactatctgctcactttcgcgtaacgcataacaggcgctgatgagcccaccaaagacgccggagaataaccaggtaatcaggagtcgccatttccccagaatctgttccgccacgcctcccacgaccaggaatgcaaacatattcatcagcagatgagaaacactactgtgcagaaagatactgctcaataagcgccagggttcacccgacaaagtaagaggcgcaacgtttgcgccgagatggataagtgcggattgatcgacctcttcataactcatccattgtgcgagataacaaaatatcccaatacagagtgcaaaaaggataagggttattgcgggtaattgaacatttaacggcttaaccgaagatgcagacataaggtgtttcttccttgaaaagacaggtaaaaagcatttttcccgtgtgcagttatcatcccggcaaacgtcccatgccgaaaagataattctgtccgaaatatgactttttcagcctaaaattacaatcgtaattaattcgcccctaagtattttttggcatgtaagttgctttatttactgtgtaagcgatgaaatcagccgcgacgcaaccaggttgcaccaccacaaatcagcggtagcaccaaaaaggtgcggtttaagaattttgcttcggaatggtgcggcgcatctcgcaaaaacaaacaataaaacagcaatatctttacatttagccaaactaaatgttacctaacaggcacaacactgcacaataaagttgcagacgataacaacacaaacactcacaacgggtatccatgcgttcttaacgcagaagataaaggagttggatatgcaattacgtaaacctgccacagcaatcctcgccctggcgctttccgcaggactggcacaggcagatgacgccgccccggcagcaggcagtacgctggacaaaatcgccaaaaacggtgtgattgtcgtcggtcaccgtgaatcttcagtacctttctcttattacgacaatcagcaaaaagtggtgggttactcgcaggattactccaacgccattgttgaagcagtgaaaaagaaactcaacaaaccggacttgcaggtgaaactgattccgattacctcacaaaaccgtattccactgctgcaaaacggcactttcgattttgaatgtggttctaccactaacaacgtcgaacgccaaaaacaggcggctttctctgacactattttcgtggtcggtacgcgcctgctgaccaaaaagggtggcgatatcaaagattttgccgacctgaaagacaaagccgtagtcgtcacttccggcactacctctgaagttttgctcaacaaactgaatgaagagcaaaaaatgaatatgcgcatcatcagcgccaaagatcacggtgactctttccgcaccctggaaagcggtcgtgccgttgcctttatgatggatgacgctctgctggccggtgaacgtgcgaaagcgaagaaaccagacaactgggatatcgtcggcaagccgcagtctcaggaagcctacggttgcatgttgcgtaaagacgatccgcagttcaaaaagctgatggatgacactatcgctcaggtgcagacctccggtgaagcggaaaaatggtttgataaatggttcaaaaatccaattccgccgaaaaacctgaacatgaatttcgaactgtcagacgaaatgaaagcactgttcaaagaaccgaatgacaaggcactgaactaattacaagaaccaggggcggaaattccagccctctcgattgttacgtagcacggacagactatacgcctgatggtcgttccccatcgggcctgaaaaccgcaatacgctgggtaacaatcttcgagggtagcagttaacgctgctaccctcttttttctggagtagatttatgtctatagactggaactggggtatttttttacaacaagccccgttcggcaacaccacctatcttggttggatctggagtggttttcaggtgacgatcgctttgtcgatctgcgcctggattatcgctttcctcgtcggttcatttttcggcattttacgtaccgttccaaaccgttttctctccggtctgggtacgttgtatgtcgaactgttccgcaacgtgccgttgattgtgcaattctttacctggtatctggtgatcccggagctgctgccggagaaaatcggcatgtggtttaaggccgagctggatcccaatattcagtttttcctttcatccatgctctgcctggggctgtttaccgccgcccgtgtttgcgaacaggtacgcgccgctattcagtcgctgccgcgtgggcaaaagaatgccgcgctggcgatgggcctgacgctaccgcaggcttatcgatacgtactgctgcctaatgcttatcgcgttatcgtcccgccgatgacctcagagatgatgaacctggtgaaaaactccgccatcgcctcgactattggtctggtggatatggcggcgcaggcgggtaaattgcttgattactcagcccacgcctgggagtcgtttaccgccatcacgctggcgtatgtattgattaacgcttttatcatgctggtgatgacgctggttgaacgtaaagttcgcctgcctggcaacatggggggtaaataatgtacgagtttgactgtagttccattgtcccttccctgccatatctgctcgacgggctggtgatcaccctgaaaatcaccgtcacggcagtcgtgattggtattttgtggggcaccatgctggcggtgatgcgcttgtccagctttgcgcctgtagcgtggtttgccaaagcctacgttaacgtattccgctcgattcctttagttatggttttgctgtggttttacctgattgtgccgggttttctgcaaaacgtgctgggattatcaccaaaaaatgatatccgtttaatttcggcgatggtggcgttttcgatgtttgaagcggcctactattcagagattatccgtgctggtattcaaagtatttctcgtggtcagtcgagcgccgcgctggcgttgggaatgactcactggcagtcgatgaaactgattattctgccgcaggcgttccgcgcgatggtgccgctgctgctcactcagggcatcgtactgttccaggatacctcgctggtgtatgtgttatctctggccgatttcttccgtaccgcctcaaccattggtgagcgtgatggtacgcaggttgagatgatcctgtttgccggatttgtttatttcgttattagtcttagcgcgtcgttgttggtcagctacttgaaaagaaggacagcataatgattaccctgaaaaatgtttcaaaatggtatggtcactttcaggtgctgaccgactgctcaaccgaagtgaaaaaaggcgaagtggtggtggtttgcggcccgtctggttccggcaaatcaacgctgattaaaaccgtcaacggcctcgaaccagtgcagcaaggtgaaatcaccgtcgatggtatcgtggttaatgacaagaaaaccgatctggcaaagctgcgttcccgcgtcgggatggtattccagcatttcgagctgttccctcatctgtcgattatcgaaaacctgaccctggcgcaggtgaaagtgcttaaacgcgataaagcgccggctcgtgaaaaagcattgaaattgctggagcgcgtgggactttccgcacatgccaataaatttccggcgcagctttccggcggtcagcagcagcgtgtggcgatcgctcgcgcattgtgtatggatcctattgcgatgctgttcgacgaaccgacgtcggcgctggatccggagatgatcaacgaagtgctggacgtgatggtggaactggcgaacgaaggaatgaccatgatggtggtgacccacgaaatgggctttgcccgcaaagtggcgaatcgggtgatctttatggatgagggtaaaattgtcgaagactcgccgaaagacgctttcttcgatgatccgaaatcggaccgcgcaaaagacttcctcgcgaaaatcctgcattaatcactctggcgcgcatacccaagtgcgcgccatctcacgctttatcgtttcgcccctcgtatctgttacatcctggcgttacccttgtcgcaaagaagcacacaacaaggagcaacaatggcactgccaattctgttagattgcgacccaggtcatgacgacgctatcgcaatagttctcgccctcgcctcaccagagcttgatgtcaaagcaattacgtcttccgccggaaaccagacaccagaaaaaaccttacgcaatgttcttcgtatgctgaccttgctcaatcgcaccgatattccggtagcaggcggcgcggtaaaaccgttaatgcgtgagttgattatcgcggacaatgtgcacggcgaaagcggtctcgacggcccggcattaccggaaccggcgttcgcaccgcaaaactgtacggcggtagagctaatggcgaaaacgctgcgtgaaagtgcggaacctgtcacgattgtgtctaccggaccgcaaactaacgttgccttgctgctcaatagccatccggaactgcatagcaaaattgcccgtatcgtgattatgggcggcgcaatggggcttggtaactggacgcctgcggctgaatttaatatttacgttgacccggaagcggcagaaattgtcttccagtcagggatcccggtggtgatggctggtctggatgttactcacaaagcacaaatccacgttgaagacactgagcgtttccgcgcgattggcaaccctgtttcaaccattgttgccgaactgctggatttcttcctcgaatatcataaagacgaaaaatggggctttgtcggcgcaccgctgcatgacccatgcaccatcgcctggctgttgaaaccggagttgtttaccactgttgagcgctgggttggcgtggaaacacaggggaaatatactcagggtatgacggttgttgattattattatctgactggcaataaaccgaatgccaccgtaatggtcgatgttgatcgtcagggctttgttgatttactggctgatcgtctgaaattttacgcttaacacacgtcattgattaagatcaccacgcgttacctgggtggtcttaatctgtttatctcnnnnnnnnnnatataaatgcaatggataatgcagaactcgccattggtatcgatctcggtactaccaatagtttaattgccgtctggaaagacggtgccgcgcaattaattccaaataagttcggtgaatatttaacaccatccataattagcatggatgaaaataatcatattttagtcggaaaaccggctgtatcacggcgtacttcgcatccggataaaacggcagcgttatttaaacgtgcaatgggcagtaataccaactggcggttaggcagcgacacatttaacgcgccagaactgtcctctttggtattacgctcattaaaagaagatgccgaagaatttctgcaacgtccgattaaagatgtggtgatctccgttccggcttatttcagcgatgaacaacgcaagcatacccgtttagcagcggagttagccgggttaaatgcggtacgcttaattaatgaacccacagcagctgcgatggcgtatggcctgcatacccaacaaaatacccgttcgctggtgtttgatatcggtggcggcacgtttgacgttacggtgcttgagtacgccacgccggtgattgaagttcacgcctccgctggcgacaacttcctcggtggcgaagattttacccatatgttggtcgatgacgttttaaagcgcgcggatgtcaccaggaccacgcttaacgagagtgaactggcagccttgtatgcctgtgtggaagcggcaaaatgtagcaatcaatcgccattacacattcgctggcagtaccaggatgaagcacgggaatgcgaattttatgagaatgaactggaagatttgtggttgccgctgctcaatcgcttgcgagtgccgattgaacaggcgttgcgcgatgcgcgtctgaagccaagtcaaatcgacagtctggtactggttggcggcgcgtcacaaatgccgctggtgcagcgaatcgccgtgcgtctgtttggcaaattaccgtatcaaagttacgacccgagcaccattgtcgcgctgggcgcagcaatccaggccgcctgccgcttacgcagtgaagatattgaagaggtgatcctcactgatatttgcccttactcgttgggcgttgaagttaaccgctagggcatttccggcattttctcgccaattattgaacgaaacaccacagtaccggtgtcgcgtgtagaaacttactcgaccatgcacccggaacaggattctattacggttaacgtctatcagggagaaaaccacaaagttaaaaataacattctggttgaatccttcgatgtgccgttgaagaaaaccggggcttatcagtcgattgatattcgctttagttatgatatcaacggcttgcttgaagttgacgtgcttctggaagatggcagcgttaagtccagagtcattaatcatagcccggtaacattgagcgcgcagcagattgaagagagtcggacgcggttatccgcattgaaaatttatccgcgcgatatgctcatcaaccgcacctttaaggccaaactggaagagttgtgggcgcgggcgctgggtgacgagcgagaagagattggccgggtgatcaccgattttgatgcggcgttgcagtcaaacgatatggcccgcgtcgatgaggtcaggcggcgggcgagcgtttatttagccattgagacctcataatcacggctgccggatgcggcgtaaatgctgcatccggcatcggcgcaaaaaacacatcgtcaactaaacaacatcgcgattttgccgagagcataacctataaccagcaccgttaaactgattttgataatgctggtaatgctctgtggtttttcaccctcatcatttttttcttcatggttttcaggtgttggctcatcgacatcttcatcctccggctcgagttttactttcgtcaacagcatccgggtgataatggcctctaatggatgagcatctccgccttccagccttgtattaagacgggccagcatctcttgtttcggaaacgcttcaagtactacctgttccgctacccgatacaaatccagtaacggtgaatcttcttctgtctcgctaccgactctcgatttccaccacgcccatgctttgcgtttgaagaataacgactcaataaacgattgacctaacggcgataattttccgctatgtaaaatttccgcccataacagccgcgtccgggcgctctcaccaggaacatatttcagcggttgaccttgcgcatctaccatgctccgcgcttcgataaccatcactaataacgcgaaataatccgggcaatgacgcttgctccactgcaacaacaaattatcagcttgtgtagatgggtaactttcccggtacgcgcagagatcggcaagcaggctttccccctcgccgcagtacaacctttgagcacacaagtaatatcgggcatcttcgctttctggttcttccatttgccactgtttggctacaggaatgagttccgccatacctgtttgcaccgagctgtaccagcgcaacagtttgcgatgtaactttgcatcatcaggaatgaaccacggaccttccatcgccaaaaacgcagtgacgtagtcaggatggtaacggcagcaacgttccagcgcgaagtaatactcaacagtctggttctgcaacgcaacgggatattccagaaggctaaggaaatcgaaacaatcaccagcctgaatggcctcaagaaaagcctccctttcttcctcatccattccttcgctgtcattaaacgaatgccagttcaaacgctctgccagcaaagaagcacaatttaatgaaagatatcgcgcttctatagcgattgcacacagcggccagcgtaattgatcgacatcctccatgttccaggtatttaattgctgaataaatttctgccaggcggagggctgaaaacgatcactttccgaatccagtaatgtcctgaatgcacgcagtatttcatgttcagcggcggcatctttttcttcatcatctgcttcctcgacaggatttaccgccagtcgcagcgcctcttcataggcctggcgtaatgctttaaacccctgcggatcggtttcgggatgacataacggtaagcgagcaagataagcctggcggataatgtctatttgcgtcgtgctttcaatttcgaggatttgccaacatgttttcataggtcgctcacatccttaagcgttaccgggcattcaggctggacagttaatggctgccagggaagcgtggcatagaaacgatcgcttcccgctgccagctcttcgaacatccgactcccggcgctatcgtatttgtacagggttagcgcctcgcgtagcgaagtgttgtcttcgcactgagaagattgccagtagagacgtcctaacgaataggcggaaaaatagtgcatccagctgtgatagtaatggtgagctcgtacatagacgcgcgattgcagccataaactctcttcttccgtcagccagttgttgagcacaccgacccgtgacagaaaccccattcgaacataatcccaggctttgattcccccttctccacagcacatagcggtttgggcaacgaattgggtataaatcaaccctctctccgagccaccagcaattaatgctttccactcttcaggggaagagcgatgccatgtcagatataagccagctaaatcattggcatgaccatcatcagtcatctgataaatagtctgaattaaatcatcacgattatttattccccaggatgatgagagatcgaattcttttatcccggtatacatttttggcgagtcatgcgcgggtttgcaaccctgattaagtatttccatgggcgcagaaagcgcaaaaagaagatattgttcttccttattcatttgttaataatcccttaagtgcattaactgactacttttttattattgatgagtataaacttgacgctttcaaagtaaaaagaaaatcgaagcattcacacatgaataaaaaattaatgtatatattcgcaatttttatagttgcagcaattacctgtattagcc

SEQ ID NO: 185 - DNA, 39908 bp, Escherichia coli
  source 1..39908: mol_type = genomic DNA
gtataaggagagaaaggaacgagaaagttaaatctatttatcctaatcgcaatttcattgtttaaataatcactatggattaatattttttgcgactctgctgagttactggttttaactagtggtgtaaaagggataccttttcggtatcccttttacaataatcagaagaaatcaattcgcgtattgataccgacggtgcgacccatattgacctgcgcgacggcgctgctgccgttcatgtagccataggtacggtaacgacggtcgaacaggttatcgacatagacggaaatgttcatccgttcagtcgcctgccagcccaggctgctgtccagggtggcataggtgccttgccgcaactggttgtcgccatcgaaataatgcggcccgaccagattaaccgccagtcggggcatcagtgcgccatagcgcgtatcaatcacgccgttcacgctgcttcccgcgccataacgtggtacgaacggcacccggttaccgtgatacaactcactgtcattggtgaattcggaacggatcacgttgccattgatatcccatgaccagcctggcgcaaaccgccacttcgcttcaagctcaacgccggtggcgtcggctttacccgcattgcttaatgtctgcatcccgaccgggccagagtaaagctgcatgtctttggtgtgggtataaaacgtcgcagcttgcagcgtgacgtcagcggtttcgtagcgggtgccaagttcatagttgatggatttctcggcgacgaacggtttggcatcaagacccgcagtaggcacgatgttgtacccggaaggtttatatccctgggctacacgggtatacactctccagtcatcggtcagcatatagcctgcggatagctgcccgagcacctgatcgtcattgctcttaccctggtcgccaaacgggttgccgagcatgctgccgtgatattgtgtactggatttatcatgcgagaagcgcacgccgccgccgatatcaaaacgatcggttaaatgccaggtcaggtcactgtatgcggccagcgtttcagcggtggtatagccggtactgcttaaataaggcattgtcggcatgtcgtaggctgaatttaacttctcgcgggtgttctgccggtacagcccaaacaccatatcaacggtacgcgcatcgcccagggttgcggcgcgcagctcctgcacatcctgattccagcgctgaggcatattgacgattaacgaaccggaagggaaggtgcgcgaataatgctgctgctgccaggcgctgatcaggttgaaaacccagtcatcggtggtgtatttcccactcagggtctggctgtcagtgcagcgccgcatgtacgggtctggtgaaccatcgctgatcgacagcttacggcccttaatatcattccatcccacataggcgtcctgggtggcgcgggtacattcgcgtgaggcggcaaagcccatttcccagggctgatcgtccggcgccagacgcagtttcacattccctatgctggcgcgggtgccgcctaagtcatcgcttcccgtcgcggggttaatcatgtcgccgtcatcaacctggcgtaacagggtgacgctgccgtacagcaggccatcctgaatggggccgctcaggttgaacttacttcgataactgtcgcggctactgacgccgccttcaatatagccgcgcggcgtgctgtccggctgctgggtgacgatgttgatgatcccgccctgagcgcttttgccatataacgttccctgtgggcctcgcagcaactccacgctttgcacatcggtaagcgcctggatggtgttggtggaaagctgagggacgccatcgacatacagggtgacggcggggttatagaagtcctgcgctgaagagacgccgcgtagcgagatcgtcgaaaaaagcatgttgccgctattttcaatattgagcccgggcaagactctggggagtttgtcgctggcggtgacgccggcgtcgcttaattccggcgcgctgacaacagtagacgagacgttgttggctgatgccgagcgggaagattgtttactggcggtaaccaccagcgtgctttcgtcttgctgtgaagtctgggcattagcaatggcggggagcaataatccccccaaggccagaggataaagccgtgtcattttcattgttgtgagtccctgtaagacggcgaaacgccaaaaataccgacaatggtgaattgaaaatgataactatttctaatagtagtgctacccgaaacgggtttatttcaacctgtttcgggtcggtttgcgcttattgggcagaatggcgataacggtcgacggcgagagccgtcaggcgttttttgtctatcttgccgacggcggtgagcggccagtggtccagaaactcgatttggtcaggaattttccacgcgctgagccccatacgggtcagttgttgacgcaactgctgatagtcagttggcacctgctgcgcgatgataaacgcgcaaatccgctcgccaagcagcgtgtccggcnnnnnnnnnngaccaccgcgcaatcttgcacttccgctaaacgcagcagtgccgattccacttcagccgcggctattttttctccggcgcggttgatctgctcttttatgcgtccctcaacgtgcaggttccccacctcatccagcctgacattgtcgcctgtgcggtaaaacccttgcgcggtaaaggcctgcgcgttgtgggcaggggcgcggtaatagcccgaaatggtataagggccgcgcgttaacaattgcccggtttcgcccggcgcgacgtcgttctcgtcttgatcaacgatgcggatttcatccagaggggacaacgggcgcccctggctgtggagaatggtggcatgcggatcgtccagccgggtaaaacagagcaggccttccgccataccgaaaacctgttgcagggtacagtcaaaggtggcgataacctgctcagcaagcgtcgggtcgagccgggcgccgcctgcctgaatgacgcgcagcgacgaaaggtcgctgtcttcccactccctggcctgcacccataattgcgccagcgccggaaccagggcgacgtgagtcactctttcctgcgcgattaaaggcatcacctcatcacagctggcgctgtcggtcagcaccacttttccgccgcaggcaagcgttcccagaataccggggcaggccagcggaaagttatgcgccaccgggaggacggcgagatacacgctctgttggctgatgccgcacagttcagcagaagcgctgaagttatagctatagtcggcatgtcggcgcgggatgagtttgggcgtgccggttgtgccgcctgagagcaacaacaacgcggtggcggaaacatcaggctgcggccatgcctgtcgctcaccgtgaagggagaagaacggcgtaaaatcgtcgctcacggtctctccagcgaccagaacatgacgcaagcaggcgtgtttgtgcgccatctgtcgggccagctctgcgtggttttccccgtgaataacgtaagcgacgggttgcgccagctcaatcagcgcgtcgatatccagcgcccgttgcgagggcatcgccagcacggggataacgcccagtcttaacaaggcgaacagcagggtaacaaacgcgttgtcgttgggaagctgcacaattacatgctcccccgaacgcaaacccagtgatgacagacctgcggcaagttcgtcaacttgtgcatcaagcgcgctgtaggttaacgacccctttgcatcaacgacggcaattcgcgaggcataacgggccgcccagtggcgcaactgttcggcaatgggtaagggatactgttcaatcagagatttaaaggaagaattcatgcgtcacctttctgaagtactgggctgtttttgcaacgcggtcattgcagaaaatgcgtggggaaaatggcggacaatctgcgtaaaaaaggaccgggcttgttgaatgggatagaaatgatcgccgtcaatcaccaccgggcctgtaacgtggctcagccactgacgccaggcatcgacctgctgccaggaggcttcgcgatcgtggctgccgcacaataacagcgcaggcgtgcgcagcggcggacagacgtcgggcgagtcgtagtgatagctnnnnnnnnnncgtaaaaatcagcgcgcagaagaggaagaaacagcgacattaattcctggttttcccgcagttcaggagaacatccgccaatgtctatcagctcagcgataaagtcggcatcatcgcgatggctgagctggcgttcagaatgcagatgcggggcatggcacccggaaataatcagtccttgtggcgcaagcccccgttgctccagaagtcggcaggtttcaaacgccacctgcgcccccatgctgtgcccggcgagtaaaagcggcgtgtcaggcgatacggatgcttccagctcgttcgccagcagtgccgccagttgtgtaatgcttctgagcggttccagatggcgaaggcgatcgcgccccggccaggtcaccagagaaagcgcgcaatcagccagttgctcagcttgccagtggcgaaacgcgctactgctgccgccagcgaaagggcacatgaccagatgcgcagtattgccgttccgggcgggccacagcgggatgcatattgcagattgcgtcacagcgcctccttatcatcatcgttgtagaaaccggctaaccggtcgtggtgcggcggtgtcaggcgtctgatctccgcattgccggtcttacgtaaaatctgctgccataaacgtgataacgcgatctgatgtacgctttggcaggccgctggtggatgttcgcccgccagatggctgcgcaactggtgtagcaaccagctgacgccctccggcccgacggtttcgcagcagtcgcgccagctcaggggcgccgcgctgcgcgtcagacccggcagatcgcgcaggatctccggtctgcggtagaggctgtgggcgttctcctgatggtctgcgacaaacaggctggatgaccagatgacggggccgtagctcgcctccagcgaaagatgaccttccggccagcccagcagcaggcggtgcatgataaggctatgcatatctggatcgtcaggatcgagatagcgctgaagcagcaggcaggcttctccctccggccagaagagtctcagacagtgaaaatcgctaaagctgccaaccacgtcgcactccacggcggcggcatcaacgcccagagccagcaacaacaaatccagagtggagtagagcaactgtcggctggtggtggcgtggactaccggcggcgtcttagccaggcagcgacgcagctgctgagcatcgcgaagccatgtgcgtcccgcgcgcgtatgcggataaaacgtgtttacccaatagcagcagccctgttcctgcgccagcgtttgtaaggaactgatgtcatccgggtggaggggatgctcctgaatgacgtgtacgccgcgcgtcagaaagtgtctggcaagctgcgtaccggttcctccggcgacggtcgaacgcacgacaatacaggcgatatccggcatcttggttatctgttccggcgaggtatacagcggaatgccaaacgcatgagccagctctcttgaacgggcgcttccctgcgccagcaggccgaccagttccagcccctccgggggctgcataaaggcattcaggtacatttcgccaaatttggcgcccacaatcagtacgcgttgttttggggaggcggacggcatcataacgtgttctccggttgcattgaggttgcgcaaagccagcgcgtaatgtgttgcgcacaagcctgaacgtggggggcttccatcatgatttgccagtggctggcttcaatcacagcgtcgtcggcgttgtttatccagccctgccactcggtttctgctggcgtccagcgcgcgggtctcccggcggcatacaccatgagacaggggaccggaacgctttcgcccggcgtatgctcagtcagtaaacgcagcagatgcgcgatgttgtcgagccacgtttctgccgcttgcagcgtcaggttttgcgacaccataccggccgttttagcgaggctgataaagtcggcaagctggctgtcgggcgtctgctggtcgaaatgttcgggcagtgccagaggcgtttgtccttcggctaacaggcgcagcagggccgcccggttttcgcaacagaaatcctgtcggcacacgggatcgattaacaccatccgaacctgctcgcctttggcgtacaggcgctgtgcggcgcccgccgcaagaaacgcgccatacgaccaacccgccagcacataagggccgtgaggctgctgacgacggatgcacccgacatactcatcgatcatctggtcgagcgtggcaaagcgctgcggcgattttgcttgcaggccgaaaacgcgcctgttcaacgcgctagcgagcggcagccaggcgctgatatcgccgtctgaagcgtggaagacaaacagggtttcctcaccgtcgccctggcaaaggggtatcgggttgtcctctcctgacgtagccgcctgtagatgggcgcagaagtcgctcagcgtcgaatggctgaacagatcctgaaggttagccctggcaatccctctccggtttagctgcgcgaccatccttgtcgccatcaggctgtcgccgcccagttcgaaaaagtcgtgatgccttgccacggggcgagacagcagcgattgccagagttcagccacctgtttttccagcgccggattccccccggcaactggcgtgggtttggctggctcagtcggcgtatcagacggggcatgcagcggcgtaaataacgcttctctttgccggatctgtaaaatgggcagaccggtgccaaagcgctgctgtaaatagcggctcacggcttttttatccgggcgatttacgccaggcgaacgcgccaccagcagatgctggcgcagcggcgacgattcctgcgcgggccacgccagctcgtttgcaaacccggcctgaacgagaacctcctgccatgcggagcgggtgagcatcggtttctcatcccggcggcggaaatcgcggtatccgcttaatccctcaataaagcccacgctcgccagctggaatacgctgtttcgctccgtcgcttcaacgatcagcaaacgtccgccggctttcagcaacagttttaatctgcgcaacgtctggacgacatggctggcgtcgtggagcacattgacggcaacgatcaggtcgtaacccgcctccgggtgggcggtgaaatccagcggctggttgatgtcgaacaaggcataagacacctgcgattcatcatggaaacgggctctggcgtcattgaggaactgcgcggagacgtccgtgaagtggtacgactgccgcgtgttccgcgtggccttcagcaccggcgcggtagtggctgcggttccggcgccaacctccagaatccgttctgcgctgcacaaggcggcaatctgcgcggtatagcgattcagacaggcgctggcggggttgtcgcgatacagcgcgtcggtaacgcgatgctgctcgttgaacagcaattccagcggagaacaccgcccggagaagagggcgtcgtgccgggcgatgcaggtttccagatactgcgccagcgcctggctccattggctttgcgggcacgcttcctgaggctcaggaatctcgctgagcggaatgcggcagcgccagctttcaccttcgcggattaaccactctctttccgtcagacactgtagccactggcgcagcagacgctggtgagacgcttgcgcggacagcgcctgtactattgcgctaaagcgatgggcgatctccggcgtggtaaacaggccgtgacgatttagcgtagccgcgatcccctgtagcgcacgcgcctccagccagcgccaggtcgcctccagctcatcaagctgcgcctgctcaggcaacggcagcgccagttgggtaagttcgtgctcatcaggcatcgccgctgatggcgacggatcgtcggccatcacgatatccagcgtcaacgcgccctgttcggttatttccgctctggcctgccggatgccggggtattcgagcgtcgcctgctcaatatcccgcaggtcgtagtccgcctgcgcgttcagcggccagcgtcggcggggaatgtgcccggcgatgccgctggcgagagtcttcaggctttcaggggcggcgatgacggcttgcaggatggcgcaatagtcattaaacatcgcctcggcagcgccgggttccagcacgttgtccatgcagtaccagctaaacatcaactcgccgtcgctctccatgacctgatgatccagccagacctgcggcgtttgcgtgaatacatagcagggttcgccgaacagatggctcatcgcctgatcgatagtcatgccttccagcgtcatccccagcatactggtaaacactaccggcatcagcggttgacgttgtgatccgcgcaggcggcccagctcacggatcacctcaacaccgttcatttcactgtgcgccatgttttgccagaggcgctgttgggtctgttgcatctgctcttgcaacgtcaccggcgctgagaagttaaaatcaaccagcgtgacggaggtaaaatcaccaatcaactggttgatttgcggatggatcggctggcgattgaagaacgtcaggttcagcgtaaatgttgtggtacggctccagcgctcaagggtggcggcaaacagcgtgagcagcgcggcagacggtgtgacgccttgctgctgccagcgctgtttcacggcctgccattctgtcttgccgatcgtcgatttgaaggtggtgaagtgtggcgtttccgggggcgtctcaaccaccggcagctctggcgctaagggcagttgcggcagtttttcctgccagtaatcccaggcatcgtgccatgccgatgtctgtcggcgcgcctgttcagccatcacataatcacggaaggtaatagcgagcggcgccagcgtttcaccgcgccagacctgcgccaggtcgtccatcatgactttaaaactctgcacatcaaactgcaaaaggtcgaggttcatatgcagacggtaatggcaatcgtcgatttcgctgaccaccagctcaaaaagaggccactggtcggcaggcaaaacgcgatagctcagttcatgccgccgtttttccagcgcgatgcgctgttcttccggggaaagcgcgcgcagatcgtcacgcgggatgtgatactccggcgttgtcgccaggattcgctgctgcccgtcggcatcaaccaccatacgcaacatatcgtggcgtgcgatgagctggttccatgctttctccagtatggcgagattgaactcatcgtggcgtttatcccactcaaacaggacgtgacaggcgacgccgccatagccaatgaggtgggttcgccccagccagtaggcgtgctgaatgggcgtcaaagggaagggcgcataacgctcgtcggcgtcgtgccgcaacacttccggctgcgaagcggcaggcgtcgcctctggcttagaacagataagctgcgtgagtccatgaggagacagatcctgccacgcccgttccgcattgatgcgtacgcccaggtagtgctgaatatcgctactgagttcaaggaagagcagcgagtccatgccgagttgcaacagatcctggtttggatgcagtgacgccggatcgctcagccttagctgaaccgcaatccgctttttcagccatgccatcaccgctgtttcatcgctcaggctgccgttaaaggcgttgtcatcagcaggaggaatgaccggcgttgcggctttttctgtggcgctgatgttaaacagagcctgttgtaacgggggcattttgtcggtaaaaacgcgcatcgccagtcgccacggggcgccgcgcatcaccgcctgttccaggtgccagcagccttcggcatcgcttaacgcgcccatacctcggctggcgagcgtcgccagcatttccggcgtggccgcccgaccgctttctccccatgcgccccaggcgacagagagcgttttcggcgcatcaagggtggaaaactgctgggccagcccgtccaggtagccgcaggccagcgcatgggcgctctgacccggcgcgccgagggtggcggcagcggaagagtagagaataagatagcgtccgtcgtggttgcgcagggtttgcaacagctggcttgccgcctgcgcttttaccgcgaaaacggcagccagctggtggtcatcaagctcctgcaagggcgcgtcagccaatacgccagcggcatgaatcgctccggcaatgccgccgttggccgccagatcgtcaagaaccgtggccagttgcccggcatcgcccacatcacaacggcagacgcgcgtctgcccgccctccacgtcgcgtagccatgactcatccacgcgcggcgccagcagggcgatgcgtcgcgcccctttttctctgagccagttcacggcaaggcggcctaatccgccaaacgctccggtcaccagatgccagcggctatcgccggtaaacacgtttgccggtaattcagcggcgcatcccgtattgggcgccagtgaagggagccaaagggtgtcaccccgtgcggcgagccagcgctgtgatagtgagactgcgctcaacccttgatgcagcgtttcccacggggggttttcggcgagatcgatggcggcaagcaaccgttccggctgttcgttggccgcgacgcgaagcaaggcccatagcgcgtgatgggatgcagagagtgcttcattttcctcgactcgccacgcgcggcgagtaaccacaatcaatccggctgcgctggcggtgagcgctgctatcactttctccgctaaggccagcgtatcctcgctctcctcaacaatcatcagtcgcgaagaggcgtgcggatcgtgaatgatgccgtattgcgccagctcgtcgctgcgcgcaagcgtaccggcgctgaagctaaaggtaagcggttggtcaatgctggcgacgttgaggggcgtccagcgccattgataatgcgtctgcggcgcaggaagaggcgcggcgggcgatagcggcagccactcgccagcaggatgacgggcttcaacgcgcatctgaccgcgggaaaaggcttcgttttgccagcttaagcgaaccttccccagccactccggggcggcgacggggggcggttccacaggcagagcgtcgccatgacgctgtgaaagcagacgccaggcctcctgccagcgggcgttaaaccgttcgggctgacctgcgcaatcagaccagtcggcgagataatcaccgttatccgtcagcgcctgccccaacacgggnnnnnnnnnnctgatggcgcggtgaatgttacggcgctaaccgcctgaccgggcagcgtggcgagaatgatatgttcgctcatcccggcggtcgggctgccatcctgcggtagccacgccactttgctgaatccggcgtggcggcactgttgttgccactgagcggtggtgaggaataactcaccttcgcgggcgtcgagatcctgtagcggaagaaccagcgggccgaaaacgaagtcaaacagacgcattggctgggtgatttcgcgcatcagcaggcgcccgcccggcttgagcagggggcgcagattatcgagcgtgcggccaatatggcgggtggcgtgaatcacgttcgctgccacgataagatcgtaagactgtgcctggaaaccctgagactgcgcctctttttcgagatccagctcgctatacttcacaaaatcatagtcggcgaatttctgctgggcgcgacgggtgaacagcgccgagatatcggtgaaatggtactccagtgccggaacgccgttgagttccggcagcagccacgcggtggtgccgccggttccgccgccaacttcaagaatacgcaacggctggcggggctgacgcgtctggacaatgccgcgtaataccccggcggcgatttggttgaaatagcggccaaagctgaattcctgatacagcacttccacgccgtcggaggcgctttgcgggaagataatcgccaccggttcttccgcgccgctcatcatttcatataaccgatcgccggcacgggcgatggtgtcgggaatagcctgaaaaccttcacaataaccggcaagttccgtcagcagtgattcccgctgttgatgttcaatggggcgggcgcggacgtatcgcccgtcggtgcagcggtaatcgccgtcgaccacgcagttattcagcaggcgctggagtagctgctggtagcggggcagcagacgtccacggcgcatgatggtcatggcgtccacgccgttctcaatggcatcgccggtacagcgttgtaccagttgatcgacgtagatggcgtgcagtcgcgtggcgcactgtttaagcgcttccaggcgagggagatcgagcgctgtcgcggcgcgactcgccacctccagcccggcagacagcgctgcgtcggcaggctcgcaggccggggagacgcgctctttccagtaacgctcagtatcaaacggataacatggcgcagcgatacgttgtccatcgcccgccagcaggtcggcccacggtagggcgacgccggcagcgtaaagctggagcagggcctgattgaggacatcgctcgcctctttgttacgccgggcgctggctatccagtatgcgttatcgcggtattcgcgctgcccgcaagcaaccaactgggcatcgggccccatctccagaaaaacgcgggcgccgagctgatgcgccacctgaatactctggataaaacgcaccggctggcgcatgtgtcggcgccagtaatccgcctggttgagcgttgactcatcaatgacgtcggcggtgagcgtggaaataatcggtatttgccccggctccgcgtgcagtcccgcgcaggcgtcctggaaccgatcgagtatcggctccagtaaagcggagtgcgccgcaccggttacgctcaggcgacgatagttaatgtcatgctgcgagagcgtggcgcaaaatactgcgagacgggcttccggcccggaaaataccgtatgttgcgtaccgttattggcggcgagatccagctcaaactggcgagccagcggcatcagcgtgtcttcgtctgcaaataccgccaccatcgcgccgcttgcgcactgctgcattagcgcgccgcgccgacaaaccagtggcatgacctgttcaatcgtatagtgtccgcagacaacagcagcggcaaattcaccgacggaatgcccaatggcgaagtctggcttcagtccttcagcacgccagtgcgccgccatcgcgatttcaaacgcgacaatcgccggctgcgcccaggccatattgtccagttgcgccgaatcggggttaaacatcgcttcgcgcagtgacggcgtgagcatttcgctacaggcggaaaaacagcgatccagcgtgtcggcaaacgccgttgagtgctggtacatcgtttgacccatagtgcgccagtgcgagccctggccggtaaacagccacacctgcttgccgctggcgccgtggccgctgtaaaccagcgcccccgatttctcaccggcccaggcgctgagcgcctcggcggtttcacggtttaatggcgccgccaggcggaaggggagatcgagacggcgcgcgtgcagggctgtgaaggccagagagctggcatccgcattctctctcagcgccccggcataatccgtcgccagccgccgcaacgcgctgtcgctggcggcgctgagcagcagcgcggtactttttctgccgctatccgtattggggaggcgcgcgttgagcgcgtcgggcagcgaggcgacgatcatatggcagttggtgccgccaataccaaaggaggagacgcccgcatagcgcatttcgtcctgccatgcctgtgccgacaccggtatggtaaaggggctctcttcaagtttcagcgccgggttgggggtgtgaaaattcagtaagggaggaatttgcccgcgactgactgccagaacggttttcagcagtccggcaatgcccgccgcggtatccagatggcccatgttacttttcacggaaccgagcgcacagcgctgatcctgcgggcgaggcgcatagacgttgcgtaacgcttcaatttcaatcgcgtcgcccagcggtgtgccggtgccgtgggtttcaatgtaacctacctgcctgtcgtcgatggccgccagcattaacgcctcttcgatgactgcctgttgccctgcgacggaaggggcggtatagccgacctttctgttgccgtcgttgttgaccgcgctggagaggatcaccgagataatcggatcgcctgacagcagcgcgtctctcaggcgacgcagcaccacgcagccgagaccgttaccggcccaggtgccctcagccgaggcgtcaaagggacgacagtgaccatcaggagagaaaatcattccgggctggtagcggtagcctgcctgctgggggaaagagagcgccacgccgccggcaaccgccatatcggattcgcctgcgcgcaggctttcacaggccagatgcacggcaaccagcgagctggagcaggcggtctgtaccgataacgccgggccgtgcaggttgagtttgtacgcggcgcgggtggcaatatagtctttatcattgcccatcagagattgcagaccttttacctgcgcgacttctgtcacgttcaatgcttcgcgaccggggtaggtactcatccgggaagaggcgaaaacgccggtcttatgggggacggcgccgggggcataaccggcatgttccagcgcatgccagaccgcctgcaaaaataggcgctgctgcgggtccatcgactccgcttcctgtcgcgaatagccaaacagggtggcgtcgaagcagtcggcgttgtctaacaccgtaccgatattgacataatgaggatcgtcaatgatggcggcatccagaccgacggccagaagctcttcgcgcgtaaagcgtcggctgcattcacgaccttccagcagattttgccagaacgtttcgccatccggcgattcaggaaaatggcaggcgtagccgataaccgcgacaggttcgcagtccgggtagtgttgagcgatcgatgcatcaatggaatctgctgtcggcgcagaagagaagcgcaagttatccataatcggtcccgtttcctaagattcacaaagtcaatggaacgccatgcgttcgcgatggcgttccggggaaaatcagtttgcttcgcgctatatccgccgctgacgacggcgaacagggcgaggtcgttttgttttctccaccgtggcgacgccggccagataatcggccagggcagcaggagaagggtgggtgaagaggtcaagcaacgtcagggtggaaaattcgtgacgttgtaacaaaacgtgcagttgcaccagattcagcgacgttgcgcccgcctcaaagaagttttctgcgggcgtgacagactcgccaaccacctcgcggaaggcgtcgcaaatcaggctgacggtgctctcgtccgccgcaatgtgtggctgagattgctcagggcatacgcgcggtgagcgctctgcgcattgccctgcgtgtttaacgggaggcaccagcgcggcgagcggcagttgccagccgctttcatcctcggccattcggtttagcaatgcgcaatactgttcaaactggcgctccacctgcccggcaggaaacagcgcggcgacaaaatcccagttaaagcgcagttcgccttcggattcataaatctggtgatcgagccagacctgcggcgtctgggagatgccccagaccggtttgagcagattacgccgggcgaggaagttatcctgctcaaagcccagcgcgctggtaaagacgacgggcatcggaacggcaggcacgttttgctgttgcgccagttgacgcatcacgcggatggctgacacatcgcggtggttgaggttctggctcagccgctgctgtagtgactgcgcgctgtgcagccagctttcgccgggatgccagctcagcagcatcagcgaggtgaaatcgcccagaatctggttgatttgcgggtgcagcggtcgcctgtcgaaaagcgtaaggttaagcgtgaactcaggctgtgcactccatgcagagagaaccgttgaccacaccgacaacagtacggccgacggggtgagatgggcgtcagccgcccgttttttcagccgatgccagcgcgtgctgtccagcgcgccgttcaggcgggcgaagcgcggtgtttcaacctcctgaggcaagcagcgcagcggcaacgcaggcgccggaggaatatcatcaagctgcgcctgccaccatgccagagaatctggattgggcgactgtagcgagggttgttgcagataatccctgaaggtgacgggcagcggcggaagcagctgttgcgggtagcggtagccgtgctccagctccgccagcaggatctgcatgctcagaccgtcaagcaacaggttatccagacacagccacaggcgggcaggcatcccgtccacgtatccgacctggagatcgaataccggccacacttcggggttgagtacctgatgcgccagtttttcgcgcacccgcaacgcctcttcaggcgtatggagggtgtgtgcgggtatcacccaggggggcgtctgttcgagcacctgttgctgtccatcacgcacgatggcgcgcagcatatcgtggcgggcgattaatcggttccagaccgtctccagccgggtgaggtccagatcggcaatttcaaattcaacaaagaaatgtgagccgacgccgcccagggcaaagcccggctgacgccccaccaggtaagcctgctgcacgtcggtaagcgcaaagggctggtagcgatcttcaggggagtggacgaatggttgttcgaccgggacgtcggttttccgcagcgtggcggcaaaatccgccagccggggatgattaaacaggtcgcttaattgcgcttcataacctgcctgatgaagttgcccggtcagacgggtcgccagcaggctatcgccgccttgctggaagaagtcggtttctctggtgacattgccagttgataagagttgctgccagagggcggcaacctgtttttcaatgtcgccctggggtaaatccgcttcggccgggttttccgcttcaggggtatgacgacgcttcagcgcctggtagtcaattttcccattagccgtcagcggtaaggcgtcgaggaagacgatccgttgcggcaccatccaccccggcagacgtccagcgagggcggcctgaagttgacggggatcgcggcgcacctgcctgtcaggacattgtacgaggaagcgttgtaaccccgcgacctcatcgccatgctgacagttgaaggcggccgcgctaaataatgccgcccagtcggcgctgttatgcagcaaggcctccggctgcccattggttaacaggagcgtgctgagcagggcggacggcgttaactggcgaaactccatcacgtagagcagcgcgccgggaacggcaagctgttgtaatgtcgcaaggagcccgggatcttccggcagcagacgatgcagggcgttattaagccagataatgtccgccgagtgagcgtgcgccgccagcgtgtctgcattccagagggacagacgggcgccaggccagggggcgagcctctgccgggcgctcagcagcatctcctggctctgctcaagcccgacatactcaatctgtccggcgttgagctgtgctaacagcgattctgcggcgcggccagtgcgggttcccacctcaagcaggcgtatcgggcgctgtaagcgctgtgcaagctgttggcaaattgtcgccagttcctgaatatacggggcgctggccggatggttaaaggccaggctttccggcgaccactgcgcgtcgttcagtaacgacagttcgttacgggcaccgcgaagaatttgcgataacgttaaatcatgtccgctgaagtgcgggtgctcatcctcgcgttcttcaccagcgcagacctgataaccttcagcagcgggcttcagtcgccgttgtgtcaccagaaatgctaaccagcgttccaccacggcctgccagcgcggctggatagcgagtgagttcatcagggggagaggatcggcgccagcggtgtgacccggcttcagttttagcaggcgatgctgaaggaaatcggctacctgttctgcggagatctctggcgagatggcgcaacagggcaacgttcccgcaagcgtgtgccacgcctgcggcagtgccgggttccgatgatcggtaacgcaaaaagcctcgccctgaggaacaacgtatgccgccagcgttttttctttttcgccgatcgccagaacggttgcttgtttcacccccgccagctggctgagcgcgctttcgatttcgcccagctcgatgcgatatcctccgactttgacctgcttgtcgcgacgaccgaggaactcgattgtgccatctggccagtagcagccgagatcgccggtgcgataccagcgctcgtccgggagcgtcaaaaattgctgctcgctacgcaggggatcgttgaaatagccttccgcgaccccaatgccgccaatccataattcacccggcacccagtcagggcagtcccggccctgttcatccaccacccggtagcgttggttggttagcggaaaaccgtaagggatggagcgccagtgggcggggacgtcgtgaatttcgcaggcgttagaccagatagacgcctcggtggcaccgcccatcgcgataaattgtccttgtggccggaaggcccgataacgggcggggaggtcaagcccgatccagtcgccggaaagcatcactgcgcgcaggttttccggcgtggcgtcggcgaaaccttcacaccaggtcagcagcatatcgaacagcgccgggacgctgttccagagcgtgacctgatggcgctggatcagctcacaccatgcgtgaggatcgcgccgttgattttccatcaccatcaccagcgcgccgcccgcgcgcagtacgccaaaaatgtcgtaaaccgataaatcaaaatgtagggcggagagggccagcaccctgtcatgcgggccaacctgatagcgggtattgatatcgcaacaggtgttaagcgctccccggtgagaaatgactacccctttcggcgtaccggtagagccggaggtgtagataatgtaggccggttgcgtgggggcgcgtactaccgggttggcgatcggctccgcctcaatggcctgctgccaggcaaggacgggaatatcgtctgacccggcgctggcgtcgtgctgacaaatgagcaccagccggacgctggcgtcagcgtagattttctcgcgccgtgcggcaggctgatccagcgaaaccggaacgtaaaccgccccagccagcaggacggccagaaccgcaacaagttgtcctgcgcctttcgacatcgtgatagccacattatcgccgggctgaaccccgcactcgattaacctgcccgcgcaacggcgggcatagtctgtcagctcatgataattccactgataacgcatgtccgttaccgccagcgcctgcggctgttgcagagcgatacggaaaatgccttcatgcagcaagccttcgggaatgggggcgccggtggcgttgacccgttcgcgtatcgcgcgctggctggcgggcatcatatctgcgaacggcttttgccaggcgctttcgtcatcgcagagttggttaatcaactggcagtaggcgtcgaacaatgtttcgactaacgccggagggaacagcgcgtcgttgctgtcccattgtagccagacctcgccgtgatgctcgaacgccagatgatctatccagacctgcggcgtttgcgagatgccccattccggctcgcccaacggcgattctgcgcggctgctgtagagagaacgccccagattgctggtaaataccaccggggcgccgtgggggtagcgctgctggcgtttgagttcacggagtaattcgacgccggaccagtggcgatgctcccagtcctccgtaaacgtgagctggtttttacgcgccaggttgctgacggtatcgccatcgcaggcggtatccagcagaagaatattggtgaagtcggcaagcatcgcgccaaccgccgggtgcagcggctggcggtcgaataaggtgatgttaagcagcagacgcgtcaggccgccccagcgagccagcacggcagaaaaacaggtcgccagcgccattgtcggcgtcacgccatactcgccggcccggttgctaaaggcgtgccagcgtgttgccgggacaatcatgcggcgtcgggtattacggacttcacgtagcgtggcgggttcgcaggccagcggcaagacgggcgcggggggaagcgtcgatgctttcgccagccagtaagcgcgcgcgtcgtctctcagtggttgattgatcttctgctggtgcagcaaatacgagcggaaatcatagcgggtgtcgatagccggcagcgattctccggccagcagggcgttaagctcatcgaagaaaagcgtaaagctggaggcatccataatcagcaggtcaatattgacatggaggcggtggtgattgtccggcaagagcgtcagctgaaaatcaaacgtttcgccgatttccacgcgtaaaagacggtggctcaggcgctggcgcagtgcgtccagataggcctggcggctttcagcgtcgttatggcgtaaatcatgaacggtgacgccgttccagtaaggttgcggtagccagacctgctgcccgtcggggcgaaaggcgatatgcagcattgggtggcgttgcagcaaggtcgtgatggcctgctccagctgcgacgccgtcagacaatggccttcaaactcctgatacaggtggcaacccacgccgccaagcgtctgccccggcatgcggcccgtcaggtaggcgtgctgtactggcgtcaatgggaagggggtactttcggtcatgttcggccaggatgattcgtcgggcggcgtttcttcttccgcgttctccggcgaccggctgagcattaactggttccatgccgccagcgtgggggcggcatacagctcgcgaagggtaaggcggtagccatttttacgaaaccagtgtaaccatctcatcaatcttatggaatccaggccggcctggatcaggttgctctcttcatgtaactgctgcggcgttaaattcagttcctgtatgagccgctcgcgtaattgttggtaatcagccgcgtggcggttgtccggtaacagcgaatcctgagatggtgcgccagaaatcattcttcctcctgatggcacgtcttaccgaaaagcattactcatatgataataataattattaacaattggatgctacccgaaacgggtttatttatgcccgtttcgggttggtaacaggcggaaagaacagaggcccggatgaggtatccgggcctctgtcagggaggagtttaggggggcgcgaccccggttacatcccgcgtttaaaggtcgaaggagttacgccaaactgtttctggaaggcggcagagaaatggctggcgttggcatagcccagatcggccgccaccgtcatgacggaggtattgccgttggccaggcgtcttctggcttcctgcattcgttcagcctgaaacaggccatagacgctgttgttgaacagaacgcggaagcctcgcttaattttgagaacgctcagaccggactctctggccagctccgcgacgcccggcgcttgcgtcagatcagccagcagcagatccttcgcccgcagcagtttctggcgttccatcgggttgaagtggcaggagaggcaactggcgtcttcgcgatgttcatccagcaccaggctgagcatgaccagactttgcccctgcaaccatagcgtcgacggcttttgttcatgactgaagccgccgtgcatgcgcatcagcgcgtgacgcaaggcctgagccgttaagtgggtttcagcattacaacgctgctgctggcaacagcagtgggagtcgatcttattcttaatgaccgcgctaatatccggcacccacagcgcgagggtttcagggctgaaggagagggtaatgctctcgaatcggccacaataggaggcgctgccgcgacagtctggcgtatgggtaatgtaatggcgattgcgcgcaagctcccagtcggtgtggcgccggagtccctgaatcgcaaagcgcgatgtgccttccaggatgcacgagaagttaatcctgccctgcaacgtctctggccgcgcaaaatggcccctccagagcaaaatatccataccttcctgcaacgaacagcgcagcagttcacactgagcaggaatattgccatcgtttgcaggtttcccgaccaccaactggtgaatagagatttcagattgcgtttgcggtgactccgtcatgacctggttatctccctgtggcttagaccaatgcgggtataaatagaaccgaatggggtagatgagttattgataatggttattattcacattaattctcagaacgccaccctgaattgtcgtttttggcgtccgtaaaaattcatcaggaaattcagttactcccatgtcatctcaatcatccaatactgaatcgctgtcccgatttcctctctggcaggtgattacaccggttcgcaggaaggttattttagctatggcgctggcggggctggcggcattaaccagcctgggggcgctcctttttctggcgtggagcctgcgtgacattcgcgcgacgcctgacgctattccggcctggccgctgggcggcgtgatcggctgcgtggtcttaacttttgttctgcgcttacaggcgttcaacacctctcattacgcggcttttcatctggagaacattctgcgcagcaggttagcccgtaaagcattgcagcttccgcctggcgtgttacagcaaatgggcagcgggtcagtggcgaaagtgatgctggatgacgtgaagtcgttacatatttttgtggccgacagcacgccgctctatgcccgcgcgatcatcatgccgctggcgacaatcgttatcttgttctggctggactggcggctggcaatcgcgacgctgggggtactggcgtttggatcggttgttctcgtgctcgcccgccagcgttcggaaaatatggctcagcgttatcataaggcgcgcgagcaggttagcgcggcggttattgagttcgtgcaggccatgcccgtggtgagaacgtttgatagcggcagcaccagttttttgcgctatcaacgcgcccttgaagagtgggtcgatgtgctcaaaacctggtatcgcaaagccggtttttcagcgcgtttttccttctcgattctgaatcctctcccgaccctgtttgtcctgatctggtcgggatacggcctgttgcactatggcagtttcgattttatcgcgtgggtggccgttttactgctgggcagcggaatggccgaagccgtaatgccaatgatgatgctcaataacctggtcgcgcaaacgcgtttaagcattcagcgtatttatcaggttctcgcgatgccggagttatcgctgccgcagtctgaccagcagccgcaagaggcgagcattacctttgagcaggtgagctttcattatccgcaagcgcgtactggcgccgcgttgcaggaggtgagctttcatgtgcctgccgggcaaattgtggcgctggtcgggccaagcggcgccggaaaaagcaccgtggcgcgcttgctgctgcgttacgccgacccggacaaaggccatatccgtattggcggcgtggatctgcgtgatatgcagacggacaccctgatgaagcaactctcgtttgtgtttcaggacaacttcctttttgccgacacgatagccaataacattcgtctgggcgcgccggatacgccgctggaggcggttatagcggcggccagagtggcgcaggcccatgattttattagcgctctgccagaaggttacaacactcgagtcggggaacgtggggtatttctctccggcggccagcggcagcgcattactatcgcccgggcgcttttgcaggatcgccccatcctggtgctcgatgaggcgacggcgtttgctgacccggaaaacgaagcggcgcttatcaaggcgctcgcggcggccatgcgtggccggacggtcatcatggtcgcgcatcgtctctcaatggtgactcaggccgatgtgatattgctgttttccgacggacagctcagggaaatggggaaccatacgcaactgttggcgcagggcggcctgtatcaacggctctggcaacactatcagcaggcgcagcattgggtgccgggtggaacacaggaagaggtgatggaaaatgaaagacaataatcctgcggataacctggcctggcgcgtcatctggcgccagcttatctccagcgttggcagtcaggccaggatgctgcgacgcagtatgctggcgctgttgctggcggcattcatgcaggggatcgcctttgcctgtctttatccgatcattgatacgctgttacggggagacgcgccgcaacttcttaactgggctatggccttcagcgtcgccgcaattgtgacgctggtgctacgctggtatggcctgggctttgaataccgtggtcatctggcgcaggctacccatgagttgcgcctgcgacttggcgagcagttacgccgcgtgccgctggagaagctccagcgcggcagggcgggtgaaatgaacgccttgctgctgggcagcgtggatgaaaacctcaattatgttattgcgatagccaatattttgctgctcaccattgtcacgccgctgacggcgtcgctggcgacattgtggatagactggcggctggggctggtgatgttgctgatcttccctctgctggtgccgttttattactggcgccgcccggcgatgcggcgacaaatgcagacgctgggggaagcgcaccagcgtctgagcggcgatatcgttgaatttgctcaggggatgatggtattgcgcacctgcggcagcgatgccgataaaagccgggcgctgctggcgcatttcaatgcgctggaaaacttacagacccgcactcaccgtcagggcgctggcgcgacgatgctgatcgccagcgtcgtggagttgggcctacaggtggtggtgttatccgggatcgtctgggtagtgacgggcactctgaacctcgcctttttgattgccgccgtcgcgatgattatgcgcttcgcagaaccgatggcgatgtttatcagctacacctcggttgtggaactgatcgccagcgccctgcaacggattgagcagtttatggcgatagcaccgcttcccgtcgcagagcaaagcgagatgccggaacgttacgatatccgctttgacaacgtcagctatcgctacgaagaaggtgacggccacgcgcttaatcatgtttctttgacgttcccggcagccagtatgagcgcgctggtgggtgcctccggcgcaggcaaaactacggtcaccaaactgttaatgcgctatgccgatccgcagcaagggcagatttctattggcggcgtcgatattcgccgcctgacgccggaacagctcaatagcctgatttctgttgttttccaggatgtctggctgtttgatgacacgctgctggcgaatatccgtatcgcgcgcccacaggcgacgcggcaggaggtagaagaggccgcccgcgcggcgcagtgccttgagtttatttcccgtcttccgcaaggctggctgacgccaatgggagagatgggcggccagctatcgggcggcgagcgccagcggatttccattgccagagcgttattgaaaaacgcgccggtcgtcattctcgatgaaccgactgccgcgctggatattgaaagcgagctggcggtgcaaaaagcgatcgataacctggttcacaaccggacggtgattatcatcgctcaccgtttatccaccatcgccggggccggaaacattctggtgatggaagagggacaggtggttgagcagggtactcatgcgcaattgctctcacatcatggacgttatcaggcgctgtggcaggcgcaaatggccgcgcgcgtgtggcgcgacgacgggggttccgcgtctggagagtgggtgcatgagtgatgttcagtcgaatgtgaaacctctgacgttgacgaccgggcgggtgatttttgctattgccggcgtctatgtgacgcagagtctggtatcggcgctgtctatgcagtccttacccgcgctggtgcgcgctgctggcggttcgctggcgcttgccggtgcgacaaccctgtttatgctgccctgggcgctgaagtttatttgggcgccgtggatcgagcgctggcggcttccgcccggtagccaggaacgccgttcccgcatgttaatcctgcgtggtcaggtcgcgctagcggcgatcctgactattgccgcagcgattggctggtttgggcgagaagggggattccccgatacgcaaatcgtcgcgttatttgttctgtttatggtggcaggcacggtcgcctccaccattgatatcgccagcgacggcttttgtgtcgatcaactgacccgcacgggttacggctggggaaacagcgtgcaggtcggcggcagctatctgggaatgatgtgcggcggcggggtgttcctgatgctgtcggcggcatccggctggcctgtcgccatgctgatgatggcggtgctgattatggcgctgtcactcccgctgtggcgcattacggagccgacgcgaacagcgactatcccgcatgttccggcgttaggttatgcgctaaggaggaagcaggcgcgcctgggcttactgctggtattgatgctgaattcaggcatgcggtttgtgctgcctcttctggcaccgctgttgttggatcatgggttgagcatgtccgcattgggcgcgctgttcagcggcggcaatattgcagcgggcatagcaggaacgctggccggcggattgctgatgaaatacacctcacccggcagagcgctgttgacggcttatggcgtccaggggatcgcgctgctggcggtggtgatgacgctcatgatggcgccgggtcatctgctgctgcagattctccagtgtctggtcattgtccagtccatttcgctggcctgcgcgctggtctgtctttacgccacgctgatgtcgctttcatcgcctttgcaggccggtgtcgacttcaccctctttcaatgtactgacgcggcaatcgccattctggctggcgttatcggtggcgttgttgctcaacattttggctatgcggcctgcttcctgtttgccggggcattcacgttgctggcggcgtgggttgcttatatccggctgcattcggcaagagaactgatgacaagcgcaattgattgatccgggaataacacagagaggtaagggatgaaaatcagtgaatttctacatctggcgttaccagaggaacaatggctaccgacgatttctggcgttttacgccagttcgcagaagaagagtgttatgtctatgagcgtcaaccctgttggtatttaggcaaagggtgccaggcacggctgcacattaatgccgacggaacgcaggcgacatttattgatgatgctggggagcaaaaatgggcggtggattccattgccgactgcgcgcgtcgttttatggcgcatcctcaggtgaaaggacgtcgggtatatggacaggttgggttcaactttgcggcgcatgcgcgggggattgcctttaacgccggggagtggccgctgctgacgttaaccgttccccgtgaagaacttatttttgaaaagggaaatgtcaccgtttatgcggactccgccgacgggtgccgacgtttgtgcgagtgggtaaaagaggccggtacaacgacgcagaacgcaccactggcggtggataccgccctcaatggtgaggcatataaacaacaggttgcgcgcgccgttgcggagatccgccgtggcgagtatgtcaaagtgattgtctcgcgcgccattcccctgccatcgcggattgatatgcccgccacgctgttatacgggcggcaggcaaacacgcctgtgcgctcgtttatgttccgtcaggaaggacgcgaagcgctgggctttagcccggaactggtgatgtcagtgacgggcaataaagtggtcactgaaccgcttgcgggcacccgcgatcgcatgggaaacccggagcataataaggcgaaagaggcagaactgctgcacgacagtaaagaggtgcttgagcatatcctttctgtcaaagaagctattgctgaactggaggctgtttgccagccgggcagcgtggtggttgaagatttaatgtcggttcgccagcgcggcagcgttcagcatctggggtctggcgtgagcggtcagcttgcggaaaacaaggatgcctgggatgcgtttaccgtgctgtttccgtcgattaccgcctcaggtatccctaaaaacgctgccctgaacgcgattatgcaaattgagaagacgccgcgagagctttattccggcgcaatcctgctgctggacgatacgcgctttgatgcggcgctagttctgcgttccgtatttcaggatagccagcgctgctggatacaggcgggggcgggaatcatcgcgcaatctacgccggaacgcgaactgacagaaacccgggagaaattagcgagcattgcgccctatttaatggtgtaggagtaactgttttctaacctcacaaccagactgtccaaagacaattgagtcgctctttgattcctctgtgactctattgtcttcttttgggataaaataggtgtttttcgtcatgaagttgataaaagtctatatagaaccacctcctgtggaggtggtggtaatttgccatagtgtgggattcgttagtatactatgggataaacttatttttaccaattgtataaggcggtgcataagattctcggcatgcttccagataatccgaccaccactgcatcatcgctttgcgggcttccaggtgctctgccttatgaatataagccatgcgcacggtattgcgctcctgatgactcatctggcgttctactgcgtcctttgcccataaacccgattccatcagcgcactgcatgccattgcccggaagccgtgaccgcagatatcctttttcgtgtcgtaacccatcacccgcagtgccttattgaccgtgttttcacacattggcttatacgggttatggtcgccggggaagatcagttcattattaccggtgatatccttaatctgtttcagaatggcgatggactgttctgagagggggacgatatgcggcattcgcatttttgccccgcggccggaataatgcacgccaataatgggttctcgcgtcgcgggtatcgtccagactcggtttgtgaaatcaatctctgaccagcgggcgaaacgcagttcactggagcgaatgaacacatgcagcatcagcagaacggcatgccgggtcagttcacggccctgatgatatgccccaatacgttcaagcagttcaggcagccgctccagcggcagggcaggatagtgccgtctgacaggaggtgtggtcacgccgccaaggtttgctgcagggttcgtatcgattaactcctgatggaccgcatggcgtattatgttactcaggtgctgccgtgtgcgggacgcaacctccagcagacctttttcctcgatccctttctgcaggtcaatgaaatgacggggtttaagttctgatacaggtaggttcccgatgaccggaaagatgtgattgttcaggctggcaagcagacggtcggcggtgttctgcgaccatttcctgttacttttatgccatgccagcgccacgtttttaaaaactttctccggtgttcgtgagccacgtacagcagcccgctgctgtaccgggttgatattcagcgccagcattttacggataccttcacgttgctgtcgcgcatcagacagggagatggctggataggcacccagcgcaatgcgggattctttaccgctaatacggtatttgagataccagtggcgggagccacccggcttgacccgcagatacagaccgtgagaatcggagactttaaagggtttatcagaaggcttgagggtgcggatttttgcgtcggtaagggatatatgggggtcactccattatcgaactaacctgaccccagatttgaccaccaatttttcccgatgcgtagggtaaaatcaaaatgcaccgagaagagttttcacactaacctgttgaatcaacatcagataaagattcgcaaggatgcaagaaaacagaaaattggctcctctgactggactcgaaccagtgacatacggattaacagtccgccgttctaccgactgaactacagaggaatcgtgagaacggggcgcatattacttagcggtaccttgtctgtcaacactaaatttcataagccatttcaattggttaattaatctgcaaagttgttaattaatgaacattcgtcgccgaaaacgagtctgtatcattagcgtgatgcagtctctgcaaaggatcttgttgataaaattgacagaaacgttgccacaatgaagggaaacgaggagcaaaaagttctggggcgctaaagaaatattcagaaagtacggcaaaacattcagcaggatcactggcagcataagcatcaatgctcgccgcattctcaccaactaattcgatttcttcctgaatgttgttcattgcagcatgaagatcgtgttcccagccagcaacctcacgcaacgaaataaagggaactccgctggcgcgatcgccgttacgggtgtccagcttatgagcgacttcatgaataatcaggttaaaaccagaagcatcaaaagaatcttgtatatccaaccagttcaaaacgataggcccttgctgccagctctgacctgactgaacaatacgttggttatgcaccagaccgatatcgtcttcccattcatcatcgaccacaaatggcgcaggataaattaagacttcatgaaaaccatccagccattccagtcctaactccagaacgggcaggcaaaatagaagtgctatccggcagcttcttaatgaattcagctcaaagccctgtaaaggaacaagccgtttttgctgtaaaaaacgttcggcaagagcgaccaatttgctttgttcctgttctgtcagacacgttaaaagggggatcgatagtgcttcctgccagggaagggcagtttgatgtgctgattcttgtactttccagggccacttaatcatcgttttgctcgcaaactcgtcacttgaacaaaattgcacggacagggactgttaaaatgccaaatttcctggcatcatggcaaccatctgaacggagagatgccggagcggctgaacggaccggtctcgaaaaccggagtaggggcaactctaccgggggttcaaatccccctctctccgccactttatcaatgacttatctcccgacttcccgccttgcttttcctaaacagaacaatcgtagaatattcttgaagggttagatcgtcactgttttctgttcgatactgtgacattcagcacttgattcgctatggatctgacaggaaggttttgagcgaaaatttgcagttattcagttgttttcttatcggtcaccattattcttttagacattgatcctacaaagctgccgcaaagttggtggtgggaactgaagttgcgtagagaaggggtcaatacccggaggcaaacatgggctggcaaaagtgtagcggtattaggcgcagctatttagcctagttatgttttatgaaaacttgatatcatataagtgtcttacttattggctgtaaataagtttttcctaaggaattgtttcttgagtatcatttgtaactgtaacggaatttataatcctttgctttattgttacggtattttttatcacaccctattttttatgtggttttttatactgaagtttggcaaagtgaactttatatgcatatacttcatcctggtttcagttaagttgggtggatgatatggcaactacatgttcagttatattgattttggagtcctttgatgtttatttcggaaaagagagtgtgtttctggagagaggttcatctgtacttgtcgactctagctctagagattttttcctgacatatcctgaaagagtgatagtggcggattttggcgctgagtttattagtcgctatttgaaagctaataacttaagggatatttctgattgtagggaatatccatcttatttaaaaataaactttgctgacttcagtttaattaaaggattaattagttgggctaatcactgtgctgaatacatagaaatttttgatgagtctattgcttttacatgtctctctgcattttcttctgaaaaacaatttggagtatttctgtttgaatgtttgaaaagcacaggggctaaagttaaaacgattattcatacggatttatctgcaccatggcgtcttaaggatatatcatcaagattatatctcagcgaaagtttactaaagaggaaattgaaagaagagggggtatcattcagtaagatcatacttgatgagaggatgcaaatggctgaatatttactcagcactcgttgttatcctattagtaaagtagctaaggtctgtggttatgccagtgtttcatactttacttatgtatttagacgttattttggtgtttctccaagtcaatactctcagagcagttcagaaagtaaaattcttactcaccagggaatctgatcattgttcttgcccccttatttccagacagggggtgtatcttaagttaacgttacccgctgacgtcgatattctcgcggagagcgataacccaacgcactgtgcggatggttttcattgtaatgttcgatcgccactgcaagattatgcaatgccgttcttacattcggtttcggcatgaacgcgatgtagtcttccttcatcgttttcacgaacctttctgccattccattactctgaggactgctgattgccgttgtgcagggctccagattcaactctctggcgaactgccatgtttcatgcgctctatacgctgaaccgttatctgtcagccactggatggactgttccggtactttatcgccaaagcgtttttctatcgctcctaacatgacatcctgcactgtcgctttatcgtaacctcccgtgcttgcggcccagtctatggcttcacgatcgcaacagtccagggcgaacgtaacacgcagttttgaatcgccacgggtttaacagacacctcagagtcatttaagatggcttaaagagaggtgcccatgagcggtaagcgttatcccgaagagtttaaaactgaagcagtcaaacaggttgttgatcgcggttattctgttgccagcgttgcaacacgtctcgatatcaccacccacagcctttatgcctggataaagaagtacggtccggattactccactttttcatcaagccaatccgcccaccactgcatcatttctctgcgcttatcgaaatactgagcgtggttgtaaattcagctaacccagtgtgttgacaaaaaattagcgcaagaagacaaaaaaatcaccttgcgctaatgctctgttacaggtcactaataccatctaagtggttgattcatagtgactggatatgttgtgttttgtagcattatgtagtctattttttagactgaatcaattataagtcgttgatattaattgtttttaccgtttcacattcaacttttttatactaacttgagcgaaacgggaaggtaaaaagacaaaaagttgtttttaatacctttaagtgataccagatggcattgcgccatctggcagagtgattaactaaacatcgcagtaatcgaggcgcttgccagagagtggaaatgaacgttaaacccgaccatcgcgccgctggcaccttcatcgacatcaatacgttctatatccagcgcgtgaacggtaaaaatgtagcgatgagtttcgcctttcggcggtgctgcgccatcgtacccggttttaccaaagtcggtacgcgtctgcaaaacgccgtctggcattgctaccagaccagagccaaacccttgcggtaatacgcgggtatcagcgggtaagttaacaactacccagtgccaccagccggagccggttggcgcatccgggtcgtagcaggtgacaacaaaacttttcgttcccgcaggaacatcatcccacgccagatgcggtgaaatattatcgccatcgtaacccatgccgttaaagacatgacgatgcggcaatttatcgccatcgcgcagatcgttactgatgagtttcatgaaccctcctttcttgtttgcagaaagtgtagccagaaaccctcacgcggacttcccgttattggcaaaaaaatgtttcatcctgtaccgcgcggttaaccgctgcggtcagacgctgcaactgttgcgggagaataatatagggcggcatcaggtaaatcagtttgccaaaaggccggatccagacaccctgttcgacaaagaatttttgcagcgccgccatattcaccggacgagtggtttcgaccacaccgattgcccccagtacgcgcacatcggcaaccatttcggcatcacgggctggtgccagttgctcgcgcagctgcacttcaatagccgccacctgctgctgccattcgccggattcgataatcgccaggctggcgtttgctgccgcgcaggccagcggattgcccataaaagttggcccatgcataaagcagccggcttcgccgttactgatggtttctgcaacctcgcgcgtggtaagtgtggcggaaagggtcattgtgccgccggttaaggctttaccgaggcacaaaatgtccggcgcgatttctgcatattcacaggcaaacagtttgccggtacgaccaaatccggtggcgatctcgtcggcaatcagcaagataccttcgcgatcgcacattttgcggattcgttttaaccattccggatggtacatgcgcatcccgcctgcgccctggacaatcggctcaatgatcaccgccgcgatttcatgacgatgcgccgccatcaggcgggcaaagcccaccatatcgcgctcatcccattcgccatccatgcggctttgcggggcgggagcaaacaggttttctggcaggtagcctttccacagactgtgcattgagttatccggatcgcacaccgacatcgcgccaaaggtatcgccatgataaccattgcggaaggtcagaaaacgctggcgcgcttcgcctttggcttgccagtactgcaacgccattttcatcgccacttccaccgctacggaaccggagtccgcgagaaaaacgcactccagcggttgcggcgtcatcgccaccagtttgcggcacagctcaatggctggcgcatgggtgataccgccaaacatcacatgcgacatggcatcaatttgcgacttcatcgccgcattaagctgcgggtgattgtagccgtggatcgccgcccaccaggacgacataccgtcaaccaggcgtttgccgtcagacaaaatcagctcgcaaccttcggcgctcaccaccggataaaccggcagaggggaggtcatggatgtgtatgggtgccagatatggcgttggtcaaaggcaagatcgtccgttgtcataatcgacttgtaaaccaaattgaaaagatttaggtttacaagtctacaccgaattaacaacaaaaaacacgttttggagaagccccatggctcaccgcccacgctggacattgtcgcaagtcacagaattatttgaaaaaccgttgctggatctgctgtttgaagcgcagcaggtgcatcgccagcatttcgatcctcgtcaggtgcaggtcagcacgttgctgtcgattaagaccggagcttgtccggaagattgcaaatactgcccgcaaagctcgcgctacaaaaccgggctggaagccgagcggttgatggaagttgaacaggtgctggagtcggcgcgcaaagcgaaagcggcaggatcgacgcgcttctgtatgggcgcggcgtggaagaatccccacgaacgcgatatgccgtacctggaacaaatggtgcagggggtaaaagcgatggggctggaggcgtgtatgacgctgggcacgttgagtgaatctcaggcgcagcgcctcgcgaacgccgggctggattactacaaccacaacttggacacctcgccggagttttacggcaatatcatcaccacacgcacttatcaggaacgcctcgatacgctggaaaaagtgcgcgatgccgggatcaaggtctgttctggcggcattgtgggcttaggcgaaacggtaaaagatcgcgccggattattgctgcaactggcaaacctgccgacgccgccggaaagcgtgccaatcaacatgctggtgaaggtgaaaggcacgccgcttgccgataacgatgatgtcgatgcctttgattttattcgcaccattgcggtcgcgcggatcatgatgccaacctcttacgtgcgcctttctgccggacgcgagcagatgaacgaacagactcaggcgatgtgctttatggcaggcgcaaactcgattttctacggttgcaaactgctgaccacgccgaatccggaagaagataaagacctgcaactgttccgcaaactggggctaaatccgcagcaaactgccgtgctggcaggggataacgaacaacagcaacgtcttgaacaggcgctgatgaccccggacaccgacgaatattacaacgcggcagcattatgagctggcaggagaaaatcaacgcggcgctcgatgcgcggcgtgctgccgatgccctgcgtcgccgttatccggtggcgcaaggagccggacgctggctggtggcggatgatcgccagtatctgaacttttccagtaacgattatttaggtttaagccatcatccgcaaattatccgtgcctggcagcagggggcggagcaatttggcatcggtagcggcggctccggtcacgtcagcggttatagcgtggtgcatcaggcactggaagaagagctggccgagtggcttggctattcgcgggcactgctgtttatctctggtttcgccgctaatcaggcagttattgccgcgatgatggcgaaagaggaccgtattgctgccgaccggcttagccatgcctcattgctggaagctgccagtttaagcccgtcgcagcttcgccgttttgctcataacgatgtcactcatttggcgcgattgcttgcttccccctgtccggggcagcaaatggtggtgacagaaggcgtgttcagcatggacggcgatagtgcgccactggcggaaatccagcaggtaacgcaacagcacaatggctggttgatggtcgatgatgcccacggcacgggcgttatcggggagcaggggcgcggcagctgctggctgcaaaaggtaaaaccagaattgctggtagtgacttttggcaaaggatttggcgtcagcggggcagcggtgctttgctccagtacggtggcggattatctgctgcaattcgcccgccaccttatctacagcaccagtatgccgcccgctcaggcgcaggcattacgtgcgtcgctggcggtcattcgcagtgatgagggtgatgcacggcgcgaaaaactggcggcactcattacgcgttttcgtgccggagtacaggatttgccgtttacgcttgctgattcatgcagcgccatccagccattgattgtcggtgataacagccgtgcgttacaactggcagaaaaactgcgccagcaaggctgctgggtcacggcgattcgcccgccaaccgtacccgctggtactgcgcgactgcgcttaacgctaaccgctgcgcatgaaatgcaggatatcgaccgtctgctggaggtgctgcatggcaacggttaataaacaagccattgcagcggcatttggtcgggcagccgcacactatgagcaacatgcagatctacagcgccagagtgctgacgccttactggcaatgcttccacagcgtaaatacacccacgtactggacgcgggttgtggacctggctggatgagccgccactggcgggaacgtcacgcgcaggtgacggccttagatctctcgccgccaatgcttgttcaggcacgccagaaggatgccgcagaccattatctggcgggagatatcgaatccctgccgttagcgactgcgacgttcgatcttgcatggagcaatctcgcagtgcagtggtgcggtaatttatccacggcactccgcgagctgtatcgggtggtgcgccccaaaggcgtggtcgcgtttaccacgctggtgcagggatcgttacccgaactgcatcaggcgtggcaggcggtggacgagcgtccgcatgctaatcgctttttaccgccagatgaaatcgaacagtcgctgaacggcgtgcattatcaacatcatattcagcccatcacgctgtggtttgatgatgcgctcagtgccatgcgttcgctgaaaggcatcggtgctacgcatcttcatgaagggcgcgacccgcgaatattaacgcgttcgcaattgcagcgattgcaactggcctggccgcaacaacaggggcgatatcctctgacgtatcatctttttttgggagtgattgctcgtgagtaaacgttattttgtcaccggaacggataccgaagtggggaaaaccgtcgccagttgtgcacttttacaagccgcgaaggcagtaggttatcggacggcaggttataaaccggtcgcctctggcagcgaaaagaccccggaaggcttacgtaatagtgacgcgctggcgttacagcacaacagcagcctgcagctggattacgcaacggtaaatccttacaccttcgcagaacccacctcgccgcacatcatcagcgcgcaagagggcaggccgatagaatcattggtaatgagcgccggattacgcgcgcttgaacaacaggctgactgggtgttagtggaaggtgctggcggctggtttacgccgctttctgacactttcacttttgcagattgggtaacacaggaacaactgccggtgatactggtagttggtgtgaaactcggctgtattaatcacgcgatgttgactgcgcaggcaatacaacacgccggactgactctggcgggttgggtggcgaacgatgttacgcctccgggaaaacgtcacgctgaatatatgaccacgctcacccgcatgattcccgcgccgctgctgggagagatcccctggcttgcagaaaatccagaaaatgcggcaaccggaaagtacataaaccttgccttgttgtagctatcctgtatttggttaaattgcgagcgagatcgcgtcttcgattgactgcaatttaaccaattaaattctaaaataatcacgaaaaaaattttacttccgcctcatgcggcgaatgtgggaattgcccaggcggcgggggataggggctggagacagttatccactattcctgtggataaccatgtgtattag

SEQ ID NO: 186 - DNA, 39871 bp, Escherichia coli
  source 1..39871: mol_type = genomic DNA
caatgcaccatcaacaggtgtcaccgccgccccgagcacatcaaacccgacgctcatattggcactggaagccggggcataaactttaaccatgtcagactcctaacttccatgagagggtacgtagcagatcggcaaagacaccggcagctgtaacgtcattgcccgcaccatatccgcgcagcaccaacggcagcggctgataatagtggctataaaaggccagggcgttttcgccatttttcactttgaacagcggatcattaccatccacttcggcaatcttcacgcggcaggcaccatcttcatcaatattgccaacatagcgcaaaacttttccttcatcacgggccttcgccacgcgcgcggcaaagagatcgtcgagctgtgacagattcgccataaaagcggcaacatcaccctcagcgttaaactctgcgggcagcacaggttcaatttcaatatccgccagctccagttcacgtcccgtttcacgagcgagaatcaatagcttacgcgctacatccataccagaaagatcatctcgcggatccggttcggtataacccatttcccgcgccagagtagtcgcctcggagaaactcatgccttcgtctaacttgccgaagatataagaaagcgaacctgaaagaatgccggagaacttcatcaattcatcaccagcattgagcagattttgcaggttctcaataaccggtaatccagccccaacgttggtgtcatagaggaatttacgccgcgatttttccgccgcatgacgcaacagatggtagtaatccatcgacgaggtgttggcctttttgttcggcgtgacaacgtggaaaccttcgcgcaagcagtcggcatattgatccgccactgcttggctggaggtgcagtcaacaatgaccgggttcagcagatgatattctttcacgaggcgaattaagcgcccgagattaaacggctctttggcttgcgccagttcttcctgccagttttccagatttaggccatgcacattggtgagcagtgccttcgagttggcaacaccgcagacacgtaagtcgatatgtttattcttcagccagctttgttgacgcttcagttgctccagcagcgcaccgccaacgccaccgacgccaatcacaaacacttcgataacctgatcggtattgaacagcatctgatgagtaacgcgcacgccagtggtcgcatcatcgttatttaccacgacagagattgagcgttcagaagatccctgagcaatggcgacaatgttgatattggcgcgggccagcgcggcaaagaatttcgccgagatcccacgcaaggtgcgcataccatcacnnnnnnnnnnaatggccagccgttccgtcaccgccagcggctccagtaagccttctttcagttccaggtagaactcttcctgcattgcccgttcagcccgcacacagtcgctttgcggaacgcagaaactgatactgtattcggaagatgattgcgtaatcagcaccacggaaatacgggcgcgtgacatcgcggcaaagacgcgcgccgccatgccgaccatccctttcattcccggaccagaaacgctgaacattgccatgttattcagattggaaatgcccttgaccggtaattcgtcttcatcacggctggcaccaatgagcgtacctggtgcttgaggatttccggtatttttaatcaggcaagggatctggaactgggcgatgggggtaatggtgcgggggtgaagaactttagcgccgaagtaggaaagctccatcgcttcctggtaggacatcgacttcaacaacctcgcatcgggcacctgacgcgggtcgcaggtatagaccccgtcaacgtccgtccaaatctcgcaacaatcggcgcgtaaacaggcagccagcaccgccgcggagtagtcggaaccgttgcgtccaagtaccaccagttcgcctttttcattaccggcggtgaagcctgccatcagcaccatgtgatcagccggaatacgacttgccgcaatacggcgggtggactcagcaatatcgacggtagattcgaggtaatgccccactgccagtagtttttcgaccggatcgataacggtaacgttgtgaccacgcgcttctaacacgccggccataatggcgatcgacattttctcgccacggcaaatcagcgcagcgttgatgctatccgggcactgccccaacaaactaatgccatgcaggacatgttttatttgggcaaattcctggtcgacgaaagatttcagttgcgccagcgggaatcccggctgggcggcggtgagtcccgtcagaagttcggcaaaaatacgttcggcatcgctgatattgggtaaagcatcctggccgctaatggttttttcaatcatcgccaccaggtggttggtgattttggcgggggcagagaggacggtggccacctgcccctgcctggcattgctttccagaatatcggcaacccgcagaaaacgttctgcatttgccactgatgtaccgccgaacttcaacactcgcatggttgttacctcgttacctttggtcgaaaaaaaagcccgcactgtcaggtgcgggcttttttctgtgtttcctgtacgcgtcagcccgcaccgttacctgtggtaatggtgatggtggtggtaatggtggtgctaatgcgtttcatggatgttgtgtactctgtaatttttatctgtctgtgcgctatgcctatattggttaaagtatttagtgacctaagtcaataaaattttaatttactcacggcaggtaaccagttcagaagctgctatcagacactctttttttaatccacacagagacatattgcccgttgcagtcagaatgaaaagctgaaaaatacttactaaggcgttttttatttggtgatatttttttcaatatcatgcagcaaacggtgcaacattgccgtgtctcgttgctctaaaagccccaggcgttgttgtaaccagtcgaccagttttatgtcatctgccactgccagagtcgtcagcaatgccatggctcgttcgcgtaaagcttgcagttgatgttggtctgccgttgtgtcacttttcgccggttgttgtattaatgttgctaattgatagcaatagaccatcaccgcctgccccagattgagcgaaggataatctgccaccatcggcacaccagtaagaacgtcagccaacgctaactcttcgttagtcagcccggaatcttcgcgaccaaacaccagcgcggcatggctcatccatgaagatttttcctctaacagcggtaccagttctactggcgtagcgtagtaatgatatttcgcccgactgcgcgcagtggtggcgacagtgaaatcgacatcgtgtaacgattcagccagtgtcgggaaaactttaatattatcaataacatcaccagatccatgtgcgacccagcgggtggctggctccaggtgtgcctgactatcgacaatccgcagttcgctaaaacccatcgttttcattgcccgcgccgctgccccaatattttctgctctggcgggtgcgaccagaataatcgttatacgcatattgccactcttcttgaccaaataaccgcgaacagggtgatcactgtcaacttattacgcggtgcgaatttacaaatccttaacgtaagtcgcagaaaaagccctttacttagcttaaaaaaggctaaactatttcctgactgtactaacggttgaattgttaaaaaatgctacatatccttctgtttacttaggataattttataaaaaataaatctcgacaattggattcaccacgtttattagttgtatgatgcaactagttggattattaaaataatgtgacgaaagctagcatttagatacgatgatttcatcaaactgttaacgtgctacaattgaacttgatatatgtcaacgaagcgtagttttattgggtgtccggcccctcttagcctgttatgttgctgttaaaatggttaggatgacagccgtttttgacactgtcgggtcctgagggaaagtacccacgaccaagctaatgatgttgttgacgttgatggaaagtgcatcaagaacgcaattacgtactttagtcatgttacgccgatcatgttaatttgcagcatgcatcaggcaggtcagggacttttgtacttcctgtttcgatttagttggcaatttaggtagcaaacatgcagaccccgcacattcttatcgttgaagacgagttggtaacacgcaacacgttgaaaagtattttcgaagcggaaggctatgatgttttcgaagcgacagatggcgcggaaatgcatcagatcctctctgaatatgacatcaacctggtgatcatggatatcaatctgccgggtaagaacggtcttctgttagcgcgtgaactgcgcgagcaggcgaatgttgcgttgatgttcctgactggccgtgacaacgaagtcgataaaattctcggcctcgaaatcggtgcagatgactacatcaccaaaccgttcaacccgcgtgaactgactattcgtgcacgcaacctgctgtcccgtaccatgaatctgggtactgtcagcgaagaacgtcgtagcgttgaaagctacaagttcaatggttgggaactggacatcaacagccgttcgttgatcggccctgatggcgagcagtacaagctgccgcgcagcgagttccgcgccatgcttcacttctgtgaaaacccaggcaaaattcagtcccgtgctgaactgctgaagaaaatgaccggccgtgagctgaaaccgcacgaccgtactgtagacgtgacgatccgccgtattcgtaaacatttcgaatctacgccggatacgccggaaatcatcgccaccattcacggtgaaggttatcgcttctgcggtgatctggaagattaatcggctttaccaccgtcaaaaaagcggcgctttttagcgccgatgttatttttcaaccttatttccagatacgtaattcatcgtccgttgtaacttctttactggctttcattttcggcagtgaaaacgcataccagtcgatattacgggtcacaaacatcatgccggccagcgccaccaccagcacactggttcccaacaacagcgcgctatcggcagagttgagcagtccccacatcacaccatccagcaacaacagcgcgagggtaaacaacatgctgttgcgccagcctttcaataccgcctgcaaataaataccgttcattaacgccccaatcagactggcgattatccatgccacggtaaaaccggtatgttcagaaagcgccagcaagagcaaataaaacatcaccaatgaaagccccaccagcaaatattgcattgggtgtaagcgttgcgcggtgagcgtttcaaaaacaaagaacgccataaaagtcagcgcaatcagcagaatggcatacttagtcgcccggtcagttaattggtattgatcggctggcgtcgtcactgcgacgctaaacgcggggaagttttcccagccggtatcattgcctgaagcaaaacgctcaccgagattatttgcaaaccagctgctttgccattgcgcctgaaaacctgactcgctaacttcccgtttggctggcaaaaaatcacctaaaaaactgggatgcggccagttgctggttaaggtcatttcgctattacgcccggcaggcaccacagaaagatcgccggtaccgcttaaattcagggccatattcagcttcaggttctgcttgcgccagtccccttcgggtaaagggatatgcacgccctgcccgccttgctctaacccggtaccgggttcgatggtcagcgctgttccgttaacttcaggcgctttcaccacaccaataccacgcgcatccccgacgctaatcacaataaatggcttgcctaaggtgatatttggtgcgtcgagttcgctaagacgcgaaacatcgaaatcggcttttagcgttaaatcactgtgccagacctgaccggtataaatccctatcttgcgttcttcaacgttctgattgccatcaaccatcaatgactcaggtaaccaaaaatggataaaacttcgtttccgctccacggttttatcgtcttcctgcaccgtataaagctcggtcacaggaatagcgatgagcggcccaacgagtttttgcggcccgctggtactttggcgaatcgcatcttccacatcgctacggtaatcggcacgttcgacaatcacctgccgaatcagcattatcggaatcaacaacagcaatactgcaccaaacaaggtggtcattttccagaacaggggggatttcaacatagtcttctcctttgcaatggcagcaggatacgaaggctatgtgggaagaatttgaagctatgtgaagtgacggtgaagtcgtagcgaggccagcacgccaccttcctgcacgttgcgcagcgtgacttcgccgttaaacaaacgggcgacctcactgacgaacgccaaccccagaccgctgcttttttgcccatttgcacgcggcaaagagtaaaagcgttcaaaaatacgtgacagcgcgtagtcaggaataccactaccggtatccagcaccttaagggcgacgtgttcctgatccacttcggcgcttagcgttatgcgaccgctctcgggggtaaaatcgatggcgttatccagtaaattccccagcgcctgctccagtaacgcattaacctcagtgggcataacatgtagagtgatgtttttttctgccaactgcacggtgcgcgcttcgctgacgcggcgaaataatgccgccacatcaacaacagtcagaacgacttcctgacgattctccagtcttgcctggcgtagtaacgtttctaccaatgcctgcatacgcgcattttgcgtcagaatgttgtcggtaaaacgagccaccacttccggtggcggaccttcgcgtaaaatttccgccgcgccacgaatcgccgccagtgggctttttagctcatgggttaacgcataaacatactgctcaatatagtttttcccttccagcttcacgcgcatactttccagcgcctgcgcaagcttacgcaactcgctactgccgagttcaggaagaggaacgggcttattgtcagtgacggaatcggcatagcgagtgagccgggcaatggagcggttgatccaccaaaccatgcctgcgccaatcaccagtgcaatccccagcaaaatggcgctggcccataaaattcgccgctcgctacgcttaatgaccggagccatcgccgcgttcggtttgcctacgctcaaaacgccaataagccgcgagccgtccataatcggcgcggcaacatacatcaccgaactttcgggatcggcaggattttgcaacgtgctgcgcgcaccatactgaccacgcaacgttagccagacgtcattccagcgcgaataatcctgcccaacggctttatttgccgaatcgaacaatactttaccctgcgaatcggtcatatagacatgatattcattgcgcactttgttaatgccaccgatattggcgcgaaacgggcgatgttgtagctgattaaacgcctgcgccagttgcccatgcgttgggtccccagagagcaaatcgggacgcgccagctccgccagcaacgttgcggtatcgattaacgtcccctccgttgctcttcgcacgcccggtttaacttctttgacaaaaatagccagtacgaaccaggccgccaccgccaccagtaaaaaatagcccagcagcaaccgcatgccgatacgcattacaggcccctcaggctatatcccatgccgcgatgagtattaatcggtgaaagatcggggttgatggcgcgcagcttggcacgcaacgttttaatgtgggtatcgacggtgcgatcgtaggtgtcctgcgcatcttcccacacgctatccattagttgctggcgggaccagacgcggcctggcgacttgagtaacgtcttcagcaataaaaattcataccgcgtcagcgttaatggcgtgtcaaaccagctgatctgcgccgcgggttcattcaattcaaaatgaccaatacggatgacgggagacggcgacgagaacttcttcacccgacgcagtaaggtgcgcaccctggcgcacacttcgcggggtgaaaacggtttagccacatagtcgtcagcgccaatttccagcccaagcaggcgatcgacctcttcacttcgggccgtcaggaacagtacaggtaacgccggatggagcgccagtaactggcggcacaattcaaagccgctgatatcaggcaaaccaacatcgagaatcatgacgtcgggaacctgctggcgagctttatccagcaccggcaagcctcgctcaaagacctcgacggcaaaaccttcctgctgcaacatgtagaccagcgtgtcggctatcccttgctcatcttccactaaccagaccgtttcccgttgcataaatcgcctctgttattgccgccacggcatgacaggaaccgcgctaatcgcgtttttcggcgaaccttctacaactttgtcggagtaagccagataagcgagcgcgttgcgtttggcgtcataaaagcgcacgacctgtaacgacttaaagaccagggacgtgcgttttttgaatactacctcgccctgagctttgccgtttttaatacgatccgacagttcaatcggcccgacttgctgacaagaaatagccgcatcggaggtatcttccgccagacccaatccccctttaataccacctgttttcgcccggctcacataacaggtgacatttttcacatcgggatcgtcaaaggcttccacaacaattttgtgatccgggccgatcattttaaatacggtgtcgaccgaaccaatctcttctgcatgagccaatggccccagcattatcaggcttaaagacaggatcaaatgcttgtatttcatattgttaccatttttatctattacacgagcaattagttcgtcacggtaaataacatattgattaagaacaaaatctcaatacttttatttccgtcaagccctaaaacatactctactaagaaaaaaacactgaatgctaaaacagcaaaaaatgctattatccaattacctgatgtcaggtgctcgttgttgaaaggatgaggatattttatggatcaggccggcattattcgcgaccttttaatctggctggaaggtcatctggatcagcccctgtcgctcgacaatgtagcggcgaaagcaggttattccaagtggcacttacagagaatgtttaaagatgtcactggccatgctattggcgcgtatattcgtgctcgtcgtttgtcgaaatcggcggtcgcactacgcctgactgcgcgtccgattctggacatcgcgctgcaataccgcttcgactctcaacagacatttacccgcgcattcaagaagcagtttgcccagactcctgcactttaccgccgttctcctgaatggagcgcctttggtattcgcccgccgctacgtctgggtgaattcacaatgccagagcacaaatttgtcaccctggaagatacgccgctgattggtgttacccagagctactcctgttcgctggagcaaatctctgatttccgccatgaaatgcgttatcagttctggcacgattttctcggcaacgcgccgaccattccgccagtgctctacggcctgaatgaaacgcgtccgagtcaggataaagacgacgaacaagaggtattctataccaccgcgttagcccaggatcaggcagatggctatgtactgacggggcatccggtgatgctgcagggcggcgaatatgtgatgtttacctatgaaggtctgggaaccggcgtgcaggagtttatcctgacagtatacggaacgtgcatgccaatgctcaacctgacgcgccgtaaaggtcaggatattgagcgatactacccggcagaatacgccaaagcgggagatctcccaattaatctgcgctgtgaactgctgattcctatccgccgttaacgctgcagctcatctaatgcaggggcgtccagatgcgagatgtcccctgcggtttcaacgacccagccagacgccagccacaggctttcctgataatccacgcgcgaaatagaacagttacgcagacgtaagcggcgctctgcccatgctggtaatccgagaatcgtactcaccaggcatcccagtgcaataccatgactcaccagcagcggtcggcttccctgcggtaagtcccggcaagattccagtgccgcattgacgcgatcgctgagctcctgcattgactcgccttcaggaatacgcccgtcaacggtgccattgaccagctgccgacgccagttctcttcttcttcggtcagagaatcgatatgtcttttttccagcacacccatgtttaattcacgcaggcgagaatcaaagatgatgtcacagccgcaggcctgggcgatgatttccgccgtacgccgggtgcgtcctaaatcgctactgataatatgcgtaatgccaagctctttggcacgggttgccacctgcatcgcctgttgctcacctttggcggtcagcgggctgtcagactggccctgaatacgtcgctcggcgttccactgcgtttcaccgtggcggactaggtatacctgtaacatgctttttttccgtatactgctgtaacgttaattttctgagtaatgctgattatgcaccaagttgtctgtgcgaccaccaatcccgctaaaattcaggccattctgcaggcatttcacgagatcttcggcgaaggatcctgccatattgcatccgttgccgtcgagagcggtgtaccggaacagccctttggcagtgaggaaacgcgcgctggcgcacgaaatcgggtagcaaatgcccgccgtttacttccagaggctgatttttgggtggcgattgaagctggcatcgatggtgacagcactttcagttgggtggtgattgaaaacaccagccagcgcggcgaggcgcgttcggctactttgccgttacctgcggtgattctgcagaaagtgcgtgaaggtgaggcgcttggtcccgtgatgtcgcgttataccggtattgatgagattggtcgtaaggaaggggcgatcggcgtgtttaccgccgggaaannnnnnnnnngcgccagcgtctatcaccaggcggtgatcctggcgctgagtccgtttcataatgccgtgtattaagcgcctgatgcgacgctgccgcgtcttatcaggcctacaaaatcaatcgcttttcagcaacacctcttccagccactggcgcagctccacgggcgcggctttcaggctgttagatccacgcgtaatcgtcgcgatgcccgcgccgagttcattttttaactcacgctgactcatttcgccacgcaacagctcttcgacaatacgcacgcgagtccccaacgcttcgcgctcatctggcgtcagcatcaggtttaacaacggtaaatggagatcgttttggtaggcattcttaagcaggtcgacaaaacgtaaccactcctggtgacgctgttctgccatcgctgctgaatagggtgattgttgggccataatatgtcgccattgttagcgggggaagcaaaatgcctcccccggttgtactcgctaaagagtacgatagcatatcataaacgtgcggatcagtaacgacgtccccattccgtggcgctcatcaacgtcggtttatcccccatgaaatagcggtagtaagcgtcataagccagcacgttcttcacataaccgcgcgtctcggagaacggaatactctcgacaaatgccactgcgtcgatacgcccggcgctgttgccaagccaggttcgcacccgccctggtccggcgttataagctgctgaggagaaaatacggttattgccaaactgctgataaacatattgcagataactggtgccaatgttgatattcgtttccggatccagcaattgcccagggctactataaccgggaatagagaacatcttcaccgtatgggtcgctgtaccaggcataatctgcatcaggccgctggcccctaccggtgatttcacttttggattccaggcgctctcctgacgggcaatcgccatcgcatagctttgcgggatctccttaccgctggtgtagcgtttgaaaagatcgttgtaagccagcgggaatcgcgcttccagatgatcccatagcttcccggcgatcgttgcctgaacgctaagatcccaccattggttgttgaaagcataccgcgccagttgagcctgctctgtttttgacttgctcttcaccagattggcccactcgctacgcgcggtgttatcgagattccagtacatcaactcgcgcacgcgcgccatctccggcccctgagtcagggcgctgtcaacattctgcggcgctttatcaatcttcagctcatactcttctccgatgcgttgtgctgcaaccatcgggtagaaaccacgctgttgcatgagttgatgcaaaatctctttcgcttcagcttcacgtccgcgttccagcaataaatccgcctgccagtaacgccattcatctttctcttttgcttccatcggcagacgcgccagccaggtattcaggccgcgacgatcgccggtgccaagtgccattcgcacacggcgttcaatcaacgacgtggattgcgagcgcataatggcgtcatcgcgccatttcgcctgctcgtcggtgacatcgttgcccatcaaacgccaggcgacgatatcgcgcagctcctgaatctgatcttcattaagctgctgcgcctgggcaagcgacgggatcatcagccgtgcattttcagcatcctgccgcgccacactggcaaacgccaccgctgccatttgacgggtaaaatcggtcgctccggttgtacgcgcgaaggtcagtaccgtattagggttgttcgccagtgaaatgattgccgaggcgatagtctggtaatcggcaggcatctgccctgccagcactgttaccaggccagtgttacccgctttcatcgccagacggatacgctctaaatacgccagcggatcttgtttacctgacgcacgccagacgctaaataacttgtcacaggcgttaggctggctcttgccggttagccacagctctttcgccccttgccaggcttcttcactctgcccggtgttccatttcgcatagtagtaattacattgcgcttcggtagttccgggcttttccgggctaaaggctaacaagccacgccagtcttcacgccgcgccagttcattgacgaaacgagattgcagcgtgcgagcgggaggaagcgtggggttagcgcgaacaaagttagtgaccgtcaccgccggttgattcatcagatcatcggtgatctggcggtattccaggtagggataaagcggataatccttcagtccaggcatcatttgttcgaccacatccatttgtcgattatcccaggcctgcttgatttgcgcgtaacggctacgctgctcatccagtgagtcggctcgcgccacgctgctgaccgtcagcagacagacaccggcagccaacagccgccaggtaacttgtttggctttttccacaagcgcatcctctaagtgtaaatacatcaatgcagcgtcatgccgcgtaatagatttatgctaaccagtcattgccgtttacgccacgttacggacacttttttacttttactgcgaaggtgatcgaccaactgggattaggcggggaaaaaggctacacttcgcctttgaaaactcatcatcacgataaacatagaggcgaagtccaacgtggctcaattcgtttataccatgcatcgtgtcggcaaagttgttccgccgaaacgtcatattttgaaaaacatctctctgagtttcttccctggggcaaaaattggtgtcctgggtctgaacggcgcgggtaagtctaccctgctgcgcattatggcgggcattgataaagacatcgaaggtgaagcacgtccgcagccagacatcaagattggttatctgccgcaggaaccgcagctgaacccggaacacaccgtgcgtgagtccattgaagaagcggtttctgaagtggttaacgccctgaaacgcctggatgaagtgtatgcgctgtacgccgatccggatgccgattttgacaagctggccgctgaacaaggccgtctggaagagatcattcaggctcacgacggtcataacctgaacgtacagctggagcgtgcggcggatgcgctacgtctgccggactgggacgcgaaaatcgctaacctctccggtggtgagcgtcgtcgcgtagcgttgtgccgcctgctgctggaaaaaccagacatgctgctgctcgacgaaccgaccaaccacctggatgccgaatccgtggcctggctggaacgcttcctgcacgacttcgagggcaccgtggtggcgattacccacgaccgttacttcctcgataacgttgcaggctggatcctcgaacttgaccgcggtgaaggtattccgtgggaaggcaactactcctcctggctggagcagaaagatcagcgcctggcgcaggaagcttcacaagaagcggcgcgtcgtaagtcgatcgagaaagagctggagtgggtacgtcagggaactaaaggccgccagtcgaaaggtaaagcacgtctggcacgctttgaagagctgaacagcaccgaatatcagaaacgtaacgaaaccaacgaactgtttattccacctggaccgcgtctgggcgataaagtgctggaagtcagcaacctgcgtaaatcctacggtgatcgcctgctgattgatgacctgagcttctcgatcccgaaaggggcaatcgtcgggatcatcggtccgaacggcgcgggtaaatcgaccctgttccgtatgatctctggtcaggaacagccggacagcggcaccatcactttaggtgaaacggtgaaactggcatcggttgatcagttccgtgactcaatggataacagcaaaaccgtttgggaagaagtttccggcgggctggatattatgaagatcggcaacaccgagatgccaagccgcgcctacgttggccgctttaactttaaaggggttgatcagggtaaacgcgttggtgaactttccggtggtgagcgcggtcgtctgcatctggcgaagctgctgcaggttggcggcaacatgctgctgctcgacgaaccaaccaacgacctggatatcgaaaccctgcgcgcgctggaaaacgccctgctggagttcccgggctgcgcgatggttatctcgcacgaccgttggttcctcgaccgtatcgccacgcacattctggattaccaggatgaaggtaaagttgagttcttcgaaggtaactttaccgagtacgaagagtacaagaaacgcacgctgggcgcagacgcactggagccgaagcgtatcaagtacaagcgtattgcgaagtaatgcgtaaaatgccggatgcggcgtgaacgccttatccggcctacaaaccaagaaatttcaatacgttgtgaatctccaggcctgataagacgcggtaagcgtcgcatcaggcattgagcaccgaatgccggatacggcgtgaacgccttttccggcctacaacagccttagtatccgcaaattcgtagcgggtcacccgtgctgattcttttaaaccttgtttaatctcgacagcctcttccagagaggttttcaactcatcaaaaaacttattttatacctcgcctttgagccgtttcatcgcggttatctctgctcccccatcatctcccgcaccagctccacgcagcgcaggaaacggctgtcataatcgtcctcttcaacccgcacgaattcgatattgttctcttccaacatctccaccagcaagttctggaactctttgcgatccaccgaactgccgaggctgcgtaaaccatccgccacccacggcgtgttgttctccagcaggatcaccagatcgaaacggtattcatcaatcaacgcctgtacgaacggatgctcacgcccttcgtactttttgcagaacgcctgggtagtgacaaaatcagtgtcaataaacgccactttattggcatatttcactgcaaaatcaatgtattgtgcgtggcccagcgcgattttatcgtaatcggaatactgcaatgcgatctcatcaccgccgaggtgtgaaaagacataatcgcgaccatattcccacgcactggtggtattgaagatattggcaagtttgtttaccagggtggatttaccgctcgactcgccaccaaggatcgccacggtacgtacaaagaacggcttcacttccgtaggaatatattcccagtagcggaacgggttttcgcggatctgcgcaccgctgatactcataaaggtacgtttcggatcgaccagcaccgtatcgatccccagatgttccatatactgtggcgcatcggcttcttccgaggtgtagatcaggtccggctgaatccccttttcagccataaactttttgatgccgttgctccacacatcccagccgtgcggatacggctccatgccctcttcgttgaaagcatgaatgcgaatatttttctgatatttaaaagtttgtaataaccagcgcagacgatccggcaccgtgggctgctgcgacatggcgctgtcttcaaacaacgcgcggtcgcgggtatcgtcaaaacccataatgatatgcagctcgtcaacctggctacaggcgcgctggataaggtagatatgtccggtatgcagcgggtagaacttaccgaatacgacaccaatggttttcttctgtcggggaaattcaagccccaaaaaacggtgcaacgcctccagcttttgcgcgctggggcttttaattttggcattcagtaactggcttaaataccctttggtcataccgctggcatcagctacctgctgtagcgtgcagccctgttgcttgatggcagttttcaggtaatcaaatgacgacatatctccctccgtatctctcattataagtcgtcgaacacgctaagcgcgtcggagagttttttaacgccaaaaatctgcatcccttccggcgcttttttcggtacgttagccgccggaacaatcgcccggcgaaaaccgtgtttcgccgcttctgaaattcgttcctgaccgctgggcaccgggcggatctccactgccagcccgacttcaccaaacaccaccagatcctgtggcagcggtctgtcacgcaggctggaaaccatcgccagcagtaacgctaaatcggcactggtttcggttaccttcacgccgccgaccacgttcacaaatacatcctgatcggccatttgcagaccaccgtgacggtgcaagacagccnnnnnnnnnnttgccagacggttttgttccagccccactgccacgcggcgcggattcgccatcatcgagtgatcgaccagcgcctgaatctccaccagcaacggacgcgttccttcccacaccaccatcacggagctgccggaggtcacttcatctccgcgacttaagaaaattgccgaagggttgctgacttcacgcagcccctgttcggtcatcgcgaagacgcccagctcattcaccgcgccgaagcggtttttatggctgcgcaaggtgcgaaaacgggagtcggcatcaccatccagaagcaccgaacagtcgatacagtgttccagcactttagggccagccagcgagccatctttggttacgtgcccaaccatgacaatcgccacaccgcgcgttttggcgaagcgcgtcagataagccgccgtttcacgcacctgcgccacgctaccaggcgatgattgtacatccgccatatgcatcacctggatcgagtcaattaccatcagtttcggttgctcttcttcggcaatcaggcagatctgttcgatgctggtttccgacaacatattgagattgtcagtcggcaggccaaggcgatgagcgcgcattgccacctgttgcagcgactcttcgccagtgacatacagcgttttcatctgctgggccagtttgcacagcgtttgcagtagcagcgtggatttccccgcacctgggttaccgccaatcagaatggcgcttcctggcaccacgccgccgcctagtacgcggtcgaactctttaaatccggtggaaaaacgcggcagctcttcaaggctgatatcggagagtttctggacttttgccaccccggcgctaccggcatagccgctgagacgctcgttacgcgccaccgttggcgacgcagcaagacgcacctcggtgatggtgttccaggcatgacaggcactgcactgcccctgccagcgcggataatcggccccgcattcattacaaacaaaggcgcgttttggagcttttgccacggtgtacctcgttaatgctgtgccgcccgcaggatgacgggcgagcaattacttctgattcaggctgcctgagaggatgcagaatacccccatcaggtcagcgtgacggatggtgacttccgtcttttcattcacttttggcttggcatggtaggcaatccccagccctgctgctttgatcatcggcaggtcattggctccatcgccaatcgccacggtctgcgccagcggaatttcatactcttgcgcgaggcgggtcagagttttcgctttgtactgcgcgtcaacgatgtcgccgatcacattgccggtaaatttaccgtccatgatctccagttcattggctaccacggcggtcaggcgcagcttgtcgcgcaggtattcagcaaagaaagtaaagccgccggaggcaatcgccactttccagcccagcgtttccagcttgagcaccagttgcgttaagcctggcatcagcggcagattttcacgcacctgttgcagaatattggcgtcagcgcctttcagcgtcgccacacggctgcgcaggctggcggtaaaatcgagttcgccgcgcatcgcccgttcggttacttccgccaccatctcgcccgttccggccagtttggcaatttcatcaatacattcaatctggatggcggtggaatccatgtccatcaccagcaaacccggcgtgcgcaggtgcgggattttccccagcggggcgacatccagttgcgcttcatgggccaggcgcgtagcccgtgcggtgagtgaacctgccagacgaatcacctgataatcttccacgcaccaggcggcaacaatcaccatcgccgcacccagtttgctctggtattgggtcagacgctgtttatccagcccacgaccatacagcagccagccgctacgacctgcgtggtaatccagtggcatcacttcatcaccacttaatgaaagaggcagacccggccataaagagacatcttcaggcaggtcgcaccaggtaatgttaggcattaaggctcctgtaaaatcgttcgaagcagggaaaataacgcatgaggctaccttgtatccattgcttctggcaacattaagtctcaaattttcaaagggtggaagatggctcgcacaaaactgaaattccggctgcatcgggcagtgattgtcctgttctgtcttgccttgttagtggcactgatgcagggggcgtcatggtttagtcaaaaccaccagcgacagcgtaatccacagctggaagaactggcccgcaccctggcgcgtcaggtgacgctgaacgttgcaccgctgatgcgtaccgactcaccagatgaaaaacgcattcaggcgatcctcgatcagttaacggatgaaagccgcatcctcgacgcgggtgtgtatgacgaacaaggcgatcttatcgcccgttcaggcgaaagcgtcgaagtgcgcgaccggctggcgctcgacggtaaaaaagcaggcggctattttaaccagcagattgtcgagccaattgcgggtaaaaacggaccgctcggctatctgcgcctgacgctcgacacccatacgctcgccaccgaagcccaacaggtggataacaccactaacattttacgcctgatgttgctgctctcactggcaatcggcgtagtgctgacccgcacgctgctacagggtaaacgcacccgctggcagcaatcgcccttcctgttaaccgccagcaaaccggtgccggaagaggaagaaagcgagaaaaaagagtgacccattactacaagaaaggaaatcgttatgtccacattacgcctgctcatctctgactcttacgacccgtggtttaacctggcggtggaagagtgtatttttcgccaaatgcccgccacgcagcgcgttctgtttctctggcgcaatgccgacacggtagtgattggtcgcgcgcagaacccgtggcaagagtgtaatacccggcggatggaagaagataacgtccgcctggcgcggcgcagtagcggtggcggcgcggtgttccacgatctcggcaatacctgctttacctttatggctggcaagccggagtacgataaaaccatctctacgtcgattgtgctcaatgcgctgaacgcgctcggcgtcagcgccgaagcgtccggacgtaacgatctggtggtgaaaacagtcgaaggcgaccgcaaagtctcaggctcggcctatcgcgaaaccaaagatcgtggcttccaccacggcactttgctgctcaatgccgaccttagccgcctggcaaactatctcaatccggataaaaagaaactggcggcgaaaggcattacctcagtgcgttcccgcgtgaccaacctcaccgagctgctgccggggatcacccatgagcaggtttgcgaggccataaccaaggcctttttcgcccattatggcgagcgtgtagaagcggaaatcatctccccggacaaaacgccagacttgccaaacttcgccgaaacctttgcccgtcagagtagctgggaatggaacttcggtcaggctccggcattctcgcatctgctggatgaacgctttagctggggcggcgtggaactgcatttcgacgttgaaaaaggccatatcacccgcgcccaggtgtttaccgacagcctcaaccccgcgccgctggaagccctcgccgggcgactgcaaggctgcctgtaccgcgcggatatgctgcaacaagagtgcgaagcgctgttggttgacttcccggaccaggaaaaagagctacgggagttgtcgacgtggatagcgggggcggtaaggtaactcgctgattaaaataccaaaggaagggaatatgatcgatctggaaaaccaggagcgggagattatcaatttaatgttaagccagcgtatttcctggctagccgccgtgcgtatcaggcataaattatcgcttgctgaagtaagtaaaatgttaggtatctcgattaattctctaaaatagatcgaaaagacggaacggtttagctcaaacatcaaaagcaaaatggcagaaatttatggttgtccaccagagttgctgatatgcccttcctggatgacggctgaacataaatgaatagattcgtgaatagatacttgaatagattttattttctatccatatgaaaaataatagtaaatctataaatcagttgctattgatgaatagatactaaaaagccggagcagtctcccactccggcttcacacgacaatcgcctttcagcgaaacacaattactctttatcgcccagcagaacggattccagtgcgattttgatcatgtcgttgaaggtggtctgacgctcagcggcagtggtctgctcgtgagtgcggatgtggtcagacacggtacagatggtcagggctttcgcgccaaattctgcagcgacgccgtagataccagccgcttccatttccacgccgaggatgccgtatttttccatcacgtcgaacatttcgccgtccggagagtagaacaggtcagcggagaacaggttaccaacgcgagcatcaatgcccagtgctttagccgcgtctaccgcgttacgcaccatgtcaaagtcagcgatagcggcaaagtcatgatctttaaaacggatgcggttaactttggaatcggtgcaggcacccataccgataacgacgtcgcgcagttttacgtgcggcagaactgcgccacaggaacccacgcggataattttcttcacgccgaaatcggtgatcagttctttggtgtagatggagcaggacgggatacccataccgtgacccattacggaaattttgcggcctttgtaagtaccggtgaagcccagcataccgcgaacgttgttcacttcacgggcatcttcaaggaaagtttcagcaatatacttcgcacgcagcgggtcgcctggcatcaaaactacgtcagcgaaatcgcccatttctgcattaatgtgtggggtagccattgttttatccttatcaacatgttttcaccctctccctgagggagagggccggggtgagggcatcaagccgcacccattatcagaacatggctttgccatattccatatcagaagtaccaaaatattttgccagagtctggccgatatccgcgaaggtttcacggtgacccagtgagcccggttttactttcgggccgtaaaccagtaccggaatgtgttcacgcgtgtggtcagtaccggtccaggtcggatcacaaccgtggtcagcagtgaggatcaggatgtcgtcatcgcgcagcagagacatcagctccggcagacggcggtcgaacagctccagacccgcagcataaccggcgacgtcgcgacggtggccccaggaagagtcgaagtcaacgaagttggtgaagacgatggtgttatcacccgcttctttcatctctttgatggtggcgtcaaacagcgcgtccaggccagttgctttcactttcttggtgataccgcagttggcgtagatgtctgcaattttaccgacagaaaccacctgaccgtgtttttcatcaaccagtttctgcagcacggtcggtgctggcggctcaacagccaggtcgtgacggttaccggtacgctggaagttaccggctttgtcaccgataaacggacgagcgataacacgaccgatgttgtagccgccgttggtcagctcttcacgggcgatttcgcacagttcgtagagtttatccaggccaaaggtttcttcgtggcaggcaatctggaacacagagtcagcggaggtatagaaaatcggcttgccggttttcatgtgctcttcgcccagctgatccagaatgaccgtaccggaagagtggcagttaccgaggtaacccggcagattagcgcgttcaaccagtttatccagcagctcttgcgggaagctgttttcgtgatcggagaaatatccccactcaaatagaaccgggacaccggcgatttcccagtgaccagacggggtatctttaccggatgacatttcgtgcgcccatgcgtacgcgccgataacttcagcgttgccgtccattcccgccggaatgaaaccggtagaaccttcgtgtgctttcgccagccccagacgggtcagatttggcagattgagcggacctttacgaccgttatcagcttcgcctttggcacaagcttctgcgatatgacccagggtgtcagccccgacgtcaccaaagcgttctgcatcttctgtagcgccgatgccgaatgagtccagcaccataataaatgcacgtttcatatgttctccgtactcagtgcttcaaatttaaatgatcagatcagtataccgttattcgctgatacggcgatagacagttggtgtgctttccggtgctttatcggcaagtttaattgccgctttcaccgctttcgccgcttcctgccagctgttttcgtctttcgcgtggataaccgccagcggacgctgaccgtctacctggtcgcccaaacgcgccatatcagtaaagccgacgctgtaatcaatggtgtcagatgcctgacgacgaccgccgcccattgcaaccactgccatccccagcgcgcgggtatccatttcactgacaaaaccttcggtatcagcatagactgctttcgtcagcatcgctgtcggcagatacttcgcgtagttctcaacgaagtcggttgggcctttttgtgccgctaccatacgaccaaagacttctgccgctttaccgttgtccagcactgcctgcaatttcgcgcgcgcttcggcgtcatctttcgccagtttgccggagataagcatctccacgcacagcgccatcgtgacatcaaacagacgcgggttacgatactcacccgtcaggaactgcaccgcttcacgaacttcaaccgcgttacctgcactggaggccagtacctgattcatgtcggtgagcagcgcggtggtgcgcacgccagcgccgttagccacgccaacaatcgcttcggcaagggcttcagagagttcgtaggtcggcataaacgcgccgctacccactttcacgtccatcaccagcgcgtccagaccttccgccagtttcttcgccagaatagaggcggtgatcagcgggatggagtccacggttgcggtaatatcacgggtcgcgtagaaacgtttatccgccggagccagtgagctggtctgaccgataatcgccacgccgacgtctttaataatttcgcggaaacggttgtcatccgggaaaatgtcgaagccagggatggattccagtttgtcgagcgtaccgccagtatgaccgaggccgcgaccagagatcatcggaatatagccgccgcaggctgcgaccatcggccccaacatcagcgaagtcacatcgccgacgccaccagtggaatgtttatcaacaatcgggccattcagatgcaggcttttccagtcgagaacggttcctgaatctcgcatcgccatggtcagcgagacacgctcaggcattgtcatatcgtggaagaaaatggtcatcgcgagggcggcaatctgcccttcggagatagtgttgtcgcgaatgccgttgataaagaaacgaatttcttcatcgctcagtgcatgaccatcacgttttttacgaataatttcttgtgcgagaaacaaggtaacctcccgaggaaaagagtatgaggcggcttttgccggatgcgtctacgccttatccggcctacgggtagatacgtctcgtaggcctgataagcgcagcgcatcaggcgtaaagcatcttacttagtagctgctggcgctcttaccgtcaccgtggcccagcgctttcaacaggcttgccagcaggctggaagcaccaaagcggtagtgacgcgcatctgcccagtcagcaccgaacagttcatctgcgatggcgagatatttctgcgcatcttccgcagtacgcacgccgcccgctggtttgaaaccaacggttttttctacgcccatatcacggatcacttccatcatgatgcgcgcgctttccggcgtcgcgttcacagccactttaccggtagaggttttgatgaagtccgcacccgctttgatggagatttcagacgctttacggatcagcgcttcgtctttcagttcgccggtttcgatgatcactttcagcagtacattcgctgccgcgcaagcctctttacaggctttcaccaggtcaaaaccaacctgctcgttacccgccatcagcgcgcggtacgggaacaccacgtcaacttcatcggcaccgtaggcgattgccgcacgggtttctgccagcgcgatttcgatgtcatcgttaccgtgtgggaagttggttaccgtagcaatacggatttccggggtgccctgctctttcagtgttttgcgagcaatcgggataaagcgaggatagatacagatagcggcggtattgccgaccggggttttggcctgatgacacagagcaattactttctcgtcggtgtcgtcgtcattcagggtggtcaggtccatcaatttcagtgcacgcaggctgcttgctttcagatcagtcatttcattctcctggcttgtcgccaataaaattcaccttgcgagtttgttagtattctaacatctactccgcaacacacttcgatatacatcacaattaaggaaatctacttacaagtttgcatcactgtaatgcgatctggttcaaataattcactttcaaatgaatgcgtcagtggtggcaaacgcatcaggatcaaagtgaacatcacgaaacttcttacaatggcgcatcaccttcggcataaaaggaaaagaagatgcccacttctcatgaaaatgcactgcaacaacgttgccagcaaattgtcaccagcccagtgcttagcccggagcagaagcgccattttctggcactggaagcagaaaacaatctgccttacccacagctgcctgccgaagcccgccgcgcgctggatgaaggtgtaatctgcgatatgtttgaaggtcatgcgccgtacaaaccgcgctatgtcttacccgattacgcccgttttctggcgaacggttccgaatggctggagctggaaggcgcgaaagatcttgatgacgcactctctctgctgaccattctttaccaccacgtaccgtcggtcacatcgatgccggtctacctggggcaactggatgcgttgttgcaaccgtatgttagaattctaacacaagacgagatcgatgttcgaataaaacgtttctggcgttacctcgacagaaccctgccagacgcctttatgcacgccaatatcggcccgtctgattcgcccattacccgtgcaatcttacgtgcagacgcagagttgaagcaggtttcaccgaacctgacctttatctacgatcctgaaatcacccctgatgacctgctgctggaagtggcgaagaacatctgtgaatgtagcaaaccgcacatcgccaacggtccggtgcatgataaaattttcacaaaagggggctacgggattgtgagctgttacaactcactgccgctggcgggtggtggcagcacgctggtacgccttaacctgaaagccattgccgagcgcagcgaatcgctggatgacttctttacgcgcactctaccgcactactgccagcagcagatcgccatcatcgatgcgcggtgtgaattcctctatcaacaatcacacttctttgagaatagcttcctggtgaaagaagggctgattaaccctgaacgttttgtgccaatgtttggcatgtatgggctggcggaagcggttaacttgctgtgtgagaaagaagggattgccgcacgttacggtaaagaagccgccgcaaatgaagtgggttatcgcatcagcgcgcaactggcggagtttgtcgccaatacccccgtgaaatatggatggcaaaaacgcgccatgttacacgcacagtcggggatcagttccgatattggcaccacgccgggcgcgcgtttgccgtatggcgatgagccagatccgatcacccatctgcaaactgtcgccccgcatcatgcttattattattccggcatcagcgacattctgacgctcgacgaaaccatcaaacgtaacccgcaggcactggtacagctttgcctcggtgcctttaaagccggaatgcgtgaatttaccgccaatgtcagcggtaacgatctggttcgcgttaccggttatatggtacgtttgtcggacttagaaaaatatcgcgccgaaggttcacgcaccaacaccacctggctgggcgaagaagccgcacgcaacactcgtattctggaacgccagccgcgcgtgataagccatgaacagcagatgcgctttagtcagtaagattatccccttctcctgcgttgacgggccaggcagtcgtctggctctgtttttgcagggctgcaatctgcgctgcaaaaactgtcacaatccgtggacgatgggacgctgcaatgattgcggagagtgcgtgccacagtgtccgcatcaggcgttgcagattgttgacggcaaagtgctgtggaacgctgtggtctgcgagcagtgtgatacctgcctgaagatgtgtccgcaacatgccacgccaatggcgcaatccatgagcgtggacgaagtgcttagccatgtccgcaaagcggtgctgtttattgaagggataacggtaagcggcggcgaagccacgacccaactgccgtttgtagtggcgctgtttactgctatcaaaaacgatccgcaactgcgccacctcacctgcctggtggacagtaacggcatgttgagcgaaaccggctgggaaaaattactcccggtgtgtgacggcgcaatgctcgatctcaaagcgtgggggagcgaatgtcatcaacacttaaccggacgcgataatcagcagattaagcgcagcatctgtttgcttgcagagcgcggcaagctggcggaactgcgtttgctggtaattccagaccaggtggattatttgcatcacatcgatgagctggcgacgtttatcaagagacttggcgatgttccggttcgcctgaatgcgtttcatgcccacggcgtgtatggcgaggcgcaaagctgggcgagcgccacgccggaagacgttgagccgttggctgatgcgttaaaggtgcgcggggtgagccggttgatatttccggcgctctatttgtgacatgccggatacggcctacggttcggcacagacttgtaggcatgataagacgcgacaagcgtcgcatcaggcattatgcgccgactgccggatgcggcgtgaacgccttatccggcctacggttcggcacaaacctgtaggcatgataagacgcgtcaagcgtcgcatcaggcattgtgcgccaactgccggatgcggcgtgaacgccttatccggcctacggttcggcacaaacctgtaggcatgataagacgcgttaagcgtcgcatcaggcattatgcgccgactgccggatgctgcctacgaagggtaaactacccactaacgctaaacaacgcatacgtattattaagcaacacttcggcaatctcatcttctggttccgggcgcaactcgcaaagcacgtcaaacacccgcacagcctgttccggtcggttaggctgcccctgaaagccgttgagcggcatatccggcgcgtcggtttccagcaacaacgatgccagcggtaattttgcgatgacatcgcgggttttactggcgcgtggataggtgatagtaccgcctacgccgattttgtagcccagctgtacaaaccgctcggcctgttgcaggctgccggaaaaaccgtgaaccacgccagtgcacggtaaatcgtgacgtttaagatgcatcgccagtttgtcgtgtgtacgccgggaatgaaggatcaccggcagatcgtagcgtttcgccagtttcagctgttcgtcgagtaaccactgctgcctctcaaattgcggatcgtcgccgaagagatccagaccgatctcccccaccgccaccaccttcgccggacgcctttccagcgcctgctgtagctgatcaagagacacatcgctatgtttttccaacatccccggatgcaaccccaatgcggcatacagcggttgatatttttccgctaacgcctgcacgcgggcaaaattttccgcctctgtcgccggaacaatgatcttgcctacgcccgcttgtgccgcgcgttgcaggctggcctcttcatcgccactaaacggcgggaaatcaaaatggcagtgggtatcgataaaacggcaaatcaagccagatcctcattgttaaatgtcgggtcgttcgcctgcggagcatcgctcacttcggcaaccagcgtatcgttggcgactggcgcaggcggaataacgatcgattccggcgtcaccactggcaccagatggcgggtaagcggcgctttttcagttaatagcttgccaaccgtggcgaggaaataacgaccgcataaacgcccaagtttatagtcttcacgcagcgccggaatccgactgccaagcgcgatactatgtaatggtttcggtggataaatttcgaatatccgcagcttgcccggtggtttctcaataaattgctgaatgtcacgatagctggtttcatgatgctgcaccagattgaccagcggctgcaggctactgtcacccagccagcgttccatgcgtttgaaccactgcggcgtgtagtacatttgtgacggcacagtgcggatgacgaccaacgttttagcgccctgccttgccgcctctttaaccggaatcgcatcactgatcccgccatccaagtagttaatgccttccagcgacactccgctacgataaaagccaggtatcgcactggaggcgcgaatcacatccagccagttttgtttggttggtaaaaagtaattaggcgcgtagtcatcctgacgacaggcgcacatataaaacgatttgccgctgtcaaacaaccgcgcggcggtatccatttgcaacggcatctggcttgcggtggcctccaccagccagtcgagatcgataagatttcctccacggacaaagcgcaatggatcgaaaaattcgcgttttgtggtatagcgcatgatgactttgcgcgcgtaaccgggctgattgcagataaacgccgagaggttctgcgccccggcagatgtgccgagataaagatcgaaaggattaaactgcgcgcgcataaactcatccagcacgccagccgtgaaaattccacgctgtccgccgccttcgcacaccagagctattcgtccaggctggaacggccttagcgacaacggcgcaatattaccaagcgttacaggtattcgctgccccacctctgccttcctgtttttgttgtgaaagaatgacaaagtaacgcaatttattattcgctaaaaccgcaaaagccagtccgctggactggctttggataaaattttcttaatggtctgaaatctagggtcgttttcggcccatgaacaaactcaccaggaacagaataatcccgacgacaaagacaattttagctgcgcctgcagcggtaccggccagaccaccaaacccaagtgcggcggcgattaacgcgataaccagaaatatgatgccccaacgaaacataagcgtctcctttaccatagttaatgtcaccgcttgatatgagcgtgaaaatcactcaatgcgatatttttagtgtggtgcacatcgcgcctcccgacaaagttcgggaggacgaattacgacgaattacttagttttcagatcatttttaacgcttttcacaccatctaccgctttggcgatactttcagcacggtcgctctgtgcctgggaatcgacggtaccggagagctgaaccacgccgtcggtggtttcaactttcacatgacgggaagggacgatatcgtccgccagcagtttggctttgatttcactggtggtggcggtgtcacccgcgtagcccttcacagagccttctttagcgtcgcgaacgtgcagtttgtcgctgacagaggtcaccccttcaacgcctttcgccactttcactgcctcttcggcctgggcctggctttcaacgaaaccgctcagggtcacgactttttgatcggtttttacagagatatcggtgctcttgatgttgtcatgatccaccagggccgccttcactttcgcggtgatggcgctgtcatccatgaaattaccgactttattcatagagctatcgactttttgccctgcgctttcattggtagtctgtgcgttgttttccgcgtaggcagagccggtcgcgacggcagaggtcaacattacagccagcagagttttcgaaatcttcagtcttgtcatagtcatcgatttattcctgtatgtttgctcgtaatttgagcctggcaacacgaggttgcattgctgaatagggagagacttcaccctctacagaagtcaatggtcgccatcacaaaagcgatgggtgatgaataacgaccattacagcctctgaatcagttattaatatcggtagaatgacaatcgacggctttagatactgatatctacgcattgaacggtatttaacgccgtcagaaatgtcattactttgttaaatatagatcacaattttgaaaccgctcgggatatcagcgaaaacataagcaaaagtgaatgttttaagaacattccgtaagcggctaataaggaagggaaattgacagggcgaggcggttgccgcgccctggaggcaagaattaatgctcgcgggtctggtggaactgaacgtccggataacgttcctgtgccaggcgcaggttaaccatgctggtagcgatgtaagcgagattatcgccgccatcaagcgccagttggctttcgttcttacgcttgaactcttcaaatttcttcgcgtccgcacattctacccaccgggcggtggcaacgttgactgattcatatactgcttcaacgttgtattcgctcttcaggcgcgataccactacatcaaactgcagcacaccaaccgcaccaacgatcaggtcgttgttggagatcggacggaacacctgcaccgcgccctcttcggaaagctgtaccagccctttgagcagctgtttttgcttcagcggatctttcaggcggatacgacggaacagttctggtgcgaagttcggaataccggtgaacttcatcatctcaccctgggtaaaggtgtcgccgatctgaatggtgccgtggttgtgcaggccgaggatatcgccaggatacgcttcttcaacgtgcgaacggtcacccgccataaaggtcagcgcgtcagagatcaccacgtctttcgcggtgcgcacctggcgcagcttcatgcctttttcatatttaccggataccacgcgcataaacgccacgcggtcgcggtgtttcgggtccatgttggcctgaattttaaatacgaagccggtaaatttgtcttcgctcgcttgtacggtacgggtatcagtctgacgcggcatcggcgcaggtgcccactccaccaggccatccaacatatgatcgacgccgaagttacccagcgcagtaccgaagaataccggagtgatttcgcccgcaaggaacagctctttgtcgaactcgttagacgcgcctttaaccagttccagttcgtcacgcagctgctgtgccagatcttcaccaaccgcagcatcgagatccgggttattcagccctttaacaatgcggacttcctgaatggtgtgccctttaccgctctgatagagataggtttcatctttataaaggtggtaaacgcctttaaacagcttgccgcagccaattggccaggtgatcggtgcgcagccaattttcagctcgttctcaacttcatcgagcaattccatcgggtcgcggatatcacggtcaagtttgttcataaaggtgaggatcggcgtgtcgcgcagacgggtaacttccatcagcttacgggtacgatcttcaacaccttttgcggcgtcgataaccatcaggcagcagtccaccgccgtcagggtacgataggtatcttccgagaagtcttcatgccccggggtgtcgagcaggttaaccaggcaatcgtgatacggaaactgcatcacagacgtagtaatggagatcccacgctgcttttccatctccatccagtccgacttagcgtgctggttggaaccacggccttttactgtaccggcggtctgaatggcctgtccgaacagcagcaccttctcggtgatggtagtcttaccggcgtccgggtgagaaataatggcaaaagtgcggcgcttcgccacctcttgcaaataaggagacaacgtcataattctttcttcttgagtaagcggcatcgcgccgcgcttgttgaaaacgaaaaattgcggctattttacccatcaacgggggggaggcaatcagtgtttacacaggagctgctccagttcatgcaacgaagaaacggtccaggtgggcgcgatgccttctggttgctcgcgatggtgtgcattcagccagcaggtcgcaagcccggcgttgatgccaccgagaatatcggactcggcagtgtcgccaaccatcagcacgcgtgaacggtcaggattgcccgcctgttccagcgcataatcgaaaattttcttattcggtttagcaacgccaacttcttcggaaatcaccagcaaatcgaagtaatcacgcaggcccgtccgttccagacgcacttgctgcaaggcgctaaaaccgttggtgatgatgccgattttagcgttgccacgaatggcgttaagcagagaaaccgcgcccggcaacggcgtacagatttccgccatcgcattaataaaggcatcgttaagcaagcctgcttcaactttcagccgttcggcccagctctcaaaccgcccgtgctgaagctgtaatgaagtgatcgcgccgttttgataatccacccacagtggcttgttaacggcctgatagtcctgaaaatcttcagcggtaaaggtgacgctgtaatcaagaaacatccgctgcaggccggtgaatgagtcaaaggtaaacagcgtttcatcggcatcaaagaaaatccagtcccacttcattattccaccttgtcttacatactgattggcaacgccatgatgatggcgtcttcgcgaccgtccgtggtggggtagtaattgcggcgaatcgtcgcctcgttaaagcctaaactttcgtacagggcaatggcggcagcgtttgaagcacggacttccagccatagtgtcgccacgccgcgtttttccagttcgtcgatcagatgttccagcagcacccttcccaatccctgacgctgatagtcaggatcgaccgcaatattgaacaatgtagcttcatccagcaccacttgcgtaatcgcaaacgccgccattttgccgttttgcgttaactgaaagttgagataacgctcgccctggttgctggcaaaggttttttcactccacggaaaggcgtgggcgcgttgttcaatgtggtaagccgctggtaaatcagtcgtttcgagggaagaaatcgtgttcatatgtgcaaatctgttgccataacgcggcgcgtgccgttgggtttgcccgtaattcggtgagcgccggtgatgccacctgagcgccttccagtgatagcggttcgtcagtacccaaccgccagctgttgcagcgactgccttgcggcagcatcgcgattttttctggcgtcagttgcagcacttgatcggggctgacggttaatgcgcgcagaacatcgctcactaaaggatcggtcagggcgggaagatcgtttgccaccatcaccagacggacgtgtgccgggatcgcaatggcaatctccccctgcaacgcgccagggcgacgcagcgaccactgggtaatgcccagttgctgtaactgccagtctcgtcgggatgtcatagcgaatcgctcctgttgtcaggggcgcaaatatagcaaattcgtcgataccgcgccaacatatggctataatcgccgccagtatcaattgaggagcattccatgtctgcatttaccccggcaagtgaagtcttgctgcgtcacagtgatgatttcgaacaaagccgtattctgtttgccggagacttacaggatgacctgcccgcgcgtttagataccgcggccagccgtgctcatacccagcaattccaccactggcaggtattaagccgccagatgggggataacgcccgtttcagtctggtcgccacggtggatgacgtcgcagattgcgatacgctgatttactactggccgaagaacaaaccggaagcccagttccagttgatgaatttactttctctgctgccagtggggacagatatttttgtcgttggcgagaaccgcagcggcgtgcgcagcgccgagcagatgctggcagattatgcgccgttgaataaagtcgacagcgctcgtcgctgtggcctctattttggtcgtctggaaaaacagccggtatttgatgccgataaattctggggcgaatacagcgtcgatggcctgacggtcaaaacgctgcctggcgtgtttagccgcgacggtctggatgtcggtagccagttgctgctctcgacgttaaccccgcacacgaaaggtaaagtgctggatgtcggctgtggcgcgggtgtgctttcagttgcctttgcgcgccattcgccgaaaattcgtctcaccttgtgcgatgtctctgcgccagcggtagaagccagccgcgcaacacttgcggccaacggtgttgaaggtgaagtctttgccagcaacgtcttttccgaggtgaaaggtcgttttgatatgatcatctccaacccgccgttccacgatgggatgcaaaccagcctggatgcggcgcaaacgctgattcgcggcgcggtgcgtcatcttaatagcggcggcgagctgcgaattgtagcgaacgccttcctgccttacccggacgtgctggatgagacatttggcttccatgaagtgattgcgcaaaccgggcgtttcaaggtgtatcgcgccattatgacccgccaggcgaagaaaggttaattatctcgccgaataccgtgtcggatgcggcgtgaacgccttatccgacctacaaaacctgcacgttagcccttcgtaggccagataagacgcgccagcgtcgcatctggcatctgcccccgcatgcctaccaaacctgcacgctagtttcctgatggacatttttccagcaattacacctccggcgataattaactattgacgaaaagctgaaaaccactagaatgcgcctccgtggtagcaattctttttaagaattgatggtatgcgaaggtggcggaattggtagacgcgctagcttcaggtgttagtgtccttacggacgtgggggttcaagtcccccccctcgcaccaaaaaccacgttgatattgctcgcactgggcgaaggtggcggaattggtagacgcgctagcttcaggtgttagtgttcttacggacgtgggggttcaagtcccccccctcgcaccaaacgaggcgatatcaaaaaaagtaagatgactgtgcgaaggtggcggaattggtagacgcgctagcttcaggtgttagtgtccttacggacgtgggggttcaagtcccccccctcgcaccaattatctttacttcctttcttgtttcttccttgatttttcatccctgattcaaattcattatcatcagcatgatgccagcaataagcgccaggcacgatggtagcaaaacgtaatgccgtaactgtttgtgatacagcatcaccggcgtcaatactaatcccatcagaatgacaatccgccactgatccggcgataaatccgcatacatcagccctgcaatcagcaatcctggcagcaacactccccagccactgcccagcatacgttgcaacatggtttcatctctttcattgataatgataaccaatatcatatgataatttttatcatttgcaagccagagaaatcccttgctatcgggtaaacctatcgctaggattagcaatcattatcatttagattactatcccgattatggcctatcgttccgcaccgctctatgaagatatcatctggcgaacgcatctccagccgcaggatgctgggcttgcacaagccgtacgtgcgacgatcgccaaacatcgtgaacatttgctcgagtttatccgcctggatgaacccgctccgcttaacgccatgacgctggcgcaatggtcatcaccgaatgcgctaagttctctactcgcggtctattccgatcatatctatcgcaaccaaccaacgatgatccgcgagaacaaaccgctgatctcactatgggcacaatggtatatcggcctgatggtgccaccattaatgctggcgctactgacgcaggaaaaagcgctagatgtgtcgccggaacatttccatgctgagtttcacgaaaccggacgcgtcgcctgtttctgggtcgatgtgtgtgaagataaaaacgcaacaccacattcgccgcagcagcgaatggaaacgttaatcagccaggcgctggttccggttgtgcaagcactagaagcgaccggagagatcaacggcaaacttatctggagtaataccggttatttgatcaactggtatctcactgagatgaagcaactgctcggcgaggcgactgttgaatcgctgcgccatgccctcttttttgagaaaacgctcacgaacggtgaagataatccactctggcgtaccgtggtactgcgcgacggcctgctggtgcgccgcacttgctgccagcgttatcgcttaccggatgtgcagcaatgtggcgattgtacgctgaaatgaaagcactgccggggaagtaaacccggcatcatgcggattaatagggatgcaacacattacttgtttcgcaatgccgcatacataacagaatatctgcggcctccaacaaccctgcgtcagaactgacgcccagtttcgacatcacattaaatttatgtgcacggatcgttttgatattgcgtttaagctgctcggcaatttgtgtcattgagtagccacgcgacataaagcgcaatatttctctctccgtcgggcttaacgtccggctttggtttatgtaccactgattgttcagtcggtcggtcgcctgacgtacaccatttaatgacaaaaagagttcctgatgaaaaatctccagcgttgacgctttacttaatacaccgtccagcggtgatggcgacaatgaaccaatcagccgagcttcaatatcatcatccgcaataactaaacgccgggtacgcggaaacttaatcgccagttcagtcaggcaagataatccctctctgcgctcacttctcatggcagaaaaagaaaaaatgaccgccgcaaacgagatccgcgacatggcatcctgaaatgactcctgactggtataggtatggagcttataagggttacccgcaaactttctgaataaactctcaataccgatactactcatgacgcatttttctatgagtgcgacatttctcttcttaattcggctgtgttccattctgcggcatctccataaacagaaggcaagttaagttctcttgcaccctgcgcgctatttatccatgcatacatttcagcgttgctgtgaattgccagtcgacgcatcgcactgtttttttgggcgctgatagttttattacttttcttaagcaatgaagctatctggttgatgccccatcctttacctaatagccgcagtaccttgcgctctgaaagagtgagaatgacggagcgatagctaaaatcatgagtttcagtcattgccggggaggtcagcatggcgctgatacgctctgcgtgcgtattgccggaacgtacggtcttgaccagattctcaatgggttcaacatcagacaataacgtcgccgtagggcacatgagcagttctactgcctgggaataccaggagcgtgacaccatgaaaacccagtgaatttcccgatattgtgagattaaagaataataatgttcacaaacagaacgtggatcttcactttcaccggctaaatcagcaatgactaatccggaacgacgtaattgtaataaggtaaggtcctccgcagaggcgctggatattatttcatattcagggaagtgagtcctcatgacctcttttaaccctgcttgcataacaggtattttactgataacaattccatttttgcagcatcctggcaacatatttcctccacatccactgtctaaaaattatgatggtttattc

SEQ ID NO: 187 - DNA, 39466 bp, Escherichia coli
  source 1..39466: mol_type = genomic DNA
gtctgattattgatttttcgcgaaaccatttgatcatatgacaagatgtgtatccaccttaacttaatgatttttaccaaaatcattaggggattcatcagtgcttagtgtgttccccgcgccagcggggataaaccgttgcccgcgcaattccgggagcatccgcaattgtgttccccgcgccagcggggataaaccgacggacaaaatatatattgatttgcgaattatgtgttccccgcgccagcggggataaaccggtaaagaaactgccgacaaatccctgttcgttgtgttccccgcgccagcggggataaaccgcccgtcaccgacgcgcagtggcgctaccgtgagtgttccccgcgccagcggggataaaccgggatgacctgtcgctaaaactcgccgcgtacagtgttccccgcgccagcggggataaaccgggcgcactggatgcgatgatggatatcacttagaattccccgcccctgcggtagaacacccagctcccattttcaaacccatcaagacgccttcgccaactccttcaccagaggtagcattatccgcataacgtcacggcagcgacgttctattcttccaggaagtgccttatcaatatgctgttgattatccagtcttacgtcatgccagctatttcccgcagggaatgcggctgtttttgcgcgttgctgataaccatccttattcccaagattccagttagtcgcttccaccgaaagtacagcaatgcccgctttgtcgaatatttctgcgtcattacaacacccagtgcctttcggataatttttattcaaacccggattggtcgttgcggctattccgtgactgcgtgcaattgccagcgccctgtcgcgcgttaatttccttactgcttcaggggtttttacaccgctgttgaaatacaatttatcgccaacaattaagttatcgagattaatcaccagcagcgtatttttcttttcggtgtcactcatccgcttgagtaaattctcagcgcctaatttcccttcctcttcgccgctggtcgccacaaatcgaataccatactcggtaggcgtatttttcaggcgttctgccaattccagcatgacacctaaacctgcggcgttatcatccattccttgtaacgtcagcccgccgagattggcatcggcgtcagcatcgctcagcggggcgtaagtatccagatgcgccataatgatgatctgctgcggcgctttgccttcatgagcggcaatcaccgtacttcccgtcacgttatgccagctcttacgattatcgcgggcggtataaatataccgactattaaatgtccgaatatcactgcgataacccatttgctgaaactgttggcgaatataatcggcagataacatttctgcaggagttccggtcatgcgtcccggaaagaaagtagcaatatgtcgtgcctgagtattagcaaaatcgccaggtttaggtgacgaggcgtgtacggggagaataaagcatacgccgagcgccagggcagcggtacggtggcgcaatgcggaaaacatagtgagtccttaaataccatgcaaatttttttaccgccatagtatgaaactgccgctgcgctaaaacaatttcaaatcttcctaaacgcccgaaatccggtgccttaagcactttttgatattagctttgccaaatcgttattccgttaaggaactactcattctaattggtaatttcattcgttctcttacgctccctatagtcgaaacatctgatggcaagaaaatagcggtattgcaaaggaacggttatggatcaaatacgacttactcacctgcggcaactggaggcggaaagcatccacattattcgcgaggtggcggcagaattctcaaatccggtgatgctctactctatcggtaaagattccagcgtcatgctgcatctggcgcgcaaggcgttttatccaggtacgctgcctttcccgttgctgcatgtcgataccggctggaaattccgcgagatgtatgagttccgcgatcgtacggcgaaagcctacggctgcgagctgctggtgcataaaaacccggaaggcgtggcgatggggattaatccattcgtgcacggcagcgcgaaacataccgatattatgaaaactgaaggcctgaaacaggcgctgaacaaatacggttttgatgccgccttcggtggtgcgcgccgtgacgaagagaaatcccgcgctaaagagcgaatctactctttccgtgaccgcttccatcgctgggatccgaaaaatcagcgcccagagctgtggcacaactacaacgggcaaattaacaaaggcgaaagcatccgcgtcttcccgctctctaactggaccgagcaggatatctggcaatacatctggctggaaaatatcgacattgtgccgctgtatctcgctgcggaacgtccggttctggaacgcgacggtatgttgatgatgattgatgacaaccgtatcgacctgcaaccgggcgaagtgattaaaaaacggatggtgcgtttccgtacgctgggctgctggccgctgaccggtgcggtggagtcaaatgcacaaacactaccggagatcatcgaagagatgctggtttctaccaccagtgaacgtcagggccgcgtgattgaccgcgaccaggcggggtctatggagctgaaaaaacgtcaggggtatttttaagatgaacaccgcacttgcacaacaaatcgccaatgaaggcggcgtcgaagcctggatgattgcgcaacaacataaaagcctgctgcgttttctgacctgtggtagcgtcgatgacggcaaaagtaccctgattggtcgcctgctgcacgatacccgccaaatctacgaagatcagctctcatcgctgcataacgacagtaaacgtcacggcacccagggcgaaaagctggatctggcactgctggtggacggcctgcaagctgagcgcgaacagggcatcaccattgacgtggcttaccgctatttctctaccgagaagcgtaaatttattatcgccgacaccccagggcacgagcagtacacccgcaatatggcgactggcgcatcgacatgtgaactggcgatcttactgatcgatgcccgtaaaggcgtgctcgatcaaacccgtcgtcacagttttatctccacactgttggggatcaaacatctggtcgtggcgatcaacaaaatggatctggtggattacagtgaaaagacgttcacccgtattcgtgaagattatctgacctttgccgggcagctgccgggtaatctggatatccgctttgtgccgctctctgcactggaaggcgacaacgtggcttcgcaaagtgaaagtatggcgtggtacagcggtccaacactgctcgaagtgctggaaaccgtggagatccagcgagtggtggatgctcagccaatgcgcttcccggtgcagtacgttaatcgcccgaatctcgattttcgtggttacgccggaacgctggcatccggtcgcgtagaagtcgggcaacgagtcaaagtgctgccctctggtgtggaatcaaacgtcgcccggatcgtgacttttgatggcgatcgcgaagaagcctttgccggagaagcgatcaccctggtgctgacggatgagatcgacatcagccgtggcgatctgctgctggcggcagacgaagcgttaccagctgtgcagagcgcgtcggtggatgtggtatggatggcggaacagccgctttccccgggccagagttatgacatcaaaattgccggtaagaagacgcgtgctcgtgttgatggcattcgttatcaggttgatattaataaccttacccaacgcgaagttgaaaacctgccgctgaacggcatcggcctggtggatctcacttttgacgagccactggtgttagatcgttatcagcaaaatccggttaccggtgggctgatttttatcgatcgccttagcaatgtgaccgtgggcgccggtatggtgcacgagccagttagccaggcaactgctgcgccatctgaatttagtgcattcgaattggaattgaatgccctggttcgccgccactttccacactggggcgcgcgcgatttgctgggggataaataatggcgctgcatgacgaaaacgtcgtctggcatagccatccggtcactgtgcaacaacgcgagctacaccacggtcatcgtggtgtagtgctgtggtttaccggcctctccgggtccggtaaatcaacggtcgccggggcgctggaggaggcgttacataaactcggcgtcagtacgtatctgctggatggcgataatgttcgccacggattatgcagcgatctcggttttagcgatgccgatcgtaaagagaatatccgtcgcgtcggtgaagtggcgaatttgatggttgaagccggactggtggtgctgaccgcatttatctcgccacaccgcgccgaacgccagatggttcgcgaacgcgtaggagaagggcgctttattgaagtgtttgtcgatacgccgctggcgatttgcgaagcccgcgatccaaaaggcttatataagaaagcgcgtgccggtgaactgcgcaactttacgggaatagattccgtttacgaagcgcctgaatcggcagaaattcatctcaatggtgaacaattagtaacaaatttggtacagcaattattagatctgttgagacagaacgatattatcagatcctgagacaccaccgggtttccatgcccggttcgtcaaagtaacaggatcaaatatgcgtaatagccataacattacactaacaaataacgacagccttactgaggatgaagaaaccacatggtcactgcctggtgccgtggtcggttttatctcctggttatttgcgctggcgatgccgatgttgatttatggctctaacacgctgttcttctttatctacacctggcctttctttctggcgctgatgcccgtcgcggtagtggtggggattgcgctgcattcattgatggacggaaagctacgctacagtattgttttcaccctggtgacagtaggcattatgtttggcgcactgtttatgtggctactgggctaatttgtactttcccgtctcctctgttcataattcaaaccgtaactaataatgagattatgttctgcacgccctgggtatacgtaacaatggacaaatgtggtacatttgcccgcgttgtcgcggtatccccaacagaggatgtagagtcgtcttcggatgcatgggatgatgatgccgtttttcagggggcaggatgggtaaactaacgctgctgttgctggctattctggtctggctacagtattcgctgtggttcggtaagaacggtatacatgactatacccgcgtcaatgatgatgtggcggcacagcaagctacaaacgcgaaacttaaagcgcgaaacgatcaactttttgccgaaattgacgatctcaatggcggccaggaggcgctcgaagagcgtgcgcgtaatgaactcagcatgaccaggccgggcgaaactttttatcgtctggtgcctgacgcgtcgaagcgcgcacagtctgcggggcaaaacaatcgataaatcagcccgggaattaacatggcaaccactcatttggatgtttgcgccgtggttccggcggccggatttggccgtcgaatgcaaacggaatgtcctaagcaatatctctcaatcggtaatcaaaccattcttgaacactcggtgcatgcgctgctggcgcatccccgggtgaaacgagtcgtcattgccataagtcctggcgatagccgttttgcacaacttcctctggcgaatcatccgcaaatcaccgttgtagatggcggtgatgagcgtgccgattccgtgctggcaggtctgaaagccgctggcgacgcgcagtgggtattggtgcatgacgccgctcgtccttgtttgcatcaggatgacctcgcgcgattgttggcgttgagcgaaaccagccgcacgggggggatcctcgccgcaccagtgcgcgatactatgaaacgtgccgaaccgggcaaaaatgccattgctcataccgttgatcgcaacggcttatggcacgcgctgacgccgcaatttttccctcgtgagctgttacatgactgtctgacgcgcgctctaaatgaaggcgcgactattaccgacgaagcctcggcgctggaatattgcggattccatcctcagttggtcgaaggccgtgcggataacattaaagtcacgcgcccggaagatttggcactggccgagttttacctcacccgaaccatccatcaggagaatacataatgcgaattggacacggttttgacgtacatgcctttggcggtgaaggcccaattatcattggtggcgtacgcattccttacgaaaaaggattgctggcgcattctgatggcgacgtggcgctccatgcgttgaccgatgcattgcttggcgcggcggcgctgggggatatcggcaagctgttcccggataccgatccggcatttaaaggtgccgatagccgcgagctgctacgcgaagcctggcgtcgtattcaggcgaagggttatacccttggcaacgtcgatgtcactatcatcgctcaggcaccgaagatgttgccgcacattccacaaatgcgcgtgtttattgccgaagatctcggctgccatatggatgatgttaacgtgaaagccactactacggaaaaactgggatttaccggacgtggggaagggattgcctgtgaagcggtggcgctactcattaaggcaacaaaatgattgagtttgataatctcacttacctccacggtaaaccgcaaggcaccgggctgctgaaagccaatccggaagactttgtggtggtggaagatttgggctttgagcctgatggtgaaggtgagcatattctggttagaatcctcaaaaacggctgcaatacccgttttgtggcggatgcactggcgaaattcctgaaaattcatgcccgtgaagtcagcttcgctgggcaaaaagacaaacatgctgttacggaacagtggttatgcgctcgcgtgccgggcaaggaaatgcccgatctgagcgcctttcaactggaaggctgccaggtgctggagtatgcgcggcacaagcgcaagctgcgtttaggggcgctgaaaggaaacgcctttaccctggttctgcgcgaagtgagcaatcgcgatgacgttgaacaacgtctgatcgatatttgcgtaaaaggtgtaccgaactacttcggtgcccaacgttttgggattggcggtagcaacttgcagggggcgcagcgctgggcgcaaaccaatactccggtgcgcgatcgcaataaacggagtttttggttgtcggcagcccgcagtgcgttgtttaatcagattgttgctgagcgcctcaaaaaagcagacgttaatcaagttgttgacggcgatgcgctacaattagccggacgtggtagctggtttgtagcaaccaccgaagaactggcggaattacagcgtcgcgtcaacgataaagagttgatgataaccgccgcattgccaggcagtggcgaatggggaactcagcgtgaagcgctggcattcgaacaagcagctgtcgccgcagaaactgaattacaagctttactggtgcgcgaaaaagttgaaaccgcgcgcagagcgatgctgctgtatccgcaacaattaagctggaattggtgggatgacgtcaccgtagagatccgtttctggcttccggcgggtagttttgcaaccagcgttgtcagggaacttatcaacacaacaggtgattatgcgcatattgctgagtaatgatgacggggtacatgcacccggtatacaaacgctggcgaaagccttgcgtgagtttgctgacgttcaggtggtcgcccccgatcgtaaccgcagcggcgcttcaaattctctgacactggaatcctccctgcgcacgtttacctttgaaaatggtgatattgctgtgcaaatgggaaccccgaccgattgcgtctatcttggcgtgaatgctctgatgcgtccgcgcccggacattgttgtgtccggaattaacgccgggccgaatctgggggatgatgttatttattccggtacggtagccgccgcgatggaaggccgtcatttaggttttccggcgcttgccgtctcgcttgacgggcataaacattacgacactgccgcggcggtaacctgttcaattttgcgcgcactgtgtaaagagccgctgcgcaccgggcgtattcttaatattaacgttccggatttacccttggatcaaatcaaaggtattcgcgtgacgcgctgcggtacacgacatccggcagatcaggtgatcccgcagcaagatccgcgcggcaatacgctgtactggattggcccgccgggcggtaaatgtgatgctggtccggggaccgattttgctgcggtagatgagggctatgtctccatcacgccgctgcatgtggatttaactgcgcatagcgcgcaagatgtggtttcagactggttaaacagcgtgggagttggcacgcaatggtaagcagacgcgtacaagcacttctggatcaattacgtgcgcaaggtattcaggatgagcaggtgctgaatgcacttgccgccgtgccgcgtgaaaaattcgttgatgaagcgtttgaacaaaaagcctgggacaatatcgctttgccgataggtcaggggcagacaatttcgcagccatatatggtggcgcgaatgaccgaattactcgagctgacgccgcagtcgcgggtgctggaaattggcaccggttcgggatatcaaacggcaatcctggcgcatcttgtccagcatgtttgctcggttgaacggattaaaggcttgcagtggcaggcacgtcgccgcctgaaaaatcttgatttacataatgtttcaacccgtcatggcgatggatggcaaggttggcaggcacgtgcgccgtttgacgctatcattgttacggcggcaccgccggaaattccaactgcgctaatgacgcagctggacgaaggcgggattctcgtcttacccgtaggggaggagcaccagtatttgaaacgggtgcgtcgtcggggaggcgaatttattatcgataccgtggaggccgtgcgctttgtccctttagtgaagggtgagctggcttaaaacgtgaggaaatacctggatttttcctggttattttgccgcaggtcagcgtatcgtgaacatcttttccagtgttcagtagggtgccttgcacggtaattatgtcactggttattaaccaatttttcctgggggataaatgagcgcgggaagcccaaaattcaccgttcgccgcattgcggctttgtcactggtttcgctatggctggcaggctgttctgacacttcaaatccaccggcaccggtcagctccgttaatggcaatgcgcctgcaaatactaattctggtatgttgattacgccgccgccgaaaatggggacgacgtctacagcgcagcaaccgcaaattcagccggtgcagcagccacaaattcaggctactcaacaaccgcaaatccagccagtgcagccagtagctcagcagccggtacagatggaaaacggacgcatcgtctataaccgtcagtatgggaacattccgaaaggcagttatagcggcagtacctataccgtgaaaaaaggcgacacacttttctatatcgcctggattactggcaacgatttccgtgaccttgctcagcgcaacaatattcaggcaccatacgcgctgaacgttggtcagaccttgcaggtgggtaatgcttccggtacgccaatcactggcggaaatgccattacccaggccgacgcagcagagcaaggagttgtgatcaagcctgcacaaaattccaccgttgctgttgcgtcgcaaccgacaattacgtattctgagtcttcgggtgaacagagtgctaacaaaatgttgccgaacaacaagccaactgcgaccacggtcacagcgcctgtaacggtaccaacagcaagcacaaccgagccgactgtcagcagtacatcaaccagtacgcctatctccacctggcgctggccgactgagggcaaagtgatcgaaacctttggcgcttctgaggggggcaacaaggggattgatatcgcaggcagcaaaggacaggcaattatcgcgaccgcagatggccgcgttgtttatgctggtaacgcgctgcgcggctacggtaatctgattatcatcaaacataatgatgattacctgagtgcctacgcccataacgacacaatgctggtccgggaacaacaagaagttaaggcggggcaaaaaatagcgaccatgggtagcaccggaaccagttcaacacgcttgcattttgaaattcgttacaaggggaaatccgtaaacccgctgcgttatttgccgcagcgataaatcgacggaaccaggcttttgcttgaatgttccgtcaagggatcacgggtaggagccaccttatgagtcagaatacgctgaaagttcatgatttaaatgaagatgcggaatttgatgagaacggagttgaggtttttgacgaaaaggccttagtagaagaggaacccagtgataacgatttggccgaagaggaactgttatcgcagggagccacacagcgtgtgttggacgcgactcagctttaccttggtgagattggttattcaccactgttaacggccgaagaagaagtttattttgcgcgtcgcgcactgcgtggagatgtcgcctctcgccgccggatgatcgagagtaacttgcgtctggtggtaaaaattgcccgccgttatggcaatcgtggtctggcgttgctggaccttatcgaagagggcaacctggggctgatccgcgcggtagagaagtttgacccggaacgtggtttccgcttctcaacatacgcaacctggtggattcgccagacgattgaacgggcgattatgaaccaaacccgtactattcgtttgccgattcacatcgtaaaggagctgaacgtttacctgcgaaccgcacgtgagttgtcccataagctggaccatgaaccaagtgcggaagagatcgcagagcaactggataagccagttgatgacgtcagccgtatgcttcgtcttaacgagcgcattacctcggtagacaccccgctgggtggtgattccgaaaaagcgttgctggacatcctggccgatgaaaaagagaacggtccggaagataccacgcaagatgacgatatgaagcagagcatcgtcaaatggctgttcgagctgaacgccaaacagcgtgaagtgctggcacgtcgattcggtttgctggggtacgaagcggcaacactggaagatgtaggtcgtgaaattggcctcacccgtgaacgtgttcgccagattcaggttgaaggcctgcgccgtttgcgtgaaatcctgcaaacgcaggggctgaatatcgaagcgctgttccgcgagtaagtaagcatctgtcagaaaggccagtctcaagcgaggctggccttttctgtgcacaataaaaggtccgatgcccatcggacctttttattaaggtcaaattaccgcccatacgcaccaggtaattaagaatccggtaaaaccgagaatggtcgttaacactgtccaggttttcagaccgtctgctaccgacaaccccagatatttggtcacaatccagaaccctgagtcattaatatgtgacgcgccaagcccaccaaagcaggctgccagcgtcaccaatacgcactgaatcggattcaatcccatcaccgcttctgagagtaacccgccggttgtcaggattgctacggttgctgacccctgcgatgcacgcagagccagtgaaataataaatgcggctggtaacagaggcaggtcaatcatttgtagcatattggcaagggctttgccgacgcccgattccaccagcactttgccaaatacccctccagcaccagtaaccaaaatcactaccgccgcagtgggaagggctgagcccataatgtcgctggtgtgttgtaagctccagccgcgacgtaaagccaataaccagaatgccagcaccagcgcaatcattagagctaccattggtgagccgatcagctgtagcgtaccaagcaggggatgcgaaggcggcatcagtgttgcggaaaccgtacccgccatgataatcgcgataggaataacaattagcgaggtgaccagcgcgacgcccggtggatttattttatcgcttaattttgtcgcgccttcctcactggccggagccagttgcatctgttccagtacttccaccgacatcgcatattggtgcttattgattattttcgctgcaaagtagccaacaatccctacgggaatagaaatcgcaataccgatgatggttagccagccgatgtctgcgtggagtaaccccgctgcggcgacagggcctggatgcggcggtaccgccacatgtacagttagcatgatcccagcgacaggcaggccaaatttgagtggcgatattttggcaaccttggcaaaaccgtaaatgattggcgcaagaataataaagccgacatcaaagaagacgggaataccgaggaagaacgctgccagagtcagcgcagcgatagttcgtttgtcacctaacttgcgactgaaataattagccagtgactctgcaccaccagagtgttcgatcatacgccccagcatagcgcccagaccaataataatagtgacggaaccaagcacaccgcccatcccggcgatcatcactttacccacttcgcccgccggtatacccgccgcaagtgcgactaacaggctgacgaggagcagagcaacgaatggttgtacctttgccttgatgaccagcagcaacagcatgattacgccagttaacgcaatgcataacaatgtaattgtggacatgggaaaccctgtctgaaagttatagttaacctaccccatccgtagatggggggatgtatgggtacgttgtaattagggatttaacgaattagcgccaggcgtcaaaccagccaagcccttcttcggtgaggccacgaggtttatattcacaaccgatccagccctgatatcccacctcatcgaacaggcggaacagccacggatagttgatttctccatcgtccggttcatgtcgatcaggtagtccggcaatttgtacgtgcgcatatttcccggcgtagtcgcggattaaatgcgtcaggttgccatctactttttgcgcatgaaaagtatctagttgaataaacacgttatctcgcgcaacctcttcaacaatagccagtgcctgatactggctggagaagagataatgaggcttaacgtcggggctgagtgcttcaactaatattcgcttgccgtgtagcgcaaagcggtcggcagcgtagcggagattatcgataaatactgcccggtaccgttcagcgtcttcgccagcgggcacgacgcctgccatcacatggacttgttcacaattgagcgccaatgcatattccagtgccaggtcgatgtctgcgtgtgcttcgtgctcacgtccgggaagggcggataatccccattcccccgcattaatatctccgggagcggtattgaacagcgccagtgtcagatggttttgctccagttgcttttggatttgcagggtggagtagtcatagggaaacagaaattccacagcatcgaacccggcttttcgcgctgcggcgaagcgttcaataaaaggcacttcggtgaacatcatggataaattagctgcaaaacgaggcattgcattaactccttaattccgcaatttcacctgcggtcagataacggatcgggcggtcaccgagaataaaaatcagctttgccgtttcctccagctcttccatattgttggcggcttcttgcaggctttcaccgcaaaccactgggccatgatttgccagtaaaaaagcctgattgtctgctgccagttccgccagatcctgtgcgatgcgtttatcgcccggtcggtaataaggcaccagcgggacatttcccatccgcatcaccacgtatggtgtgaacggacgaataacgttgctgctgtccagcccttgcaggcaggaaagcgccgtcgaccatgtgctgtgcaaatgcaccaccgctttacagcgcggattgttgcgatacagcgccagatgaaagagcacctctttcgagggtttgtcaccacttaaccattcgccatccgcggcgactttggaaagccgctgcggatcgagattgcccaggcatgaacctgtcggtgtcgccagtaaattcccgtcaggtaaaagcagcgacagattgccagccgaaccggttgcatagccgcgctgaaagaatgaactggcaatccgcgtcatctcctctcgcaaagactgctctacttttgcgaaatcgctcatgataaaaactctctttgggctcgtgaaaaaaaggcttcatcaccgaagttgccagatttaagggcgagtgagacaggcttatccagtgcgtttacccacggcacgccgggggaaatggttgggccaatatgaaacccttttatgcccaggctctgtgtgactacgccggaggtctcaccgcctgcgacaataaagcgtgtcacgccttccgctgctaaccgcgccgctagttgagaaaacagagtttctactgcctgactggctttttgtgcaccgtattgctgttgaattgctgccaatgcgtcagtgctggcggtggcaaaaaccagtggagcaagtacactttcctggcccagaacccactctgccagttcgtgtgcataagcggccagagtttcggttgagaggcagcgtgccacatcaacttcacgggctggtgcaatttgacggtaatgtgccacctggcggttggtcatttgagagcatgaaccggagagcactacgccgcgcccagcgagcggatgccctgcttcgcgagcctggttaccgttttcttgcgcccactgccgggccaggccaatcgccagaccagaaccgcccgttaccagtggggcatcgcgcaaggcttctccctgaatttccagatggtgttcggtcagcgcatcaagcaccgcgtagcggtagccctcttgctgtaagcgagccagctcttgacgaacggcatccacaccttgttcgaaaacatgtgccgaaacgacgccgcagcgccctgtggattgcgcttcaaccagacggggaagatagctgtcggtcatgggatttaccgggtgatggcgcatcccggattcggccagcagttgattcattacgaacaaatacccctgataaaccgtacgtccgttgaccggcagggccggagagaagaccgtaaacggcgtgtcgagagcatccattaatgcatcggtaaccgggccgatattacctttcgccgtactgtcgaaagtagagcagtatttgaaatagatctgtttgcaaccttgctgttgcaaccagctcagagccgccagcgattgctgtgtggcttcaaccaccggacaggagcgcgttttcaggctgatcaccagtgcgtcgattgcttccggcattttacctgttggaacaccgttaatttgtaccgttggtagaccgttttccaccagaaaactggcgatatccgtcgcgccggtaaaatcatcggcgataacgccaatcttgatcatgatttcgctcccggtagagtgatgccagagaaaatcttgataactgcgctatcgtcttctttcccgtaacctgcgttactggcgctggtgaacatattcaatgctgttgaggccaatggcagcgggaagtgcagggctttggctgtatcggcaaccagaccaagatccttaacaaaaatatcgacggctgaatgcggggtgtaatcgccatccaccacatgacgcatccggttttcgaacatccaggaatttccggcggcattggtcacgacgtcatacatcacatccagcgggatccccgcacgggctgcaagtgccatcgcttcggctccggcagcaatatgtacgcccgctaacaactggtgaataatttttacggtcgaacctagtcccggttctgcacctatgcgataaacttttccggcaacggcttccagcacgggtgccagtcgttcaaaggcaatatcgctaccggaggccatgacagtcatttcaccgttagcggcttttactgcaccaccagaaactggcgcatccagcatttccagatcgaatccagccagagcggtagcaatttcttgcgcatcagcactagcgatagtggaagaaaccattactgccgtaccgggtttcagatgttgtgcaacgcctgtttcaccaaacagcacctgtttaacctgggccgcattgaccaccagcaccagcagagcgtccagtttttcggcaaacgtcgcggcgttatcagaaaccccgcaagcacctgcctctttcaacgtagcgcaggcattgctgttcaggtctgcgccccaggtagaaagacctgcgcggacacatgacagtgctgctcccattcccattgaccctaagccaacgataccgacatgaaactcagatcccgttttcatctgctctccttgttaatttaagtgatattttgtttgatattgtgaatataagcgctggaagataacgatatggtgagctgattcacataaattaacattgtgtgttattttatgtgaactaagcgttagttgcgccgcgcacgtttcgcaggcaaatagcgtagaatgtcagcaggacaaaggaaggagcaaaagttgatacccgtagagcgtcgccaaatcatccttgagatggtagctgaaaaaggcattgtcagtattgctgaactaacggacagaatgaatgtgtcacatatgaccattcgtcgggatttacaaaaactggagcagcagggagccgttgtgctggtgtccggaggcgtccagtctccgggacgcgtggcgcatgaaccttctcatcaggtaaaaactgcgctggcaatgacgcaaaaagcggctattggcaagctggcggcaagtcttgttcagccgggaagctgtatctatctggatgcgggaacgaccacgttagcgatagcacagcatctgattcacatggagtcactgactgtggtcacaaacgatttcgttattgcgaactacttgctcgacaacagtaattgcacaattattcacactggcggtgcagtgtgtcgggaaaaccgttcctgtgtcggggaagccgctgcgaccatgctgcgcagcctgatgattgatcaggcttttatttctgcatcgtcatggagtgtgcgggggatttctacgccagcggaagataaagtcacggtgaaacgggcgattgccagtgccagccgccagcgagttttggtctgtgatgcgacgaaatatggtcaggtggcgacatggctggcgttaccattaagcgagtttgatcagattatcacagacgacggtttgccggagagtgccagtcgcgcgctggcgaagcaggatctctctttgctggtagcgaaaaatgaataatggcctgcaataacatttggttactcatgcttcacagaagaagcatgagactactttattttataaaatgacagccgcccgcttttcggcgtgccggtatcaatataaatctggttagcgaacgtctgaatgttatcaaacatcatatgtccaaatataaaataatcagcgccgtttatttgttgtaactcgccattaagcgatttctgcacacgatcaacaggccagagtaattcgctctccgctatttctttaccaaagagatattcactccccggataatctgcatgtgcgatgacatattttatgttgtcgttagtgatttcaataatatgtggaaggtgatggaatttcagcaacagatctattgcctcttgttgctctgaatcatttaaatcgaaaaaccagtcaccaccgctggcaagccacatattgccatcgccagtttcgaatgcatccaacgccatcgcttcgtggttgcctttaaccgacgtaaaccagggttggtttagcaggcgcagcacgttaagactcttcggcccacgatcaatattatcgcctgtggaaataagtaagtcggtttcagggtaaaaagagagttgatgtaaacgggattgtaataactgatattcaccatgaatatcaccaacgacccatatatggcgatagtgatgggcattgattttttgatagcgtgtagatggcatggttttaccctgtaaaataagctttcctattatacagggtatttttatttgattcgtcagttgtcgttaatattcccgatagcaaaagactatcgggaattgttattacaccagactcttcaagcgataaatccactccagcgcctgacgcggagtcagtgaatccgggtcgagattttccagtgcttcgaccgcaggcgaagtttcttctggcactgacagcaaagacatctgcgtaccatccacttgcgtcgcggcggcgttcggcgaaatgctttccagctcacgcagtttttgccgtgcgcgcttaatcacctcttttggcacgcccgccagagctgcaaccgccaggccgtagcttttgctcgccgcgccatcctgcacgctatgcataaaggcaatggtgtcgccgtgctccagcgcatcgagatgcacgttggcgacgccttccattttctccggtaactgggtcagctcgaaatagtgggtagcaaataacgtcaatgccttaatcttattcgccagattttccgcgcacgcccacgccagcgacagaccatcgtaggtggacgttccacgcccgatctcatccattaacaccagactgtattcggtggcgttatgtaaaatattggcggtttcagtcatctccaccataaaggttgagcgcccggaagccaggtcatctgccgcgcctacgcgggtaaagatgcgatcgataggtccaatctcgactttttgtgccggtacatagctgccgatgtaggccatcagcgcaatcagtgcggtctggcgcatataggtacttttaccgcccatgttcgggccggtaataatcaacatacggcgctgcggcgacagattcagcgggttagcgataaatggctcattcagtacttgttcaactaccggatggcgaccttcggtaatgcgaatgcccggtttatcaatgaaggtcgggcaggtgtagttcagggtataggcccgttccgccaggttaaccagcacgtcgagttccgccagcgcgctcgcgctctgttgcaacgcttccagatgcggcaacagcaggtcgaacagctcttcataaagctgtttttccagtgccagtgctttgccttttgaggtgagaactttatcttcgtactcttttagctctggaatgatgtagcgctcggcgtttttcagcgtctggcgacgcatgtagttgatgggtgccagatggctttgcccacggctgatttgaatgtagtagccgtgcaccgcattaaagccaactttcagcgtgtccaggccggtacgttcacgctcgcggacttccagacgctccagataatcggtcgcgccgtcagccagcgcgcgccactcatccagctcttcgttatagcccgatgcgataacaccaccgtcgcgtaccagcaccggcggtgtgtcgatgattgctcgctccagcagatcgcgcagctcggcaaactcgcccatcttctcacgtagcgcctgtaccggtgcactatcgacagtttctaactgcgcacgcagctccggcagttgctggaaagcgtggcgcatacgggccagatcgcgtgggcgagcagttcgtaaagccagacgtgccagaatacgttccaggtcgccgacctgacgcagtaccggctgcaactcggcggtgaaatcctgcaatgcgccaatagtttgctggcgctcaagcaacacgcgggtatcgcgcactggcatatgcagccagcgtttcagcatacgactacccatcggcgtgacggtgcagtcgagcacagaagccagcgtattttccgcaccgcccgccaggttctgagtaatttccaggttacgacgtgtcgcggcatccataatgatgctgtcctgctcacgttccatggtgatagaacgaatatgcggcagggtcgtgcgttgggtatctttcgcatactgcaacagacaaccggcagcacaaagtccgcgcggcgcgttctcgacgccaaaaccgaccagatcgcgggtgccaaattgcagattcaactgctggcgcgcggtgtcgatttcaaactcccacagcgggcgacggcgcaggccgcgacggccttcaatcagcgacatctcggcgaaatcttctgcatacagcagttccgccggattagtgcgttgcagctctgccgccatcgtttcgcggtcggccggttcgctcaggcgaaaacgcccggagctgatatccagcgtcgcgtagccgaaacctttgctgtcctgccagatagccgccagcaggttgtcctgacgctcctgtaacagggcttcatcgctgatggtgcctggcgtaacgatacgcacaactttgcgctcaaccggatccttgctggtcgccggaccgccaatttgttcgcagatggcaacggactctccctgattcaccagtttggcgagatagttttccaccgcatggtagggaatccccgccatcgggatcggctctcccgccgaagcaccgcgtttggtcagtgaaatatccagcagttgcgacgcgcgttttgcgtcgtcataaaacagttcataaaaatcacccatccggtaaaacagcaggatctcgggatgctgggctttcagcctgagatactgctgcatcatgggcgtatgggcgtcgaaattttctattgcactcatggggttatgtccggttccctgatattaaatggggtgtgatggtttttattttcgttgtaatcacataaggcgcacatgataccggagttaatcatttcaggggaagaagcgaacggcgagttcttgatgctggttccgggaaagatgctgttttgcagcttttgcgtgatgcttatgaagcaagtacgcaaaattgcgtcggttgaataaacctcctccttcagagccatagtcccctttcaaattaagttgtaatataaatacaccttaagagtatggaggcagcatgtccggcaagcgtatctctcgtgaaaaactgacgattaaaaaaatgatcgatctttatcaagcgaaatgcccgcaggcgtcagcggagccggagcattacgaggcgttgtttgtttacgcgcaaaagcggctggataaatgtgtgttcggcgaagagaaaccagcctgtaagcagtgtccggtgcactgttaccagccagcaaagcgtgaagagatgaaacagattatgcgttgggccgggccgcgaatgctgtggcgtcatccgatcttaaccgtgcgtcatctcatcgatgacaagcgtccggtgccagaactgccggaaaaatatcgtccgaaaaaaactcgtgaatagtatgccggacaggcagatctgtccggcaatttgcagttaaatcaatgccgatttatcaattccaagccgcttcatccgtgacagcaaggtcgtgcgtttcagccccagacgttgcgcagcgcctttaggcccggcaaccacgccgttggtttctttcagcacgcgaacaatcaactgatattcatcttcgccctcctgggcgacaaccgttgcggcaggcggcgtttcaggttccggtaaaacaatatctggcaatgacagctgcagcacgttaccgcgtgttagcaataccgcgcgctcaatgacgttttccagttcgcgtacgttacccggccactccatgttgctcaaggtgcgcagcgtcnnnnnnnnnntgtcgatattgcgccccagacgacgggcaattttgaaggtaaaggctttcgccagcagcggaatatcttccggacgctcgcgtagtggcggcaggtgaatcgggaatacgttcaggcggtaatagagatcgctacggaactcacggtcggcgaccatttttttcagatcgcggttagtcgcggcgattagacgcacgtccgtctgaatgattttgttgctgccgagacgttcaaactcctgttcctgcaatacacgcagcaacttcggctgtaactccagtggcatatcgcccacttcgtcgaggaacagggagcttttatccgccagttcaaaacgaccaatgcgctgggcgctggcaccggtaaaagccccacgctcatgaccaaacagatcgctttccagcaatccggcaggcatcgccgcgcagttcattttgaccatgcggcgattattacgcccactgagattatggatcgcacgggcaatcagctctttacccgtgccagtttcaccgaggatcagcacggtactgtcactttgcgccaccatttcaacttgtttaagcacgctgtacatggcttcgctgcggccaataatctcgccaaattcactatcaacattgttgagctgctcggtcagggcgaggttttcatcaaccagccgttctttcagacgatggatttcctgataggcgagggcgttatcgacagcgattgccacacgttcggcaatctggcgcagtaaattcagattggtagtggtaaacactttctcttcgcattgcgccagtttcagcacgcccagcatggtgtcgccagacatcagcggtaacaggcacaaggtttgaatctggttgccccaggtgtcgaacaacatgcgttcatagggggctaaatcgtcccgctcgtggagattgatcagcagcatctctttacttttgaacacgcgttcggtgagggttccggcttcatcgacttcgctctgttcgtgggcgggatgttgtttatcaagatagtgagtggagtagatgttgagtttgtttttacggtggctgcgtaagacaatgctgatatcgtcaatgtcgaaatagtaatggatttctttggcgacttcgctgaccagttcgtccatatccaggcgggaaagcaccgcgttggtaatggcaaccaggatgcggaagttatcgcgctcccggcataacaactcatagtcgacattgttgacgacgcggctctggatttgttcggtgacgacagaaacgatctgcgtaaatgtttgcagacgattgaactctttttcgctccaggggcgatcgtcataacgaataaattcacagccaccaaaaatatgcccttccgccgccagtggcatcaggcaatagtgaccaaatttggggtatagcccacctgcggccagctgcggccaggtttcacaaaattcttcgtaactgcaatgcagcgtatcagggcgcgacaaaatgctgcgtaccggaccgtgtgccagaacagtttcgtcttcatatttaatgggggtgtctttttcacgcgatgcgtaataagacgcacgttgagtctgcgcttgccacaacacaatagccgcgttgtcggcgagcgcagaacgctttaccagttgcgaaagagcctcacacagcgaggccagatcgggctgctgcaatagtgtccgagtgatgtcgaacaacccttgctgtccgagatcactcatcggtgtatatgacattttgttcttccaggaaagcaccgcaaagcggtgcaaaaggtcattgactaactataggagatttagaattttattagcatatacgcggaagcggttcggcgtgtggtaaatcgagggttcgtttcacgccatacagaccggcaagacgaacacctttacgttccaccacttcaccaatcagcgccgcgtctttccccagtggatgggaatgtaacgctgccagcacttgctctgccgcgttgcgttcaacagctattactagtttgccttcgttggcaaagttcagggcgtccagtcccagcaattcgcaaacgccacgcacggcaggtttaacaggcagtgccgcttctgaaagttcaataccacaaccgcaggctgccgcgaactcatgaaccaccgcgtttacaccaccacgggtggcatcacgcagcgctttcacgccgggaatgtcacgcagcgtctgaataagcggcgtcagcaccgcgcagtcgctgaccagttcgccatccagccccagctgctcacgcaggttaaggatagtcgccccgtggtcgccgagtgtaccgctcaccagcaatacatcgcctgcggttagcgtctgtgcgccccagtgaatattcgccggaattgcgcccatgccagcggtgttgataaacagtttatctaccgcgccgcgctgcaccactttagtatcgccagtaacgatggcaatgcctgccgtgcgggcggtttctgccatgctggtcactacggctttcagtgtctccatcggcaatccttcttcgaggataaagccacaggagagatagcgcggaatagcgccactgaccgcaacgtcattcgcggtgccgcaaatcgccagcttgccgatattaccgccaggaaagaacagcgggtcaatgacgtaactgtcggtggagaacgccagacgatcgccttctgctaccagctgcgccagatcaagacgtgcctggtcttcctgctctgccagccacgggttggcaaaggcttccataaacaggctgttgattaattgctgcatcgcctggccgccgctgccgtgggcgagttggatattattcacgcttcattctcctgctgacgatactgataccacgcggcgcacgctccttcggaggagaccatcagtgcaccaaatgcggtttgaggattacaggtgttaccaaacagcgggcattgatgcggcttacatttgcccgttaatacttcaccacaacgtgcgcgcgggtcatcgcagacctgctgcggtgccgggcggaaatgtgcttcggcatcgaatcgttgatagtccggcgtcaggtgtacaccagaagattcaatcacgcctaagccgcgccattcgctgtcgccgttgacgcagaagacatccgcaatcgcctgttgcgccagcaggttaccggcatccggcactacccgccgatactgattttctaccttgctatgagcagctattttctgctccaccagcatgaccacgccttgtagtagatcaaggggttcgaatccagcaaccaccagcggacgatgaaaatcgctggcgataaaattataggcgttggtgccgataaccatactgacgtgacctggcgcgaggaacgcatcgataccgttatccggctgttccagcaaactgcgcaacgtcgggataagcgtaatgtgctggcagaagaagtaaaaattctgcacatcacgcgctttcgcctgttgcagagtgatggcggtggtcggcatggtggtttcaaaacctaagccgaagaacaccactttgcgggttggattctcctgcgccagtttcaacgcatccattggcgagtaaacgatgcgaacatcggcaccgcgtgcttttgcctgcaacagcgatccctgtttccccggcacgcgcatggcgtcgccaaaggtacagaagatgacttccggatggctggcaatctccacgcaggtgtcgattctacccatcggcagtacgcacaccgggcaacccggaccgtggataaactcaacgttttcaggcagtaactggtcgaggccgaatttaaaaatggcgtgggtatgaccaccgcacacttccataatccgcagagggcgttcggctgtgtaagagagatgtgaagcacgttcgcgcagatgctcaattaactgcatcacctgttccggcgcgcgatattcatcaacaaaacgcattatttttcctcgccatacaacagcgcgccgacatccggctcaacgtcaaacatgttttgtaaggcgtcgagagtgtcgcgtgcttcggcttcattaattacgctcatggcaaagccaacgtgtaccagtacccactggcccacgcgcggctgaccgttttcatcgcagctgccgactaacgttaaatcgacatcgcgctgaatgccgcagacgtcgactttcgcctggttgccgtcaatggtgcggatctggccgggaacgcctatgcacatcgctgtgtctccagccagttcagccactggtccatcccttcgccgctggtggcggaaataaggatgatttcaatttctggattgacttcgcgggcgcaggcgatgcacttctcaacgtcaaagttgagatacggcagcaggtcaactttgttgagcagcatcagcgaggcggcggcaaacatatgcggatatttcagcggtttgtcttcaccttcggtaacggaaagcaccgccactttgtgtttttcaccgagatcgaagctggccgggcatacgaggttgccaacgttttcgataaacagaataccgttatcgtccagtggcaggcgcggtgcggcttcggcaatcatctgtgcgtcaagatggcagcctttaccggtattcacctgaatcgctggtgtgccggtagcgcgaatgcgtgcggcatcgttcacggtttgctgatcgccttcaataactgcgcacggaacgctgtctttcaggcgcattagggtttccgtcagcagggtggttttaccggaaccagggctggaaaccaggttgagcaccagttgcttgcgggcagcaaagcgcgcgcggttgcgttcagccagacggttatttttgtccagcacgtcaatttcgacttccagcatccgacgctggctcatgcccggcgcgtgagtgcctgcttcgccatgaccgtaatgcaggtcgccttcttcagtctggctgggggtaaattcaggcgctttaatgccgctgattttcatcttcgggcgtgccgccggggcaaatggcgcgctacgaaacgcggaatgagggttatgttcatcaccctcgatatacaggttgccttcaccgcaaccgcatgttgtacacatcgctcactcctggtctatttctatccgccgaatctgtaaaccgtcgtctgccacaatctgtagcatgtcaccatgacactgtggacagcggcggacgcgctgggtcagtagcgtcacatactgttggcatgtttcacaccagcattcggcctcttgttcttcgaggtgcagtttacaaccttccgccacgctgccgcggcaaaccagatcaaaacaaaaggcaagagagctggtttcgacacaagaaaatgcgccaattttgagccagaccccagttacgcgttttgcgccgtgttttgcggcctgctgttcgatcaattccagtgcccgttggcagagggttatttcgtgcatatcgcctcccattaactatggccagctacaagcaataattgtgccagtattgattatccctgcggtgaataatgtcgatgatgtcgaaatgacacgtcgacacggcgacgaaattcatctttagcttaaaaatcgttttaataacaatgaattaaaagttggcacagaaaatgcttaaagctggcatctctgttaaacgggtaacctgacaatgactatttgggaaataagcgagaaagccgattacatcgcacagcggcatcgtcgcctacaggaccagtggcacatctactgcaattcgctggttcaggggatcacgttatcgaaagcgcgcctgcatcacgccatgagctgcgcgccggacaaagaactctgtttcgtcctttttgaacattttcgcatttacgtcaccctggcggatggctttaacagccacaccatcgagtattacgtcgaaacaaaagatggcgaagacaaacagcggattgcgcaggcgcaactgagcattgacggcatgattgatggcaaggtcaacatccgcgatcgcgaacaggttctggaacactatctcgaaaaaatcgctggcgtttacgacagcttatacaccgctattgaaaacaatgtgccggtgaatttaagccaactggtaaagggacaaagcccggcagcatgagctgaggctttgcccgttttgcaggcgttacgcctgtttggggatgggcgtgtcgatgagtgtcgaaaatgacatttcatcggcatgttttcgtcaaaaatgacaatcacctgaggaatgcctggtgaatcgttttgtaattgctgactccacgctctgtatcggctgccacacttgtgaggccgcctgttcagagacgcatcgccagcacggcctgcaatcaatgccgcgcctgagagtgatgctgaatgaaaaagaatctgcgccgcagctctgtcaccactgtgaagatgcaccctgcgcggtggtctgcccggttaacgccatcacccgcgttgatggggccgtgcagttgaatgaaagcctgtgcgtaagctgcaagctgtgcggcatcgcctgcccgtttggcgcaattgaattttccggcagccgtccgctggatattccggcaaacgccaataccccgaaagcgccaccggcaccgcctgctccggcgcgtgtcagcacattgcttgactgggtgccaggtattcgcgcgatcgccgtcaaatgtgacctttgtagctttgatgaacaaggtccggcctgcgtgcggatgtgcccgactaaagccctgcatctggtggataacactgatatcgcccgcgtcagcaaacgtaagcgtgagctgacttttaacacggactttggcgatctcaccttgtttcagcaggctcaaagtggagaggctaaatgagcgcaatttccctgatcaatagcggcgtggcgtggtttgtcgccgccgctgttctggcatttctcttttcttttcaaaaagcgttaagtggctggatagctggaattggcggcgcggttggtagtctgtatacggcagccgcgggcttcactgtactgactggcgcggttggcgtgagcggtgcgctgtcgctggtaagctacgatgtgcaaatctctccgcttaacgcgatttggctgattacgctcggtctgtgcggtctgtttgtcagcctctacaacattgactggcatcgccacgcgcaggtgaagtgcaacggcttgcagatcaatatgttgatggctgccgccgtctgcgccgtcattgccagcaacctcggcatgttcgtggtaatggccgaaatcatggccctgtgcgcggtgttcctcaccagcaacagcaaagagggcaaactgtggtttgcgctggggcgtcttggcactctgctgctggcgattgcttgctggctgctgtggcagcgttatggcacgctggatctgcgcctgctggatatgcgtatgcaacagctgccgctcggttccgatatctggctgctcggtgtgattggctttggcctgctggccgggattattccgctgcacggctgggtgccgcaggcacatgctaacgcctctgcgccagctgccgcgttgttttctacggtagtcatgaaaattggcctgctgggcattttaaccctgtcactgctgggcggtaatgcaccgctgtggtgggggatcgcgctgctggtgctcggcatgatcaccgcgttcgtcggtggtctgtatgcgttgatggaacacaacatccagcgcctgctggcttaccacaccctggaaaatatcggcattatcctgctggggctgggcgctggcgtaacgggtatcgcgctcgaacaaccggcactgattgctcttggcctggtcggtggtctgtaccatctgcttaaccatagcctgttcaaaagcgtactgttcctcggagcggggagcgtctggttccgtaccggtcatcgcgatatcgaaaaactcggtggtattggcaagaaaatgccggttatctccatcgccatgttagtcgggctgatggcaatggctgcgctgccgccgctgaatggttttgccggggaatgggttatctatcaatccttcttcaaactgagcaatagtggcgcgtttgttgcccgtctgctggggccgctgctcgccgtgggtctggcaattaccggtgcgctggcggtgatgggtatggcgtaagtctatggcgtcacgttcctcggcgcgccgcgtaccaaagaagccgaaaacgccacctgtgcaccgctcctgatgagcgtaagcgtagtggcactggcgatttgctgcgtaattggcggtgttgctgcgccgtggctgctgccgatgctgtctgctgctgtacctctgccgctggagcctgctaacaccaccgtttctcaaccgatgatcacgttgctgctgattgcccgctgctgccattcatcattatggcgatttgcaaaggcgatcgtttgccatcgcgttcccgcggcgcggcctgggtgtgcggctacgaccacgaaaaatcaatggtgattaccgctcacggttttgccatgccggtgaaacaggcgcttgcgccagtgctgaaactgcgcaaatggctgaatccggtgtcgctggtgccgggctggcagtgcgaaggtagtgcgttgctgttccgccggatggcgctggttgaactggcggtactggtggtgattattgtttcacgaggagcctgagaatgagtgttttatatccgttaattcaggcgctggtgttatttgccgttgcgccgctgctctccggtattacccgcgtggcgcgcgcccgtctgcataaccgtcgtgggccgggtgtgttgcaggagtatcgtgacattttcaaactgctgggccgccagagcgttggcccggatgcctccggctgggtgttccgcctgacgccgtatgtgatggtgggcgtcatgctgactatcgctactgcgctgccggtggtgaccgtcggttctccgctgccgcaactgggtgatttaatcaccttactgtatctctttgccatcgcgcgtttcttctttgccatttctggtctggataccggtagcccgtttaccgctatcggcgcgagccgtgaagcgatgcttggcgtgctggtcgaaccgatgctgctgcttggtctgtgggttgccgcacaggttgccggttccaccaacatcagcaacatcaccgacaccgtttatcactggccgctgagccagagcatcccgctggtgctggcgctttgtgcctgtgcgttcgccacttttatcgaaatgggcaaactgccgttcgacctggcggaagccgagcaggagttgcaggaaggtccgctctccgaatacagcggtagcggctttggcgtcatgaaatggggtatcagcctgaaacagctggtggtgttgcagatgttcgtcggggtgtttattccgtggggacaaatggaaaccttcaccgccggtggactgctgctggcgctggtgattgccatcgtcaaactggtggtcggcgtcctggttatcgcgctgttcgaaaacagcatggcccgtctgcgtcttgatattactccgcgcattacctgggctgggtttggctttgcatttttagcgttcgtctccttgctggcggcgtgattaaagagagtttgagcatgtctgaagaaaaattaggtcaacattatctcgccgcgctgaatgaggcatttccgggcgtcgtgctggaccacgcctggcagaccaaagatcagctgactgtcaccgtaaaggtgaactacctgccggaagtggtggagtttctttactacaaacagggtggctggctgtcggtgctgtttggtaacgacgaacgcaaactgaatggtcattacgccgtttattacgtgctgtcgatggagaagggcactaagtgttgggtaacggttcgcgtcgaagttgacgccaacaaaccggagtatccgtccgtgacgccgcgcgttccggcggctgtgtggggcgagcgcgaagtgcgcgatatgtacggtttgattccggttggtctgccggatgaacgtcgtctggtgctgccggatgactggccggatgaactttatccgctgcgtaaagacagcatggattatcgtcagcgtccggcgccgcccaccgatgctgaaacctacgagttcatcaatgaactgggtgacaagaaaaacaacgtcgtgccgattggtccgttgcacgtcacttccgacgaaccgggtcacttccgtctgttcgtcgatggcgaaaatattatcgacgccgactaccgcctgttctacgtccatcgcggcatggaaaaactggcggaaacccgtatggggtacaacgaagtgaccttcctctctgaccgtgtgtgcggcatctgcggctttgctcacagcaccgcctacaccacgtcggtggaaaacgcgatgggtattcaggtgccagaacgtgcgcagatgatccgcgccattctgctggaggtggaacgcctgcactcgcatctgctcaacctcggcctggcctgtcactttactggcttcgactccggctttatgcagttcttccgcgtgcgtgaaacctccatgaaaatggcagagatccttaccggtgcgcgtaaaacctacggcctgaacctgatcggcgggattcgtcgcgatctgctgaaagatgacatgatccagacccgccagctggcgcaacaaatgcgtcgtgaagtgcaggagctggtggatgtgctgctgagtacgccgaacatggaacagcgcactgtcggcattggtcgtctggacccggaaatcgcccgcgatttcagtaacgttggcccgatggtccgcgccagcggacacgctcgcgatacccgcgccgatcacccgtttgttggttatggcctgctgccaatggaagtccacagcgagcagggctgcgacgttatttcccgtctgaaagtgcgtatcaacgaagtctataccgcgctgaacatgatcgactacggtctggataacctgccgggtggtccgctgatggtggaaggctttacctacattccgcaccgtttcgcgctgggctttgccgaagcgccgcgcggcgacgatatccactggagcatgaccggcgacaaccagaagctgtaccgctggcgctgccgtgccgcgacctacgcgaactggccgaccctgcgctacatgctgcgtggcaataccgtttccgatgcgccgctgattatcggtagcctggacccttgctactcctgtaccgaccgcatgaccgtggtcgatgtgcgtaagaagaagagcaaagtggtgccgtacaaagaactcgagcgttacagcattgagcgtaaaaactcgccgctgaaataaggaatcgccatgtttacctttatcaaaaaagtcatcaaaaccggcacggcgacctcgtcttatccgctggagccgattgcggttgataaaaacttccgtggtaagccagagcagaacccgcagcagtgcatcggctgcgcggcctgcgtcaatgcctgcccgtcaaacgccttaacggttgaaactgacctcgccacaggagagcttgcgtgggagtttaatctcgggcgctgcatcttctgtggacgctgcgaagaagtctgcccgacggcagcgatcaaactgtcgcaagagtacgaactggcggtgtggaagaaagaagatttcctgcaacagtcccgttttgtgctgtgcagctgtcgcgtctgcaatcgtcctttcgccgtccagaaagagatcgactacgccattgcgctgcttaagcacaatggtgacagccgcgcggaaaaccaccgcgaaagctttgagacttgcccggaatgtaagcgccagaaatgcctggtgccgtccgaccgtattgaactgactcgccatatgaaagaggccatctgatgagcaatttattaggcccccgtgacgccaacggcattccggtcccgatgacggtggatgaatccatcgccagcatgaaggcgtcgttactgaaaaaaatcaaacgttctgcctacgtttaccgcgtggactgcggcggctgcaacggctgcgaaatcgaaattttcgccacgctttcgccgctgtttgatgcagaacgcttcggcattaaagtcgttccttcaccgcgtcatgcggatattttactgtttaccggcgcggtcacccgtgcaatgcgatcccctgcgctgcgtgcgtggcagtccgcgccggacccgaaaatctgtatctcctacggtgcctgcggtaacagtggcgggatcttccacgatctctactgcgtgtggggcggtacggataaaatcgtcccggtagatgtctacatccctggttgcccgccaacgcctgccgccacgctgtacggctttgcaatggcgctcggcctgctggagcagaaaattcacgcccgtggcccgggtgagcaggatgaacaaccggcggaaatcctgcatggcgatatggtgcagccgctgcgtgtgaaagtggatcgcgaagcacgccgcctggcaggttatcgttacggtcgtcagattgccgatgacttcctgacacagttagggcagggcgaagaacaggttgcacgctggctggaagcggaaaacgatccgcgtctgaacgagattgtcagccatctgaatcatgttgtagaagaggcgcgtatccgatgagtgaaaaggtggtgttcagtcaactgagccgtaaatttattgatgagaacgatgccacgcccgccgaggcgcagcaggtggtctattacagcctggcgattggtcaccaccttggggttatcgattgcctggaagcggcgctcacctgcccgtgggatgaatatctggcatggattgccactctggaggcgggcagcgaagcccgccgcaaaatggaaggcgtgccgaaatatggtgagatcgtcatcgacattaaccatgtgccgatgctggccaacgcattcgataaagcccgggcagcgcaaacttcgcagcagcaggaatggagtacaatgctgctaagtatgctgcatgatattcatcaggaaaacgccatctatttgatggtgaggagactgcgtgactgacgttttactctgtgttggcaatagcatgatgggcgatgatggcgcaggcccgctgctggcggaaaagtgcgccgccgcgccgaaaggtaactgggtggtgattgacggcggtagtgcaccggaaaacgacatcgtcgccatccgtgaactgcgccctacgcgactgctgattgtcgacgccactgatatggggctaaaccccggcgagatccgcatcatcgacccggatgatatcgccgagatgtttatgatgactacccataacatgccgttgaactaccttatcgaccagttgaaagaagatattggcgaagtgattttcctcggcatccagccggatatcgtcggcttttactacccgatgacccagccgattaaagatgcggttgaaaccgtttatcaacgactggaaggctgggaagggaatggcggcttcgcgcagttagcggtggaagaagaataattctccatcagggaattcagcgaaatgaatatcagaacagggatgtgcgcttttttattgagcttagtgctgcctgcacaggccaccagctttaccgaatatctgccaatgagtgacagcgaatacgcgcaaaagcgggcgctgaaacctctcctgaccatgccttatgatgccgagcaaacctggcattttagaaaagtgggcgttgctggcgtgacgcttgaaaagatgccaaatgatgatagtgaatggcaattgaacggtaaagatcgcgccggtaaatcctggtctgtgcctgtgggtatgctggcaaacatagcgggcaaagggcaactctatcgcgccgatcttgatcgtaacggcattcaggatctggttatctggttaccaagtaccggtaatggtctggctccttatgcacatttaattcttatgacgttcacgcgcgaaggccgtccctgtgtctttgaacccaggggattctacaccgcaagcaaaactggcgtagatgatttgctggatttgcaaggcaatggtcacacgcaattgctggatatgcagtttaattctggttactggataaccagtctgtatcaggtaaaagacgccaaatggcagcgtgttcacggctggtttggcaagttaagctatcccgcgctcacgcgttttacttatacccccaaccgtaaactcgtcctcaaacccatcgccgggcgcgacccgcaaacggaagatctggcgcagacgcagcgttgcttgataaagggggatgtgcttgaggggtgaaccagaactgactttttgcagagtggctatgaggattttgggggtaattatatcgcgcacaagtgtttacatattgtgaacttggatttgatgagctatagtttccgaacacataaggatagaacatcgcagatgtggctgtttacttactatcaggaagttaaaacttaaaaatgcacatcatttctaaagcgccatttgaagagtctgcgcgtaaatatcctaacgacgctctggctcttcaggcattgtatcgggttattaaggaaacggatttttctacaccagaagaaatgcgaacggcgtttcccaacctcgacaattttagatatcgcaacaaatggtacgttctggatgtcggcgggaacaatcttagggttattgcctacataaactttgttaataagcggttctttgtgaagcacataacgaatcacgcagagtatgacaaactgacacgttactacagagagaacaaagaatgactgctaatgctgcacgcgctgttaaagcaacaagagaactggtcaatgcagtcccctttctgggaggcagtgactcagaagatgattatcgtgaagcactggaactggtcgaatatttgattgaagaagatgacaccaatccacttatcgactttctggcgagccgcattgcagagtatgaaaacaacaacgaaaagtttgcagagttcgacaaagccgttgcggcaatgccggttggcgtggcgttacttcgcacgttgattgatcaacataatctgacctatgcggatttgaagaacgaaatcggctctaaatccctggtcagtcagattttgtctggacaacgatccctgacgatatcccacattaaggcactttcagcccgatttggcgttaagccggaatggtttctttgattttgactgatgccaaaccccagattgcccgatgcgctgcgcttatcgggccttcatggttcgtgcgacatgtaggccggataaggcgttcacgccgcatccggcactgttacctactctaaatcttccccattactggcaatcacttttttataccaccagaatgatttcttacgcgtgcgcgtcagcgtaccgttgcctgcgtcgtcacggtcaacaaagacaaagccgtagcgtttgctcatttcacccgtagaggcggaaactaaatcaatacagccccatgtggtgtagcccatcagcggaatgccgtctgcaatcgcttcgcccattgcgcggatatgttcgcgtaagtagctgatgcgatagtcgtcgttaatctcgccattggcagcaaattcatcttttgcgcccaggccgttttccaccagaaacagcggcttctgataacgatcgtacatcatattcatggtgatacgcagaccgagtggatcaattccccagccccagtcgctcacctgtagatacggattacgcagcgatttcaccacgttcgccgcactgctgttgttggcgttcatctccgccgaggcgcagcgcgaggcgtaatagctgaaagagacaaaatcgacggtgtttttcaggatttcatcatcgcccggtgctttgttgatggttacccctttttcgcggaatacgcgggcagagtaagccggatacgtgccccgcgcctgcacatcgataaaaaacaggttttcccggtctttctccagcgccgcccagacatcttccggcttgcaactgtaagggtagaagttaccgcccgccagcatacagcccacctgattttgcgggttaacctcatgggcgattttggtggctagcgcactggcaaccagctggtgatgcgcggcctgatatttcacctgatcctgattttcaccttcttcaaacaccagacccgcgccggagaacgggctatgcaacataatgttgatttcattgaaggttagccagtatttcaccagaccatcaaatgcttcaaagcaggttctggcgtagcggctgaaaaactccaccagcttgcggttacgccaggagccatattcggtgaccagatgcatcggcacatcgaagtggcacaacgtgaccagcggttcgataccgtactttttacactcttcaaagacagaacgataaaaagcaatgccctgctgattgggcgtgatttcatcgccctgcggaaagagacggctccaggcaattgaggtacggaaaaccttgaatcccatctctgccatcagggcgatatcttctttataacgatgataaaaatccgtcgcctcatggctgggataaaactcgtcatctcgcaactgaaaacgtttttccagccccagtttcaccgccattcgatgctcgccgtgtgggatcatatcgacagtggtcagacctttgtcaccttcacgaaacgcaccttcagactggttggcggcaagcgcgccgccccataaaaaactttctggaaatactgacattttcatcctcaattaagacttacttctttggcgacggtcggttgtacgctctgatactttcgcgcctgggcagccgcttcctcaacaggaatatcctcaaagccgagcaacagtgtgaggataaacgacagcaccaccgccagcgccatgaccgcgaacacccagacgatgctcattggattcgccggatcgaagaactgcacgctggtaaatagccccggcgctgccattgagtggctggcaagccccgccataccggcaaccgcgccgcaaataaaaccgctgataagactggcgataagcggacgtttcaggcggatcgccacgccatataacgccggttcggaaatccccgccataatggctgatgccgccgcagccagcgccgtctgacgcagttccgggtttttcgttttccacgccactgccagtgatgaaccgcccagcgacaggttagcgccgatctctgacggcatgaccatcccttctttgccggtttcggcaatggtctgaatgatggttggcgtaaagacgcggtgcatcccggtcattaccagcagaggccacagcgcgcccataatggcgactgaaagccagcccagataaccatgaatggtgtaaaccagcgccgaaatggcgctaccgatccagataccaatcgggccaatcagcaggat

SEQ ID NO: 188 - DNA, 37776 bp, Escherichia coli
  source 1..37776: mol_type = genomic DNA
ggataaataaataatttatttttgtcactattatttatgtaatcatcctgtcagggagagggatctcaattatcaatgcttaattacgtcatcattttgatgacatgaaaccggagcattttgcatggaattttcgttttcacccaaacttcttgttgttgctgtcgccgccgctcttcctctcatggccagcgcagcagataccccgtcaactgccaccgcacgcaaaggctttgccggatacgatcacccaaaccagtatccacagaacgctgcaatttattgaatttgcacgatcatgtaggccggataaggcgtttacgccgcatccggcaatcaaccgcaggcggccacaaaatggccgcttttttacttactcaccaccagcaaatgtgcctgcataatgtcactggccgggcgaccgtgcgccagcaaatcagccattgctttaagatatggcggtagatggcggaaataacgctgatacccggcacacaaataattcagccccggtttgccgctggcatcgagcatgaagcggtgtttcgggcagcctccccagcacgcttttaacacgttacaactgcgacactgcgccggtaattgcttaaatttatcttcaccaaacacctgctgttgcggggaatcgatcatttctgcaattgtttgctgatgcatattccccagccgatattgcggataaacatagtgatcgcaggcgtaaacgtcgccgttgtgctcaacaatcaccgagcgcccacaggttggctgatgatggcaaaccgcacccggcgcaccgacaaaattggcaaacgcccattcgatattcatcacgaaaatcttgccgacgtcgcgtttgatccagtggtcgaatatcgccaccagaaattcaccaaatttatcggggcgcaccgaccattccgtcagttccccctgaatatcaccaggcgcatgcaatttcagtccatcgcgggcagctgtttcatcagccagacgctcgaccaccggaataaactggatgaattcgactcccgcatcgcacaaaaaatcataaacctgcaacggttgctgcgcgctggtgcggttgacgcagaccagcacgttatagtcgacatgatgtttttgcagcagcgtcagggcacgcatcaccagcttatgcgttggtctgccacctttggtcacgcgatattgattgtggatctcagccggaccgtccagcgataacccaacaagaaaatgattttctgccagaaatgcacaccatttatcatcgagcagcacgccgttagtctggaagctgttacttatcttcctgccagcaccgtatttcgcctgtaactttacggcacggcggtaaaaatccagcccgagtaacgttggttcgccgccctgccaggtaaaagccacttcgttttgcggttcgctggcagcgatatagtgacggacatacgcttccagcgtgtcatcgtccatatgcgtgactggcttttcgcggtaaagggattgtttttcgagataaaaacagtagtcacagttcagattacaatcggaaccactcggtttcgccatcacatgaaaagcacgcgttggaacctgttgcagcatggtcactccttgcctgaagtcatccttcaatacgttaagggcgaaatcataccgtggggcaatgagttattacgggcgtttattgcgaagggagggtgacgaaatgcacagaaaacaaaaaaccccgccgaagcggggttcaaaattggtcggcgagagaggattcgaacctccgacccactggtcccaaaccagttgcgctaccaagctgcgctactcgccgaaatactgctttttgaatttttagttcaattctttaaagtcgtggtgcgaggggggggacttgaacccccacgtccgtaaggacactaacacctgaagctagcgcgtctaccaattccgccaccttcgcattgtcacaacttctaataatggggtggctaatgggattcgaacccacgacaactggaatcacaatccagggctctaccaactgagctatagccaccactacaaatcttgttacgcggtattactaccaccgcagctcaagcgccgggactaaatggcgcgcccgacaggattcgaacctgagacctctgcctccggagggcagcgctctatccagctgagctacgggcgcttagcgccgttgcgggggtggataatacggacttcccacccctctgtctagtccctttttaaataaattgcgcgtttggttacggtttgtgcgttttgctgcttattcctccagtttatgcgctttcccgtggcgattaaggccaaaaactttataaatcgccgtcaccgccagcataaagatgatgccaacaaacagcgacatacgcgtatcttcattaaagtacatgccgatcaaaacgcaaatcaggaatgccattgttacgtagttggcccaagggaacaggattgagcggaacggatggctggcaatcgccgctttatgtgcacgccgaaaacgcagctggcttatcaatatcacaaaccatggcaccatccccggaagcacgctggcactgtagacgtagacaaacacacgctgcggattgggaatgatgtagttcaggcatgagccaattagcagaatagcaatagatactgccacacccgcaactggtacgccgtgacgggaaactttcgccatcgccgccggtaactgacggtttttcgccagtgcgtagagcatacgtccgcaactgtacatgccgctgttacagccagagagcgcagccgtcagcaccacaaagttgataatgcccgccgctgcggtaataccgattttggcaaaagtcagtacgaacgggctgccgttgctgccaatttcattccacgggaagatggtgacgataacgaaaatcgcgcctacgtagaaaatcaggatccgccacagcactttgcctacggcactgcgcagcgtcacctgcggattcttcgcttcaccggcagtaatgccaatcagctccacgccctggtaggacgccaccacaatacacagcgcggtcaggaaccctttccagccacccgcaaagaaaccgccatgctctgtgagattgctaaaaccaatcgactgcccgccattgccaaagccaaagaaaatcacgcccaggccaatgacaatcatcacgataatcgtggtgactttgatcatcgcgaaccagaactcgatttcgccgtacaaccgcaccgccgccagattcgccaacgccaccagcgccactgcgatcaatgcgggtatccactgcgccatctccgggaaccagaactggacataaacgccaatggcggtgatttctgagatccccaccgccatccacataaaccaataagaccaggcggtgagataaccaaagaacgggctcatataacgatgcgcataaacggcgaacgaaccggtaaccggttcgaggaacaacatttcgcccattgaacgcatgatgaaaaagacgaatagcccggcgatgatataggccaacaatacggatggcccggcccatttcaaggtactggcggcccccataaacaggccgacgccaatggtgccccccagggcgatgagttcgatatgtcgagcttccagcccacgctgtagctctggtttgttatctgccataaatcctcgtgttgtgtttgcatgctttccggtgttaccggttatcgttatgggtacatcgagtgttgcgaatgttttcgtaattcaggagaaatggcaaataaagcattaaaaatttgaatgctttgtgtaataaaaaagcagacaggcgacgaagtgaccactccgtcgctttacaaagagaggaaaatcagaggttgccggtgtaatgccagcgtaaataacgcagcaaacgaagctgacgcttaatgcggctcggctgcgaaagcaggcggtagagccactccagtcccagcgtttgccagattttcggtgcgcgttttacgtgaccggtgaaaacatcgtaagtcccgccaacgcccatatacagcgcatctggatgcaccagacggcagtcgcgcatgaagatctcctgctttggcgatcccatcgcaacggtgacgatttgcgctccgctggcatgaatgcgttcaaacagcgcctgacgctgctcgggtttaaaataaccatcctgactgccaacgatattcacattccattggttgcgcagtttagcttcagtttgcgccagcacttcaggtttaccgcccacaagaaataccggcgtcccttctttgcctgnnnnnnnnnnatcagctcttcccagagatcggcaccggcaacgcgggaaacctgcgcctgcgggtactttttacgtactgaacgtacaacgctgatgccatccgcatatttaaattcggcagcgttaattaactccctgacctcggcgttatcttcaatggtcagcattttttcggcattaatggcaaccagcgttccctgcttaagctgcccgtcagcaaacagataatcgagggcgtgctgcatatcacgccaaccaatcaactgtaagccacgcagcgtataggtcggtgccgtggtgttgttattcattgttatccttcaacctgcgtccggagcgatgattttgtacgtttatgaatgagtccggcgctttcaaaaagccagtacaacagttttgcgatcatcagacatgcgccgaagaccacgataaaaaagactacgcgtgagacaaacgaatccagcccttcacgtgccagcacgatcatattgaagatcgccccaaagcagaaactgtgcaatatcgcagccttatagcgattagtctcgcggttgcccagctcatacagccagtcgaaccatttgatgatcagtccaaccacaatcgccccgagtgggatgaacaacgcgccgcccatcaccaccagtgagcctataagcgtaggcgagatcgccagtccggagtggttattcagcacttcccaggtaaagtagttggctgagttcagcaccatactcgggcgacccggccacagccaggaagggataaagacatagaaatcgcggacaattggagccaggccctggaagtcgatgttgtcgtagttctgcaacagcaacgccagattctcccatggcgagaaggtgtcgcgagtgagatagagaaacgtatagaacgcttcatcgccgctcacattcattccatagcgttttagcgccagccagaacatgcccacaatccccagcacgcccgccgccgccagcatccacaacgaaatccagccgcgaataatgccaataaacaggaagatagcgaatgcgatgatgatattggcgcgagtgccgccgacaatcatataagtcagcaagccaaaggcgaccgtgctgacgaggaaaaacagccacgctttgctatcctggcgcagaaagtagaccaccagcatcgccgggatgaaaaagtaaaagaagcgttttaacgccacgccggagacttcactggagaagatctgactgtaggagttaagccggaacagcaaaaagccgttgtgcatgaagaagatgccgacgcttaccagcgcgatgcccatcaggatcacccacgtaagattggtctccacgcggttcatggtaaacagcggacggcgcggtacatcagcaacgcgtttgcgtaggcgggttttgtaggtgacatagtaaaccgcgtagaagcagcccgcagaaagcaacgcctgcaacaagatttctggcggcgcgacaccaacatcaaagcgaaataccagcacgctggtcagcgggaagccgaagaaaaaggtgagcaaaaacagcaatgaaaagaagacattgaagttaaagcgcacacggcgaaactcaaaccaggtcagcgtggcaataaacagcgtgcagagcagccagacaacaaacaggccactgaattgcagcagactcatgcgacctccccggcggcaatcgccaacgcccgctgccagccttgtagatagttagggctaaagaaggcaatggtgtttttatccaccgacgccaactggcgctgcgcttcacgcacaatatcctcgttgagatcgtcggtagtaaacagcaccggcaaatgctgttccgtcatatcctgccagaacggattttcccggttaagcacacaaggaatgcccgcctgaatcagtaagcaaagcgtaccaatgccctgctggcgggcaaaaataaagtaaccaagatcgcactgacgaagtagcgccagataggcgtcaaattccagtttttcgctcaaaatttgcagattttcttcgctgaataactccagccccgcctgacgaacttcctcaatgtacgcttcgttattaggcggatatcccatcggcaccaccacttttaccgtatcgccaaattgctgatgaacggcgcacaaggcagcaatatggtcattgctgcggtcaccggagttccccaccagaatggtcattttcccttcacgttgccgatcgttcgccatcgtattgagagaagggtccatccgcgtcgggaagtacagcagttcgccccgcacctttggatgcgttttggcaaaaaagctcaaatcgccgcgggtggcaaatacacagccgactcgcttttgcgccaggcgacgtagtgggtaaaaaagcttatatctcaagccactggaaagctcatacaggtctgccccccagatatgccagaaaaactggctgggcttaatgccaccactcagcagagccagccacagtgtgggattgaactgaccgtggaagaaaaaacgctgctgacggttagcttttgctttcgcgatgaccgcttccgccagcgattttttcccagggaaaaattgcacagaaagcgccggacagctatcacttaagccgtcgtccttgccaacaaccataaactcgcgcgcgtgctcgctcgtcgcggccagcgcgtcattgaaaaaccgcaaaacggttcggttatggtgagggatatccgatcccagtacgtgaatcagtacagtcatgcccgcctacgccagagtaaaaacacgccacaacaaagagaaaaatagacgatataagttgccatatatgcctgcgccgcgcccagtgcaccatgcgcagggattagccagtgggcaaataccatcaataaagtgaactggctgacttccgccagaatataaaaccgcagtgacgctttggcgatcaccagataaccaaagacataagcgcccacttttaacacatcacccactaactgccaggcaaagagatcgcgcatagcggtaaatttattcgacaacagcaaccagatagcaaaatcacgcagcaaccagacggtaaaactcgccgccgccactgccggtaagacgaatttcagcgatttaaccacttcccgggtgatatcgcgcttttccgttagccgcgacaacgtgggcagcaaatatacgctgaacgatgccgtaataaattgcaggtaggcatcggaaatactgctcaccccttgccagatccccacctcatcccagctatactgcgccgccagcagtttacgcatcatgatgtaagcaacaggcaaggtcaccgacgtaatcaacgccatgagcgtaaatttgctcaactgccctgccagaccgttatcccagctgggtttcagatagcttaacgggatgacaccacgtttgatcaacatgatggcggcaggaatcaccaccagcgcgggaatcagcgccagacccagcaacgccccttcataaccgcccaaacggtaactgacgtagtacgcgagaacgccaatcaagctgccgacaatcagcgataacgcattacctgcggcatcgcgaaagcctttcatcagcgccagtaacaggttgccccaggcgatccccatttgcaccagcgccactaaacgcaccagcccctgatagtcggtattaccaaacaatccctggctgattggcgcagctgccagcacaaaaaccagcgccatcagcgtagagaaaccaagtaccatcgctgatgaagtgccgaccacgcggcgcagctgttgcggattatcatggtactgggcaacgtatttggttacaccgttaaagatgccagctccggcaagcacgccgagcacggtaatcaactggcggaaatttgccgccagcccaagccccgccggaccaaatgacacagccagcaacttaccgaccagtaacccggcaccaatcttgaccagtgtactggccgccgtccacaaggacgcttttgccaacgacatatcaggagaagtagttcaacaaagtcgcaattaccgtacgctgattgacgggcgacaggttgtagaacagcggcaggcgcagcaggcgctcgctctctttggtggtgtagcgatcttcaccgtggaactcaccaaagcgttcccccgcagggcaaccgtgcagcggaatgtaatggaacaccgccatgatttccgcttctttcagaaagttaatcaacgcgctccggtcatcaatatcccgcagtttaatgtagaacatatgcgcgttctgcacgcagccatcgggaatcgacggcagctcgatacgcccggctttcgccagaggcgctaacgcatcgtagtagttttgccacagcgccagacgttgctggttgatacgatccgctgcttccagttgcgcccacaggtacgcagcttgcagatcggacatcaaatagctggagccaatatcgcgccaggtatatttatcgacctgaccacggaagaactggctgcggttagtgcccttttcacggatgatctcggctcgttcgattaacgctttatcgttaatcagcgtcgcgccgccttcaccacccgccgtatagtttttggtttcatggaagctaaagcagccaatatgaccaatggttcccagtgcacgccctttgtaagtggatatcacgccctgagcggcatcttctaccacaaacagattatgctttttcgccaacgccataatggtgtccatttcgcaggccacacccgcgtaatggaccggcacgataacgcgcgttttgtctgtgatcgccgcttcaatcagcgtttcgtcgatgttcatggtgtccgggcgaacatccacaaaaacgatttttgcgccacgcagcacaaaggcattggcggtggagacaaaggtgtagctcggcatgatcacttcatcgccaggctggatatcgagcagcagcgccgccatctccagcgaagcggtgcaggacggcgtcagtaacactttggcgctgccaaaacgttgctccagccactgctggcagcgacgggtaaaaccgccatcgccacacagtttgccgctacccattgccgactgcatatagtcgagttcggttcccaccaccggcggtgcgttaaatggaatcatgtgatcacctgtataaccagtacgcggtgctttctacattcgcaccactttgtatgtatcgtttaagcgcggcggtgttgcccatttgggtcgccacccgcaaagttgttttaccgcgagcatacgcccagtttagcgccgtttgcatcagctcagcacctacaccgcgtccagccagcaggccaattcgcgcatctgtcgcattgagttcccgtaaagagacataaccgcgaataccgccggacgccgcacgtaaaatcagacattgatgatcaaaggtgccgcgcacggcattttcaatccactgtgcataaaagcgtctgctggcgtcaggcgcataccacggcgcacgaaaacggctttgcgcaaatgcggcgctggctaactgacgtaatgcgggaatatcggtctcttgtgccactacagcaccactatcactgacattgttcacgggtagtgccaaatcaacttcaccttctaccagggagaatcccagctgttgcagggcatccagttcacccgtatttgatgccgcaattttggcctgcacccgtgaccacggcgctaacacgtctggcgtcaggagcggtgcttcagacgtaatgcgcacgatggcgctgttaacaccaaagaaggcgttttcccaggttagtggctcaatactggcgcggacgggcacgaagtaactccagcagatattggccgtagccagttttcgctaatgaactggcagcacgcttcacaccctcgtcatcgagccagccgttacgccaggcgatctcttccaggcaggcaatcttaaagccctggcgtttttctactgtctgcacaaaggtactggcttcaatcaggctgtcgtgagtgccagtgtccagccaggcaaatccgcgcccgagcagttcaacggtcaggttgcccgcctcgaggtacatctggttgatggaggtaatctccagttcaccacgctccgacggcttcacctgctttgcgtactccacgactttactgtcgtagaaataaagcccggtcaccgcccagtttgacttcggctgttttggcttttcttccagcgagatagcgcggaaattgtcgtcaaactccaccacgccaaagcgttccgggtccatcacctgatagccaaataccgtcgccccttccgtgcgcgccgcaacatgacgcagcttcggactgaagccctgaccgaagaagatgttatcgcccagcaccagacaagaaggttcaccgttgaggaaggtttcaccgatgataaaggcctgcgccagaccgtccgggctgggctgttcggcgtattccagctggataccgaactcactaccatcgcccagcaggcgctggaaataacctttatcttccggcgtagtgatgatgagaatttcgcggataccggccaacatcagcaccgacagcggatagtaaatcattggcttatcgtaaatcggcaacagttgcttcgatacgccgcgcgtaatcggatgcaatcgggtgccggaaccgcccgccaggataatacctttcatgtttgcctccgctgaaaattagcctttcagacctaaacgctcgccctgatagctgccgtcctgcacctgcttccaccagctttcattagccagataccactgcaccgttttacgcattccactttcaaaggtttcctgtggcagccaaccaagttcacgggcaattttcgaagcatcaatggcataacgcagatcatgccccggacggtcagcgacaaaggtgatcaagtcacgatagtgcgccacgccgtgcggcttgttcggagccagttcttccagcagctcgcaaatggtttccacaacatcgagattcttacgctcgttgtgaccaccaatattataggtttcaccgactttcccgggggtcgccacgcaatacagcgcgcgggcgtgatcttccacatacagccagtcacggatttgctgcccgttgccatataccggcagcggtttacccgccagcgcgttgaggatcatcagcgggatcagtttttccggaaagtggtaaggaccgtagttattcgagcagttggtgatcagcgtcggcagaccgtaggtccgcagccaggcgcgcaccagatggtcgctgctggcttttgacgcggaataagggctgctcggcgcatacggcgtggtttcggtgaagaaatcatccgtcgagtgcaggtcaccatatacttcgtcggtggagatatgatgaaaacggaacgctgattttttatcttccgtcagcgtattccagtaagcccgcgccgcttcaagcaatgtataagtcccgacaatgttggtttcaataaacgctgccgggccgtcaatagaacggtcaacatggctttcggctgccagatgcatgacacagtctggctgatgctcagtgaatacgcgtgccagttctgcccgatcgcagatatcaactttctcaaaggcaaagcgctcgctttgcgcgaccggtgccagcgacatcaggtttccggcgtaggtcagcttatcgaccactaccaccgcgtcgctcgtttcgttgatgatataacgcaccagcgccgagccaataaacccggcaccacctgttatcagaatttttctcatcagcgccagactcctttggcatcgacgacatactgctgatggacattgtcgccattgataactttgaactgactatgatcgaccagcatcaccagcacgtctgccgttgccagcgcctcgtcaagctgcgccagagtacaaagcccggtcagttttttcggcaactggtggatgttaggctcaacaaccagagtttcgccgctatgccactgggcgatcagttcagcgatttccatcgccgggctttcgcgcaggtcatcaatattcggtttaaacgccagaccaaagcaggcgattttcagttcactggcgcgtttatcggtagcagccaggcaatcagccaccgccgctttcacctgatcgataacccagaacggtttgtgatcgttcacttcgcgcgcggtacggataagccgcgcctgctgggggttctgtgccacgataaaccacggatcaacagcaatgcagtgaccgcccacgccagggccaggctgaagaatattaacgcgagggtgacgattcgccaggcgaatcagttcccagacgttaatcccctgatcggcacaaatcagcgacaattcattagcaaaagcgatattcacatcgcggaagctgttttcggtgagcttacacatttccgccgtccgcgagttagtgacgacacactcaccttcgaggaaaattttgtacagttcgctggcgcgggccgaacaaaccggcgtcataccaccaatcacgcgatcgtttttaatcagctcgaccataacctggcccggtaacacgcgttccgggcagtaagcaatgttgacgtccgcctgctcgcccacctgctgtgggaaagtgagatccggacgcatctctgctaaccattctgccatcttctcggttgaccccaccggcgaggtggattcaaggatcaccagcgcgccttttttcagcactggcgcaatggagcgagcagccgattcaacgtaggtcatatctggctcatgatcgcctttaaacggcgtaggtacagcaatcagccaggcatccgcttcaactggcgtcgtgctcgctcgtaaaaaaccgccttctacggcagtttttactacgctcgccaaatcaggttcgacgatatggatttcgccacgattgatggtatcaaccgcgtgttggttgatatcgacaccaatcacctgtttttgccgtgaggcaaacgcagctgctgtaggcagcccgatgtaacccagtccgataacagaaatggtcgcaaaactcatagtgatatccgattattttttaacgcttccagaatgcgagagcatgcctgaccatcaccatacgggttatgggcgcggctcatagcttgatattcgttttcgtcttttaaaagacgcgtcacttcctcgacaattcgctgcttatccgtgcctaccagacgcaccgtacccgccgtcaccgcttccggacgctcagtggtatcgcgcatcaccagcaccggtttccccagcgaaggcgcttcttcctgaatgccgcctgagtcggtcaaaatcagccaggcgtggttcatcagccagacaaacggtaaatactcctggggatcgatcagaatgacatttttcacatgccccagaatgcgattgaccggctctctgacgttcgggttgagatgcaccggatagacaatctggatgtcctggtgcgtggtggcgatgtctgccagcgcgtggcagatttcttcaaagccacgaccgaaactttcacgcctgtgaccggtcaccagaatcatctttttatcggggtcgataaacgggtaatttgccgccagttctgaacgcagcgtgtcgctgctcatcacctgatcacgcacccataacagtgcatcaatgactgtattaccagtaatgaagattcggctatccgcaacgttttcacgcagcaagttttgccgggaagtttcggttggagagaagtgatacatcgccagatgcccggtcaatgtacggttagcctcttccggccacggcgaatagagatcgcccgtgcgtaaaccagcctcaacgtgaccaacaggaatacgctgataaaacgccgccaggctggttgccagcgtcgttgttgtgtcgccgtgaaccagcacgacgtctggtttgaactcggcaagaataggttttagcccttccagaatccgacaggttatctctgtcaggccctgtcctggctgcattatgttgagatcgtagtcaggtacaatggaaaagagtttcagcacctgatcgagcatctcccgatgctgcgcagtgacgcaaactttagcctcaaaaaaaggatcttttgccaacgcatgcaccaacggagccatcttgatggcttccgggcgcgtaccaaatacagtcagtactttcacatcgattctcttcgaataagcggcgagcgcctttgcgctcgcagcagcagtgttgctatttcgagcaacggcgggttaatgcgacaccagccccgatcagccccccgacaatgccccacataatcatcaggaaggcacgacgtgggctatcgcgttttaccggttcttccggcgtacgcaaatagcgataggtctgaaaacgcggatccagggttggaccaacattcagggtgtttaacatggcccgattctgatcatagtcgagatcaaaggccggaccgacggcctgtaaattttccagtcgagcctggagcattggacgcccaagcaggaacatttctgaatcaggtaattcctcggcaggcacatctgtcgcactgcgcgaaatattatgctgctcagcaattttcagcgcctgctcaatgctgttcatccggcggtcgtagatggctttcgccacctcttcctgacgcttcacctgagctttcatctggatggtgcgtgccgcccatgcgcctttcagctcatcattcagatggctggctgcacgctggctggcaaaagcaacatactgacgtaacaggttattagcgtcaggcgcggtttcggcaataagcttcacgctgtcattgaccgcgcgggtaaagtctccggggataaactggatgttgttaatcatttcatccagcaacgccgcatcggctttgctgttgcccaccatccgctgtttgtaatagtcggtttgcagccagaactctctgcgggtatcccacgaggccagttgcataacaaactctttataggcttcgtccatgaccgatggttgatcggcagaagccatgtttgaacggacatccaggttacgcaaaaattgctgctgcgagtaatatccccccagcatattcaccgttggacgatcggtaatcgccgtcgagctccactcctgacgagcaaaaaaagtatacgccagcgcgattaacgcaaacgccagccccatgccaataatccatagcttcccagcccacaaggtacgaaacaacccacgaatatccagttcattttcagcgtcttcggccggtttcccaggcattggttgtgtcatcacatcctcatttatttggttaaattggggctgccaccacgatttctacgcagtctgcgttttacgcgcttaataaagcgagcaactttccaggcacgcttaatgcaatatccatagaggaagaatgctagcaaaaagagcaccagcatgacccactccgggacaaaatgagaatattctgccagcacgccaatggaagcgagcagtgctgcggcaagggtaatcagcacaaacgcctgacgggaagtaaacccggcacgcatgatcaaatggtgaatatgctgacggtcaggagagaatgggctcatgcctttacgcaggcgacggtacataatcgccaccatatccattagcggaatggcgattatccacaaagcggtaaccgggctgatgggatgggttttgccctgggtcgtttcgagcaggatccagataacggtaaaaccaatcagcgtactgcccgcatcacccataaagactttgtagcggcgacccaggataccaaggttaagcatgatgtatggcaggatggcggcgatcatcgcaaagcaccagattgcgaggctggtttgcccgtcgaaccacaaaatcataccgattgctgcaaacgagacgcaggacaacccgcccagcaagccatcaatgccatcaaccatgttgaacgcattaatggccgcccagacggcaaatagcgtcaggaagtaaccaaacggtccgagcaccatctcccaggagccaaagatataacccaggctactgagataaagtttgccgaacaccatcataacaatgccaacagcggcctgtatggtggcacggatttttacgctgatatcaaaacggtcatccagcgcgccaatgaaaacaagcacaccggcacaagcgagatagagagatgcatgcggaatatagtaatcgacaattccgaacgtgaagcaaatccctgcgtaaaccgaaatccccccaacgagaggtatcaatccctggtgacgtttgcggaagtttggtttatccactaaaccgactttttttgccaccttacgggcaaaaaacagaaacagtgtcgtgaataaaaaaatactgatgagatcagtactcactgtcagtaaattcacaatgcatgctctcagagaaaattattagcagaagtataaccacgaagacctttattcagaagggaaagtccgttccgaacccaccagtcctgtgcaaaaattaaccatttgatatgcaaattgcataacatgccagcaaattccaggaattttcctaacatcgccagcgcggcattaagattacagatataaaagcaaaacgccacgtaaacacgtggcgtttttggcataagacaaatttatgagcgtttcatcattttgaagaaatcgtcattggtcttggtcatggccagtttattaatgaggaattccattgcatcgatttcgcccatcgggtgaatgattttgcgcaggatccacattttctgcagttcttcctgagtcgtgagcagctcttctttacgggtaccggaacggttgtagtcgatagccgggaagacgcgtttttcagcgatcttacgagagaggtgcagttccatgttgcctgtacctttaaactcttcgtaaataacttcgtccattttagaaccggtatcgataagcgccgtcgcgataatggtcaggctgccgccctcttccacgttacgcgccgcaccgaagaagcgtttcggacgatgaagggcattggcgtccacaccaccggtcaacactttacctgacgccggaacaacagtgttgtaagcgcgcgccagacgagtgatggagtcgagcagaatgataacgtctttcttgtgctcaaccaggcgtttggccttctcgatcaccatttccgcaacctgaacgtggcgagatgcgggttcgtcaaaggtagaagcaacaacttcaccttttaccagacgctgcatctcggttacttcttccggacgttcgtcgatcagcagaaccatcagcacacaatccgggtggttgtaagcaatgctctgagcaatgttctgcagcagcatagttttaccggctttcggcggtgccacaatcagaccacgctgaccacgaccgataggtgatgccagatccagtacgcgagcggttaaatcttccgtagaaccgttaccacgttccatacgcagacgagagtttgcgtgcagcggggttaagttctcaaagaggattttgttgcgggcgttttcaggtttgtcgaagttaacttcgttaactttcagcagcgcaaaatagcgttcaccttctttcggcgggcgaatcttaccagagatggtatcaccagtgcggaggttgaaacggcggatttggctaggggaaacgtagatgtcatcaggaccggcgaggtaggagctgtctgcggaacggaggaaaccaaatccatcctgcaatatctccagtacgccatcaccaaagatatcttcgccactctttgcgtgctgcttcaggatggcaaaaataatgtcctgcttacgcatacgagccaggttttccagccccatattttcgccgagagtgatcagctcagaaaccggcgtattctttaattcggtaagattcatagtggtgtgagttcttaaacttggggtaaatctcgaacttaatgttgtgaatggtatggcaggatcatccatgcctgtttacggtcatcgactcatgtcttttcgctgcctggtcacaggagagtacgcagaactgaaacgacaagacggattgagtgacgagccagaaatctgttcacttcgcatttaagataaaacgggaagcgttggaaattacaagattcaaacttaataaggtatgtttaatacgaagtcaacactaagttagcatgactcacgccgggcgtccagtttttagcgacggggcacccgaacatgaaattcccttacgccaggttagcgtcgaggaactctttcaactgacctttagacagtgcacccactttggttgccgccacttcaccgtttttgaacagcagcagagtcgggataccacggatgccatatttcggcgcagtgccagggttttgatcgatgttcagttttgcaacggtcagtttgccctgatattcgtcagcgatttcatccagaatcggggcgatcattttgcacggaccgcaccactctgcccagaaatcgacgaggatcgccccgtccgctttgagtacatccgtgtcaaaactgtcgtcagtcaggtgaataattttatcgctcatatataactccacaggaataagcctggcgtgttggtttcgttgttggtgtaacattaaccaactaaaggttgactttatttcaccggatacgctttcgtaaagcaatagtaagctgatattctaccacactatgagcaaaacacatttaacagaacagaagttttccgacttcgccctgcatccgaaggttgtagaagcnnnnnnnnnngggtttcataactgtacgcccattcaggcactggcccttccgctgacgctggcgggtcgtgacgtagccgggcaggcgcaaaccggtaccgggaaaacgatggcgtttcttacgtcaacgtttcattatcttctctctcatcctgcgattgccgatcgcaaggtgaatcaaccacgtgccttaattatggcaccgacgcgtgaacttgccgtgcagatccatgccgacgcagaaccgctggcggaagctaccggcctgaagctgggtctggcttacggtggtgatggctacgacaaacagctgaaagtgctggaaagcggcgttgacattctgattggcactacggggcgtttaattgactacgccaagcagaaccacattaacctcggtgccattcaggtggtggtactggacgaagccgatcgcatgtacgatctgggctttattaaagatatccgctggctgttccgccgtatgccgcctgcaaaccagcgcctcaacatgctgttctccgccacgctttcgtaccgggtacgtgaactggcgttcgagcagatgaacaatgccgaatatattgaagtggaaccggaacagaaaacgggccaccgtattaaagaagagcttttctacccttctaacgaagaaaaaatgcgtttgctgcaaacgctgatcgaagaagagtggccagacagagcgattattttcgccaataccaaacaccgttgtgaagagatctggggccacctggcggcagatggtcatcgtgtcggtttgttgacaggcgatgtcgcacagaaaaaacgtctgcgtattcttgatgaatttacccgtggcgatctggatattctggttgccaccgacgttgccgcgcgtggtttgcatattccggcagtgacgcacgtctttaactacgatttacccgatgactgtgaagattacgttcaccgtattggtcgtacaggtcgcgcaggcgcaagcggtcactctatcagcctggcgtgtgaagagtatgcattgaatttgcctgctattgagacctatattggtcactcaattccggtaagcaaatacaatccggacgcattgatgaccgatctgccaaaaccgctgcgcctcacgcgcccacgtacaggcaatggtccgcgtcgtactggcgctccgcgtaatcgtcgtcgttcaggttaaataaaatgtcatactcaaaatcattcaaactgtatcaagatggcaagagaatgaatcccgatgagcatactgtagtaagtgattcaggtgaaagaatgcagccaacacagagacagattgaaggatgaagagtatgggttccacctcgtcgctgtatgcagccattgatctcggttcgaatagttttcatatgctggttgtgcgcgaggtggctggaagcatccagacgctgacgcgaattaaacgcaaagtgcgtctggctgctggcctgaatagcgaaaatgccctctctaatgaagcaatggagcgcggttggcaatgtctgcgcctgtttgctgaacgtctgcaagatatccctccctcgcaaattcgcgttgtcgctacggcgacattacgtcttgccgtcaatgcgggtgcttttattgccaaagcgcaggaaatcctcggttgtccggtacaggtgatcagcggtgaagaggaagcacgtctgatttatcagggcgttgctcacacaactggcggtgccgatcagcgcctggtggtggatataggcggtgccagtactgaactggtaaccggcacgggtgcacaaaccacctcgttgttcagcctgtcgatgggctgcgtcacctggctggaacgctattttgccgatcgtaatctggggcaggaaaattttgatgctgcagaaaaagcggcacgcgaagtgttacgtccggttgccgatgaattacggtatcacggctggaaagtgtgcgttggtgcttccggcaccgtgcaggcgttacaggaaatcatgatggcacaggggatggatgaacgcattaccctggaaaagttgcagcaattgaaacagcgagccattcattgcggtcggctggaggaactggagattgacgggctgacgctggaacgtgcgttagtgttcccgagtggtctggcgatcctgatcgccatttttaccgaactgaatattcagtgtatgaccctggcgggcggtgcgctgcgtgaaggcctggtctacggcatgttgcatctggccgtcgagcaggatattcgcagccgtacgctgcgtaatattcagcgccgctttatgatcgatattgatcaggcgcagcgcgtagccaaagttgcggctaacttcttcgatcaggtggaaaaggaatggcatcttgaagcaataagccgcgatttgctcatcagcgcctgtcagcttcatgaaatcggcctgagcgttgactttaaacaagcgccgcaacacgctgcttatctggtgcgtaatctggatcttcccggttttacccccgcacagaaaaaattgctggcgacgctactgctcaaccagactaatccggtcgatctctcatcgctgcatcagcaaaatgccgtaccgccgcgcgtcgcagaacaactctgccgtttactccgcctggccatcatttttgccagccgtcgccgtgacgatctcgtgccagagatgacattacaggctaaccatgaactgttgaccttgacgcttccgcaaggttggctaacccaacatccgctgggtaaagagattattgctcaggaaagccagtggcagagctatgtccactggccgctggaagtgcattaatgagtaagtgccggatgcgatgctgacgcatcttttccggccttgattatttccctcgttttgccgccatcatcgctttcagattcgccagatggctttgccctttctgcatccgttcttcggcgctgaccactttgcgctcctgttcccaaatcagatcatcctgcggcagctccagcaaaaagcggctcggctccgggcgcaccagctcgccgtactgacggcgttctttacacagcgtaaaggtcaattccttctgggcgcgggtaatgccgacataggccagccgccgctcctcatcgatattatcttcatcgatgctgctctggtgcggcaaaaacccttcttccataccgaccatgtagacataaggaaactccagcccttttgacgcgtgcagagtcatcagttgcacctgatccagctcttcttcactctcaccacgctccatcatgtcgcgcaaagtaaagcgcgtcaccacctgggtgagcgtcatcggctcatccagttcactgccttccagcatctccgtcatccagctaaacagttggttgacgttcttcatgcgcatttcggcggctttcgggctgggcgatgtttcgtacagccaggattcataatccatgccatggatcagatcacgcaccgcagcaatcggctcccgctccgccaggcgctggatttctgccaaccagtgagtgaagcgggtcaatgcttcataaccacgtccgctaagcgtctgactcaggcccatatcaaagctggcggtaaacatgcttttattgcgcgtcatcgcccactcacccagctttttcagcgtcgccgggccaatctctcgcttcggcgtgttaacgatacgcagaaatgcgctgtcatcgtccgggttagtcagcacgcgcagataagccagcaagtccttgatttcaggacgagagaaaaacgacgtaccaccagaaattttgtacgggatgcggttttgcatcaggaatttttcaaacacccgcgactgatggttaccgcgataaagaatggcgtaatctttgtactgcgttttattgacgaagtgatgggcgatcagctcgccagtaacgcgctcggcttcatgttcctcgttattcgcgcttaaaacttttagctctgtgccgtaacccagttcggagaacagacgcttttcaaagacgtgcggattattggcgatcaggatgttcgccgctttcagaatacgcccggaagagcgatagttctgctcaagcttaatcaccttcagcgccggaaaatcctgactcagcagcaccaggttttgcggacgtgcaccgcgccaggagtagatcgactggtcatcgtcacccaccacggtaaagcgcgcgcggctgcccaccagcagtttcaccagttcatactggctggtgttggtgtcctgatactcatccaccagcaggtagcgaattttgttctgccagcgttcgcgtacttcttcattgcgttgcagcagcaacgtcggcaataaaatcaggtcatcgaagtcgagaacgttacaggctttcaggtgtgcatcatacagcccataacaatgggcaaaaatacgatcccgctcgccctttgcctctgccgccgcctgcgccggagttttgagatcgttcttccagttagagatggtcgaaatcagttgttgcaggagaactttgtcatcttcaatcagcccctcggtcaactctttaagcaaagcaagctgatcggtatcgtcaaacaacgagaagttcgctttcatcccaagcgccgcatactcgcgtttgatgatatccagccccaacgtatggaaagtggagatcatcagcccacgcgcctctttgcgccccagcgtctgccctacacgctctttcatctcgcgcgccgccttattggtaaaggttaccgccgcgatatgtcgcgcctgataaccgcaaccgcggatcagatgggcgattttattggtgataacacgagttttaccggaacccgcgcccgccagcaccaggcaggggccggtaacgaattcgacagcttgttgttggccggggtttagacgcataggtgtattgctcaatcttcgaacggggggaggattgtagcagaatcgcatttgaatgtgaccgcgtgtaagccgctaaccggttggctgcggatgtttaaatcagagagagaagaccgaaatcggagttcatcgtgaatccattagacttagaaaatatcgggtcgtaacgttgtgttattactttttcagagtttactaaggagaggtttactcgtggcgattaatttcagccctaaggttggtgaaatactggaatgcaactttggtaactatcctgttagccaaaatggaccgttcagcacgacgtattacgatggccnnnnnnnnnnaaatgataaaaaacaggttagttgtcgtgctcaacggaaaaattaatggcaacgcatgtatcgtcgttccattatcaaccactcgcgatcatgacaagttaaatcgtggaatgcatgttgaaatagccagtaatgttatcaatggcctgcaattctttgatcagcagattcgttgggccaaagccgacctggtacaacaagtcagtcgaaaccgattaaatagagcaaggacttacagagggtatcttaatcaatgtttgccacatgagttggttgcagacatacagagggcggtcatcaagtcaatcaatgccatatcgctcataaattgacaataaaataaccatccccgataatgactttgtagcccatagaggccctaagttttctccccttgagggacctgcgaagcccggattttccgggcttttgccatatatgtaccagcccctccctgactgacaattacgttagcatctgcggatcatgctaaaatcgccgcctgacaattattcactcaaggcacgatcatggcaaaaacagcagcagcactgcatatccttgtaaaagaagagaaactggctctggatcttctcgagcagattaagaacggtgccgatttcggcaagctggcgaagaaacactccatttgcccatcaggcaaacgcggcggtgatttaggtgaattccgccagggtcagatggttccggcgttcgataaagttgtgttctcttgtccggtactggagccgaccggcccgctgcacacccagttcggttaccacatcattaaggtgctgtaccgcaactaatagcaaggccttctccaggagaaggccttgagtgttttctccctctccctgtgggagagggtcggggtgagggcatcagcgcgcacttaacccgcaacagcaatacgtttcatatctgtcatatagccgcgcagtttcttacctacctgctcaatcgcatggctgcgaatcgcttcgttcacatcacgcagttgcgcgttatctaccgcgctttccggaatagctttacccaagtcgcccggttgcagctctgccataaacggtttcagcaacggcacacaagcgtaagagaacagatagttaccgtactcagcggtatcagagataaccacgttcatttcgtacagacgcttacgggcgatggtgttggcaatcagcggcagctcgtgcagtgattcataatatgcagactcttcaatgatgccggaatcgaccatggtttcgaacgccagttcaacgcccgctttcaccatcgcgatcatcagtacgcctttatcgaagtactcctgctcgccgattttgccttcatactgcggcgcggtttcaaacgcggttttgccggtctcttcacgccaggtcagcagtttcttatcatcgttggcccagtccgccatcataccggaagagaattcgccggagatgatgtcgtccatatgtttctggaacagcggtgccatgatctctttcagctgttcagaaagcgcgtaagcacgcagtttcgccgggttagagagacggtccatcatcagggtgatgccgccctgcttcagcgcttcggtgatggtttcccaaccgaactgaattagtttttctgcgtatgccggatcggtgccctcttccaccagcttgtcgaagcacagcagcgagccagcctgcaacataccgcacaggatggtttgctcacccatcaggtcagatttcacttccgcaacgaaggacgattccagcacgcccgcacggtgaccacccgttgctgccgcccatgctttagcgatcgccataccttcgcctttcggatcgttttccgggtgaacggcaatcagcgtcggtacgccgaatccacgtttgtactcttcacgcacttcggtgccagggcatttcggcgcaaccatgactacggtgatatctttacggatctgctcgcccacttcgacgatgttgaaaccgtgcgagtaacccagcgccgcgccgtctttcatcagtggctgtacggtgcgcactacatcagagtgctgcttgtccggcgtcaggttaaccaccagatccgcctgcgggatcagttcttcgtaagtaccaactttaaaaccgttttcggtcgctttacgccaggatgcgcgcttctcggcaatcgcttctttacgcagagcgtaggagatatcgagaccagaatcacgcatgttcaggccctggttgagaccctgtgcgccacagccgacgatgaccacttttttaccctgaaggtagnnnnnnnnnncgaattcatcgcgccccataaagcgacatttgcccagctgtgccagctgctggcgcaggttcagtgtattgaagtagttagccatggtgattcctcgtgatgttgtgcttcttattgttcggttcgcgtttgcgagattgaattcactatatgacaggaaatttattgcggaaattgatatattcacaacgtcacattgcaatttctgcaacgtcaacattgagggctgcgccattggatttacgcgatctgaaaaccttcctgcatctggcggaaagccgccattttggccgcagcgcgcgggcgatgcacgttagcccgtccacgctctcacggcagattcagcgcctggaagaagatctcggtcagccgctgtttgtgcgcgataaccgcacggtgacgctgactgaagcgggcgaagagttgcgcgttttcgcccagcaaacgctgttgcagtatcagcagttgcgccacaccatcgatcagcaagggccatcgctctctggcgaattacatatcttctgctcggtgaccgctgcctacagccatctgccgccgattctggatcgcttccgcgcggaacacccgtcggtggagattaaactcactactggtgatgcggcagatgcgatggaaaaggtagtcactggcgaagcggatctggcgattgcgggtaaaccggaaaccttgcccggcgcagtggcgttttcgatgctggagaatctggcagtagtgctgattgcccccgcgctgccctgcccggtgcgtaatcaggtgtcggtagagaagccggactggtcaacggtgccgtttatcatggccgatcaggggccggtacgccgccgcattgaactgtggtttcggcgtaacaaaatcagtaacccgatgatttacgccacggttggcgggcatgaagcgatggtatcgatggtggcgctcggctgtggcgtggcgctgttgccggaagtggtgctggaaaacagcccggaaccggtgcgtaaccgcgtgatgatactagagcgaagcgatgagaaaacgccgtttgagctgggcgtgtgtgcgcagaaaaagcggctgcatgagccgctgattgaagcgttctggaagattttaccgaaccactaacccgccaaaaagaacctgaacgccgggttattggtttcgtcgtggcaatcgtagcccagttcattcagccgggtttcgaaatccggttcatggtcgccaagctcgaacgccgccagtacgcgcccgtagtcggtaccgtgactgcgataatggaacagagaaatattccagtgcgtacccagcgtgttgaggaagcgcagcagcgcacccggcgattccggaaattcgaagctgtagagacgttcctgcaacggatgcgatggacgcccgccaaccatatagcgcacatgtagcttcgccatttcatcgtcggagagatcaaccacgctgtagccgccgtcgttgagcatctgcaaaatttctttgcgctcttcgaggccgcggcttaagcgcacgccgacaaagatgcaggcgtttttggcatcggcaaagcggtagttgaattcggtgaccgaacgtccgccaagcaactggcagaatttgaggaagctacctttctcttccggaatggttaccgccagcaacgcttcacgctgttcacccagctcacaacgttccgagacgtagcgcaggccgtgaaagttcacgttagcaccggaaagaatatgcgccagccgttcgccgcgaatgttgtgctgggcgatatattttttcattcccgccagcgccagcgcgccagagggttccgccaccgcacgcacatcttcgaataaatccttcatcgccgcacagatcgcatcgctatcgacggtgatgatgtcgtcgagatactcctggcataaacggaaggtttcgtcaccgatgcgttttaccgcgacaccttcggcgaacagtcccacgcgtggcagatcaaccggatgacccgcatccagcgctgctttcaggcaggcggagtcttccgcttctacggcgatcactttgatttgcggcatcagttgtttgatcagcaccgctacgcccgccgccagaccgccgccgccgactggcacaaatacgcggtcgagatgggcgtcctgctggagcagttccagtgccagcgtaccttgcccggctatcaccatcggatggtcgaacggcggcacccaggtgaagccctgctgctgcgacagttcgattgctttggctttcgcttcgtcaaagttcgcgccatgaagcagcacttcgccgccgaatccacgtaccgcatcgactttgatatcggcggtggcggttggcatgacgatcagcgccttcacgcctaaccgtgcggaagaaaacgccacaccctgcgcgtggttacccgcagaagcggtgatcacgccgtgcgctttttgttcttccgtcaggcccgccatcatggcgtacgcgccgcgcagcttaaagctatgaactggctggcgatcttcgcgcttcaccagaatgacgttatcaagacgcgacgacagtttttccattttctgtagcggcgtgacctgcgccgcttcgtagaccggcgcgcgcagcaccgctcttaaatattcggcaccttcaggggcaccggacaggggttgtgagtctgccatcattaaccccccagtttcgatttatcgcgcaccgcgcctttgtcggcgctggttgccaggctggcgtaggcacgcagcgcaaaggagacctgacgttcacgatttttcggcgtccaggctttgtcaccccgagcttcctgcgcttcacgacgcgccgccagttcggcatcgcttacctgtaactgaatgccacggttcgggatgtcgatagcgatcaggtcaccatcttcaatcagaccaatgctgccgccgcttgccgcttccggtgagacgtggccgatggaaagaccagaggtgccgccagagaaacgaccgtcggtgatcagcgcacaggctttaccgagacccattgatttcaggaagctggttgggtagagcatttcctgcatgccagggccgcctttcgggccttcatagcggatcaccaccacatcgcccgcgacaactttgccgccgagaatcgcttctaccgcgtcgtcctggctttcgtacactttcgccgggccggtgaatttgaggatgctgtcatcgacgcccgcggttttaacgatgcagccgttttctgcgaaattaccgtagagcaccgccaggccgccgtctttgctgtaggcgtgttccagcgagcggatacagccattggcgcgatcgtcatcgagagaatcccaacggcaatcctgcgagaatgcctgtgtggtacgaatgcctgcaggacctgcgcggaacatattttttaccgcgtcatcctgggtcagcataacgtcgtattgttccagcgtttgcggcaacgtcaggccaagtacgtttttcacatcacggttcagtaaccccgcgcgatccagttcgccgagaataccgataacaccaccagcacggtgaacatcttccatatggtatttctgggtgctcggcgcaactttacacagctgtggaaccttgcgggaaagcttatcgatatcactcatggtgaagtcgatttccgcttcctgcgccgccgccagcaggtgaagtactgtgttagtcgatccacccatcgcgatatccagcgtcatggcgttttcaaacgccgccttactggcgatattacgcggcagtgcactttcgtcgttttgctcgtaataacgtttggtcaattcaacaatgcgtttaccagcattaaggaacagctgcttacggtcggcgtgggttgccagcagcgagccgttgcccggctgcgacaggcccagcgcttcggtcaggcagttcattgagttagcggtaaacatcccggagcaggaaccgcaggtcggacacgcggaacgttcaacctgatcgctctgggagtcagatactttcgggtctgcgccctggatcatcgcatcaaccagatcgagcttgatgatctgatcggaaagtttggttttcccggcctccatcgggccgccggaaacaaagatcaccggaatattcaggcgcagggaagccatcagcatccccggggtgattttgtcgcagttagagatgcagaccatggcgtcggcgcagtgggcgttgaccatatactcaacggaatcagcgatcagttcgcgagatggcagtgaataaagcatccccccgtggcccatggcaatcccatcatccaccgcaatggtgttgaactctttggcaacgccgccagccgcttcaatttgttcggcgaccagtttaccgagatcgcgcagatggacgtgacccggtacaaattgggtgaacgagttcacaaccgcgataatcggcttgccaaaatcggcgtcggtcattccggtggcgcgccacagcgcacgagcacccgccatattacgaccatgagtggtggtggcggaacggtacttaggcatactttatttactcccagtgtctgtctcgtaaatgggacggtgcgtgccgtcccattttttgtatttattgattaacttgatctaaccagccccatttatcttcggtttcgccagtgaagaggccgaagaaggcttgctgaatgcgtttggtaaccgggccacaacggccttcgccaacctgaataccgtctacgctgcgcactggcgtgatttctgccgcagtaccggacataaacacttcatccgccaggtacagggattcgcgcgacagaacctgctcacgcacttcaattcccagctctttcgccagtttgatgatggcatcacgggtaatacccggcagcgcggaggaggtgaacggtggggtgaacagcacaccatctttcacttcaaacaggttttcgcctgcgccttcagagatataaccgttcacatccagcgcgataccttcctgataaccgtggcggcgcgcttcgctacccaccagcagggaagagagatagttaccaccggcttttgccgcggttgggatggtgtttggtgctgcgcggttccaggaggaaaccatcgcatcgatcccctgctccagcgcttctgcgcccagatacgctccccacgggaaagcggcgataatcacatcggttgagtatcccgctggcgggtttacacccatgccaacatcaccaacgaagatcagcggacggatataggcgctggtgagattgtttttgcggatcacgtcacgacaagcttccatcagctcatcaatgctctgcgaaaccgggaagcgatagattttggcggagtcatgcagacgctgcatatgctcacgatggcggaatacaaccggtcctttgtgcgagtcgtagcaacggatgccttcaaaaaccgaagtgccatagtgcagcgcgtgcgacatcacatgcaccttcgcgtcttcccagcgaaccatctccccattgaaccaaatgtaatcagctttcttcgtggtcatttttatattccttttgcgctcaggcgcggatttgttgtgatgtggttgtgctctgacagatggcaacgtgtgcgacgtccaccagtttatttaactgactaaacagtaagtcgaccgaccgtgggctggcaacggtcaattcgatatttatattttgtgcatcgctggcggcggccatattcattgagcagacgtggaaaccacgatgacgcaccacgcgtaaaacacgttctaaggtttctggattgaagcgagccgatacattgacctgatgttgcatcatgataatttctccaacatttctgaattactggcgccaggcggcaccagcggccagacgttctcaagttcgtcgattgagacatgaagcaggtatggcccatcactgttcagcatggtgtcgagtgccgcttcaacctggtctttacgggtgatgtgttggccagggatgccgaaggcgctggctaacatgaggaaatcggggttatcagtaagggtggtttcgctgtatcgttcctgaaaaaacagttgctgccattgtcgaaccatccctaaccgttggttatcgagtaagacgattttcaacggtaactgcttgcgttttacggtgcccagctcttgcacattcatcatgaaagagccgtcaccggagatacagacaacggtatcgttcggtcgcgcgacttgtgcgccaaccgccgccggtaaaccaaaacccatggtacctaagccgctggaggtgatgaaattttccgggcgagtgtgggcgatgtgctgcgcagcccacatctggtgctgccccacatctgtggtcacgacgcaatccgcaggtttacgatccgacagttgttttaacaacaatggcgcgtagatagcgtcaccgggatggtcgtaacgccaggcatgttcatcacgcagctgcgcgcagtgtagctgccagtcattgatatttaacggctgctgtaatgctggtaacagagcatttaaatcaccttgtaatgccacatgtgcctgacgcagcttgttcatttctgccgggtcgatatccatatggataacactggcgtgtggtgcgaaggtgttcagtttgccggtcacccggtcatcaaaacgtgcacccacggcgatcagcaagtcgcactcctgcaccgcgaagttcgccgctttggtgccatgcattcccagcatgcccagatagtacggataatctgcttcaactgcgcccagccctttcagcgtgcaggtggcaggcatttttgtggtagcgagaaattctcgtaaagcaggaactgcctgcgccatacccacgccaccaccaacgtacagcatcggtttttgcgcttttgccagcatctggcgcgcttgctcgacttcggcatgtgggaaagtcacttcgttttcaacggtggtgaaccacggttccaggtcaccgctggctagctggatatcttttgggatatcgaccagaaccggaccaggacgacctgagctggcaacgtcgaatgcttcagccatgatgcgcggcaattcttccagcgactgcaccagaaagctgtgcttggtacaggctaacgacaatcccaggacatccacttcctgaaatgcgtcagtgccgataaacggtgcggacacttgaccggtgatggcaacaacagggatagaatctaacagtgcgtccgcaagcccggttatcaggttggttgcgcccggaccagacgtggcgatacatacgccagttttgccggtagcacgggcataaccgatagccgccattgccgcaccctgctcatgtcggcacagcaagtgctccacgccgccgtcatacaatgcatcgtaaaccggcataattgcgccacccggataaccgaaaacggtgttcacaccctgtgcccgcaacgcatgtaccacccactgtgcgccattcatagttagttccccgtcctgaatcttgagaaacagaattttgtgctgttattcattgtctgctcctcggttatgtttttaaggtcaaaaaaaacccccggacctttcggtgcgggggtcttagttcgttaaggcttgatctctaagcctttcctcgtccaagtgcagccccgcacggtgggataataatcaccaccacgctaatcacgaccaggctaatcactcgtagaagggctgtcattttgtcttttcttgcatcttgttcgaaggaatgcctaaagagttaccataggttttgtaaatagtacaagatattttttggccgatttttatgatgcgtttaataatttcaatataaattgttgttttttaaaaataaaatagtgagtgaaaaaaattcaatttcagtatgaatgttgttcccttcctcgtagttcatcctttgtccgctgcatttttgcgagcatcattccaccgccagaacaactcaacttcacttgcacaaataaacaggaatcagccactaaaattcacgaattagcgggctacagcagcgatatcttatgcacataatggtgactcaaggagggcttatgtcactgtcaattgttcatacccgcgcagccctgggagtaaatgcgcccccgatcactgttgaggtacatatcagtaaaggtctacccggcttaacgatggtgggcttaccagaaacaacggtaaaagaagctcgcgatcgcgtgcgcagcgccattatcaatagcggatatgaatatccggcgaaaaaaatcaccatcaacctggctccagccgatctgccaaaagaagggggacgatatgatttacctatcgccattgcgttgctggcggcctcagaacagcttacagccaataagttagatgaatatgaattagtcggagaactggctcttacaggcgctctgcgtggcgttcccggtgcaatctccagtgcaactgaagctattaagtcgggcagaaaaattatcgtcgcgaaagataacgaagatgaagtggggctaattaacggtgaaggatgcctgatagccgatcatctgcaagctgtctgtgcgtttctggaaggtaagcacgctctcgaacgcccgaaaccaactgatgcagtatcccgggcgctacaacatgatctcagtgatgttgtcggtcaggaacaaggaaagcgaggactggaaattaccgccgctggcgggcacaaccttttactgattgggccgccgggaacaggtaaaacaatgctcgccagccgtattaatggcctgttgccagatttaagcaatgaagaggcactggagagcgctgcgatattaagtctggtaaatgctgaatcagtacaaaaacaatggcggcagcgcccgttccgctcacctcatcacagtgcgtcgttaactgcgatggtgggcggtggtgcaattccagggccaggtgaaatttcgttggcgcataacggcgtgctttttcttgatgagctacctgaatttgaacggcgtacactggatgccttgcgagagccgattgaatccgggcagatccatctttcacgcacacgagcaaaaataacctatccagcccgtttccagcttgttgcggcgatgaatcccagccctaccggacattatcagggaaaccataaccgctgcacgccagaacagacattacgttatctcaaccggctctcggggccctttctcgaccgcttcgatctctcactggagatcccattaccaccccccggcattttgagtaaaacggtagtgccgggagaaagcagcgccaccgttaaacaacgcgtaatggccgccagagagcgccaatttaagcggcagaataaactgaatgcctggctggatagtccggaaatacgccaattctgcaaacttgagagcgaagatgcgatgtggttggaaggaacactgatccatctggggttatcgattcgtgcctggcagcggttattgaaagttgcacgaaccattgctgatattgatcagtctgacattatcacacgtcagcatttgcaggaggcagttagctatcgtgcgattgaccgtttgctcatccatctgcaaaaactactgacataaaaaaagggcatttcgccctttttattaatcatcagaatcggtgtagtcttcagcaccttcaacctgcggtttaccgccggaaagggtgtgaaaacgttttggacgcttaatacgcgtcatatacttggaccacacgcgttctgcttctgtcactggctcacgttcgccacggcatactgctacgaagagtttctcttcctcggtaaccggctcgcgtttgccaagatccaactcattgaaggcataaccatgacgctcaagcagttgtgcctctttgatggtgaaatcaccatgacgagagaatccacgtggataatgtttattgtcgaaatatcgattagtcgtcgtaaagctttccgccatcctgcacgctcctaattctttgaccgagctagttatggcgcggagtattagttacgcttgacagagtgtaaaacaaaacatttaaatcataacgacaaataattttgcggagagcactgtggatacggaattgttaaaaactttcctggaagttagccgaacgcgtcactttggtcgagcgnnnnnnnnnngaatcgctctatctgacccagtcagcagtgagctttcgaatcagacaactggaaaatcaactgggtgtgaaccttttcacccgccacagaaacaatatccgtttaaccgctgccggtgaaaaactactgccttatgcagaaacgctcatgagcacctggcaggccgcccgtaaggaggtggcgcatacctcacgacataacgagttttctatcggtgccagcgcctcgttgtgggaatgtatgcttaatcagtggctgggacgtttgtatcaaaatcaggatgcccatacaggcttacagttcgaagcgcgaattgcccaacggcagtctctggtaaaacagctgcatgaacgccagcttgatcttcttattaccactgaagcgcccaaaatggacgaatttagtagtcagttgctgggatatttcactttagcgctttataccagtgccccttcaaaactaaagggagatcttaattatctgcgacttgagtgggggccagattttcaacagcatgaggcaggtttgatcggtgctgacgaagtgcccattctgacaaccagttctgctgaactggcacagcaacagattgcgatgcttaatggttgcacctggctacccgtcagctgggcgcgtaaaaaaggcggcctgcataccgttgtcgatagcacaacactttcacggccgctttatgccatatggctgcaaaatagcgataaaaatacgttgattcgcgatcttttgaaaattaacgtgctggatgaagtgtattaatatgaatggctggcaaggatgccggtagaaggatttacttcggagagggttatttcagataaaaaaaatccttagctttcgctaaggatgatttctggcaggggcggagagactcgaactcccaacacccggttttggagaccggtgctctaccaattgaactacgcccctaattagggtggcggaacggacgggactcgaacccgcgaccccctgcgtgacaggcaggtattctaaccgactgaactaccgctccaccgaattcttttacaaccaccggttttatgaccggcttactgcttaatttgatgcctggcagttccctactctcgcatggggagaccccacactaccatcggcgctacggcgtttcacttctgagttcggcatggggtca

SEQ ID NO: 189 - DNA, 37741 bp, Escherichia coli
  source 1..37741: mol_type = genomic DNA
tttttaacgattattaaactataaaaatccgaattgaaccgattcacttaccaattttgtgatttttaattcaattaaaacgaatttaaattcattctacatattgagaggggttgaggctgagctttacaaacggtttctttttaagcaactcatcttcaaccatgcataaagcgggtgcattcgctgccgcataccattattcttgatctgacggaagtctttttgtaacaattcaaacttctttgatgtaaacaaattaatacaacaaacggaattgcaaacttacacacgcatcactgcgtagatcaaaaaaacaaccaccgcacgaggtttcatgatggaaggtcaacagcacggcgagcagctaaagcgcggccttaaaaaccgccatattcagcttatcgcgctgggtggcgcgatagggaccgggttattcctgggtagcgcctccgtaatacagtccgcagggccagggattatcctgggttacgccattgctggttttatcgcctttctgatcatgcgtcagctgggtgaaatggtggtcgaagaacctgtcgcaggctcctttagccactttgcttataaatactggggcagttttgccggtttcgcctctggctggaactactgggtactgtacgttttagttgccatggctgagctgactgccgtgggtaaatacattcagttctggtatccggaaatccccacctgggtttctgccgccgtattctttgtggtgattaacgccatcaacctgaccaacgttaaagtgtttggcgagatggagttctggtttgccattatcaaagttatcgcggtggtagcgatgatcatcttcggcggctggctgctattcagtggcaacggcggcccgcaggcgaccgttagcaacctgtgggatcagggtggtttcctgccgcacggcttcaccgggctggtgatgatgatggcgattatcatgttctcgttcggtggtctggaactggtggggatcaccgcagcagaagctgataacccggagcaaagtataccgaaagcaactaaccaggttatctaccgcatcctgattttctatattggttcgttagccgttctgctctcactgatgccgtggacccgcgttaccgccgataccagtccgtttgtgctgatcttccacgagttaggcgatacctttgtggcgaatgcgctgaacatcgtggtactgactgcggcgctctccgtgtacaacagctgcgtatattgcaacagccgtatgctgtttggtctggcacaacagggtaatgcgccaaaagcgctggcgtctgtcgataaacgtggtgtaccagtaaataccattctggtgtctgcactggtaacggcgttgtgcgtactgattaactaccttgccccagagtccgctttcggactgttaatggcgctggtggtatctgcactggtaatcaactgggcgatgattagcctggcgcatatgaaattccgtcgcgccaagcaggaacaaggcgtggtaactcgcttccctgctctgctttatccgctgggtaactggatctgcctgctgtttatggcggcggtactggtgattatgctgatgaccccaggaatggcgatttcggtatacctgatcccggtatggctgatcgtgttaggtatcggctatctgtttaaagagaaaaccgccaaagccgtaaaagcgcattaatctctctacgccctcacccgtacagggtgagggcaataatctttacaccaacgccccgtaaatcgtcagtagtgcaatcaccaccacgaccacgaacgaggttttcttcgccattgaaaccgctgccttcggcgtctccaccttatcgacatgcggttcacgcgccagagagaactgcgccagacgcgttaacacctgatactgcgaagtatggaaatcacccagcgaagcaaaccaggccggtaacgctttctcaccatgaccgatcaaggcatataccacacccgcaagacgaaccggcacccaatccagtacatgaagcacggcatcaatgccggactgtaaacgatgatgcggcgtctgatatcgcgccagccagtattgccatgcacgcaaaaacgcataccccatcagcgtaacgggtccccaggttccccccacaatcagccagaacagcggtgcaagataaaaacgaaagttaatccacagcaatgcattttgcagctcacgcaaatactcacgttcgtcgcagcctgccgggacgccgtgaatcatggtgagttcgccagccatcgtggcacgggcatggctatcattacgtgaagcagctgtcagataagcatgataatgaagacgaactttacctgcgccaatacacagcaaaccaatcagcagccacaccagtagcgtgggaacgttgaacaatactccctgcaatgcgcgtaacagtaaaaaagtcacgcccatcgcaataatggtcatgcctaacgtgcgcccgagagaaaaatgtttcacccgccgaaagaacgcttcaagacgatgatcaagctgccagtgctcgcccaacttaaacaggcgctcgaaaattaacaccagtaaggttgtaaatagcgtcatgttgtctccttgctgaccagcacacgaaaccgtgcccaatcaaatgcaggaccgggatcggttttccgatccggcgcaatatcacaatggcccgtcatgtttttagcgatatccggatagcaatcaatcagtgcccgcgtaaccgccgcaagctgttgatactgcgcatcggtatacgccagcgtatcggtgccttcaagctcaatcccaatagaaaaatcattgcagcgttcgcgcccctgatactgagagactcccgcatgccatgcacgtttatcgaaaggaacatactggactatttcaccatcacggcgaatcaaacagtgagcggagacgcgcaaatgggcgatctcagcaaagaaaggatgtgcctgcggatcaatagttccagtgaataatgcgtcgatccacggaccgccaaactcgcctggcggcaggctaatattgtgcaccaccagcagggtgggtgtttcgtcatccgggcggcaatcgtaatgtggtgagggaacgcggcgcgcgccaaccagccacccctgttctaacaacatgcaggatctccttatatgtggtgctaatacccggttcagagtagcatgtttctaccttatgattcgttagctatctggagttttaacatgccgcctcgccgctataaccctgacacccgacgtgacgagctgctggaacgcattaatctcgatatccccggcgcggtggcccaggcgctgcgggaagatttaggcggaacagtcgatgccaacaatgatattacggcaaaacttttaccggaaaattctcgctctcatgccacggtgatcacccgcgagaatggcgtcttttgcggcaaacgctgggttgaagaggtgtttattcaactggcaggcgacgatgtcaccataatctggcatgtggatgacggcgatgtcatcaatgccaatcaatccttgttcgaacttgaaggcccatcccgcgtgctgttaacgggcgaacgcactgcgcttaattttgtgcaaaccctttcaggagttgccagtaaggtacgccactatgtcgaattgctggaaggcaccaacacgcagttgttggatacgcgcaaaaccttacccggcctgcgttcagctctgaaatacgcggtactttgcggcggcggagcgaatcaccgtctggggctttctgatgccttcctgatcaaagaaaaccatattattgcctccggctcagtgcgccaggcggtcgaaaaagcgtcctggctgcacccggatgcgccagtagaagtcgaagtagagaatctggaagaacttgatgaagccctgaaagcaggagccgatatcatcatgctggataacttcgaaacagaacagatgcgcgaagccgtcaaacgcaccaacggcaaggcgctactggaagtgtctggcaacgtcactgacaaaacactgcgtgaatttgccgaaacgggcgtggactttatctccgtcggtgcgctaactaaacacgtacaagcactcgacctttcaatgcgttttcgctaatagttgacagatttatccgctccatcgcgggcggataatctccccttccccaactttcttcgtaacgcctcgcaaatttcttgtctttcgctgcaacgaaatagaaaacctcggaatctgctttcccgtttcgttttttgcccctcgcctgtgctgatggcgtttgccaaagtagcgccaaccaaatcaaggagcgaaacagatggacaagcaacgcggttttacacttatcgaactgatggtggttattggcatcattgccattttaagcgccattggtattcccgcttatcaaaactacctgcgcaaagccgcactcaccgacatgctacaaacctttgtgccttaccgtaccgccgtagagttgtgcgcgctggaacatggtggattagatacctgcgacggtggcagcaatggcattccctcgcctaccaccacccactatgtttcagccatgagtgtggcaaaaggcgtggtgtcgctgaccgggcaagaaagtctcaatggactaagcgtcgtcatgacaccgggttgggataacgcaaacggcgtcaccggctggacgcgcaactgcaatattcaaagtgacagcgcattgcagcaagcctgcgaagatgtcttccgctttgatgacgccaactaaggagcggcaatgaatattccacagctcacggccctgtgtctgcgttatcagggagtcttgctggatgccagcgaagaagtggttcatgttgcggtggtcgatgccccctcacatgagttgctggacgcattgcatttcgctaccaccaaacgtattgagatcacctgctggacgcgccaacaaatggaaggtcacgccagtcgcacacaacagacattgcccgtagctgttcaggagaagcatcagcccaaagcagagttgctagctcgaacgttacaatctgcgctggaacaacgcgcgtctgatattcatatcgaaccagcggacaatgcctaccgcatccgcttgcgtatcgacggcgtattgcatcctttaccggatgtttcaccggatgccggagtcgcattaaccgccagattaaaagtgctgggaaacctggatattgcggaacatcgcctgccgcaggacgggcaattcactgtcgaactggcaggaaacgccgtctcatttcgtattgcgaccttaccatgtcggggtggtgaaaaggtggtattaaggttgttacagcaggtgggtcaggcactggatgtcaacacgcttggaatgcagccgttacaactggcggactttgctcatgccttgcaacaaccacagggactggtgctggtaactggccctaccggcagcggcaaaacggtcacgctttatagtgccctgcaaacgctgaataccgctgacattaatatttgtagcgtcgaagatccggttgagatccccatagccggactaaaccagacgcaaatccatccgcgtgccgggctcacctttcagggcgttttgcgtgcgttattgcgccaggatcctgacgtcatcatgatcggagagatccgcgatggcgaaacagcagagatcgctattaaagcggcgcaaactggtcacctggtgttgtctaccctacacactaattccacctgcgaaacgctggtacgtttacagcaaatgggagtcgcccgctggatgctctcatcagcgcttacgctggtaatagcccagcgtctggtacgtaaactttgcccacattgtcgccagcagcaaggggagcccatccatattccagtcaatgtatggccgtcgccgctgccccactggcaggcacccggttgtgtacattgctaccacggtttttatggtcgtacggccttatttgaagttctgcccataacgccggtcattcgtcagcttatttccgctaataccgacgttgaatcgctggaaacgcacgcacgacaggcgggtatgtgtacgctttttgaaaacggctgcctggccgtggagcaaggcttaaccacctttgaagagttaatccgcgtactggggatgccgcatggcgagtaagcaactctggcgctggcatggcataaccggcgacggcaatgcgcaagatgggatgctatgggcagagagccgtgctttgctgctcatggcactacagcaacagatggttaccccacttagcctgaagcgaatcgccatcaattctgcgcagtggcgaggagataaaagcgcggaagtcattcatcaactggcgacgctactcaaagccgggttaacgctttctgaagggctggcactgctggcggaacagcatcccagtaagcaatggcaagcgttgctgcaatcgctggcgcacgatctcgaacagggcattgctttttccaatgccttattaccctggtcagaggtatttccgccactctatcaggcgatgatccgcacgggtgaactgaccggtaagctggatgaatgctgctttgaactggcgcgtcagcaaaaagcccagcgtcagttgaccgacaaagtgaaatcagcgttacgttatcccatcatcattttagcgatggcaatcatggtggttgtggcaattctgcattttgttctgccggagtttgccgctatctataagaccttcaacaccccactaccggcactaacgcaggggatcatgacgctggcagactttagtggcgaatggggctggctgctggtgttgttcggctttctgctggcgatagccaataagttgctgatgcgccgccctacctggcttatcgcgcggcagaaattgttgttacgaatcccgattatgggttcactgatgaggggacaaaaactcacgcagatctttacgattctggcgctgacacaaagtgcaggcattacttttttacagggcgtagagagcgtcagagaaacaatgcgctgcccgtactgggtgcaacttctgacacaaatccagcacgatatcagtaacggtcatcccatctggctggcgctaaaaaatgccggtgagtttagcccgctctgtttgcaattagtgagaacaggagaggcatccggctctctggatctcatgttagacaacctcgcccatcatcatcgggaaaacacaatggcgctggcggataacctcgcagccttactggaaccggcgttgctgatcataacgggaggaattattggtacgctggtggtggcaatgtatctgccaattttccatttaggcgatgcgatgagtgggatgggataacgctggcgtgttgctccacgccagcgttgggagattacaggttgttgaagatgcggttttcttgttcctgcacacgaataaacgtggtgcgcttggtcagctctttcaggcgtgaagccccaacgtatgtacaagctgaacgcaggccgcccaaaatatctcgcgcggtattttcaaccgggcctcgcagcggcagcttaacggttttaccttctgctgcgcgatattccgcaacgccgccaacgtgacgtttcatcgcagactcggagctcatgccgtagaacagcataaatttctcgccgttctcctcaacgatgcgaccgccgctctcttcgtagcccgccagcatgccgccaagcatgacgaaatcggcaccgccgccaaaggctttcgccacatcgcccggcgtggtgcagccaccatcgctgacgatcattccgcccagaccgtgcgcagcatcggcacattcgattaccgcagaaagttgcggataaccgacgcctgttttgacgcgagttgtacaaacagaacctgggccaatgccaactttaacgatatcggcacctgagaggataagctcctcacacatttcaccagtcactacgttaccagcacaaatggttttggtcggccacgcttcacgcgctttcgcaacgaactgcacgaagtgttcggaataaccattcgccacgtcaatacaaacgaagtttaatgccgggttcaggtcgagaatctgtttagttttttcgaaatccgcatcagacgtaccggtagaaaccatcacatgtttcagcacatcagcggaagaattgttgataaacgcttgccactcttcgacagaatagtgtttatgcacagcagtcaaaatatcaaaagaagccagcgcagaggccatagaaaatgtgcctacggtgtccatatttgcggcgataatcggcacgccggaccagctctgacctgaatgtttgaaggtgaattgacgttccagttcaacatcggaacggcttttaagagtggagcgtttagggcggatgagaacgtctttaaaacctaacttcagatcttcttcaatacgcatgtgcggattcctggggttaatggctataagggtaagagcgcaactccagtgacgctatcatacgcactaatcaatgcggcgcaagactgcgaaattgtctttttttacgctacaatcccataaatttacctggtaaatagtgagcgaacgtttcatcaatttcgctttcgtgcactcatttttaacgttttgataatcatgatgaattcccgggaatataaattatgaggtatatagttgccttaacgggaggcattggcagtggcaagagtaccgttgccaatgcgtttgctgatctcggaattaacgtcattgatgccgatattattgcgcgtcaggtggttgaaccaggtgcacctgcgctacatgccattgctgatcactttggcgctaacatgattgctgctgatggaacattgcagcgccgggccttgcgcgagcggatcttcgccaacccggaagagaaaaactggcttaacgccctgctgcatccgctgattcagcaagagacgcaacaccagatccagcaagctacttccccctatgtactgtgggttgtgccattgctggtagaaaactcactgtataaaaaagcgaatcgagtgctggtggtggatgtcagcccagaaacgcaacttaagcgcaccatgcagcgcgatgatgtaactcgcgagcatgtcgaacaaatccttgctgctcaggcaacgcgcgaagcccgccttgccgtggcagatgacgtcattgataataacggcgcaccggatgctatcgcatcggatgttgcccgcctgcacgcacactatttgcagcttgcgtcgcagtttgtctcacaggaaaaaccgtaatgcagacccaggtcctttttgaacatccactaaatgaaaaaatgcgtacatggctgcgcattgagtttttgattcagcaactcaccgttaatttacccatcgttgaccacgctggcgcgctgcatttcttccgtaatgtcagtgaattactggatgttttcgagcgcggcgaagtccgcactgagctgttgaaagaacttgaccggcagcaacgtaaactccagacctggattggcgtgcctggcgtggaccagagccgtattgaagcattaattcagcagttaaaagcggcggggagcgtattaatttccgcgccgcgtatcgggcaatttctgcgtgaagatcgtttgattgctctggtgcgtcagcgactgagcatcccaggcggctgttgcagctttgatttacctacattgcacatttggctgcatctaccccaggcgcagcgcgacagccaggtagaaacctggattgccagcctgaacccgctcacccaggcacttaccatggtgctggatttaattcgccagtcggcccccttccgtaaacaaaccagcctgaatggtttttatcaggataacggtggcgatgccgacttgctgcgcctgaatctgtcgctcgattcacagctttatccgcaaatttccggacataagagccgttttgccattcgttttatgccgctggacactgaaaacggacaggtaccggaacgtctggatttcgaactggcctgttgctaaggagtaaaaatgtcagaaactattacggtgaattgcccaacctgcgggaaaacggtggtgtggggtgaaatcagcccgtttcggccattttgctccaaacgttgtcagctgatcgacctcggagaatgggctgctgaagaaaaacgaatccccagcagtggcgatctttccgaaagcgatgactggagcgaagagccaaagcagtgacatttgtctgatgccgcacgtaggcctgataagacgcggacagcgtcgcatcaggcatcttgtgcaaatgtcggatgcggcgtgaacgccttatccgacctacaaaaacaaatttatcaatgagttagaaatccctgtaggcctgataagacgcgccagcgtcgcatcaggcatcttgtgcgaatgtcggatgcggcgaaaacgccttatctgacctacagacgtttaagcttcgcaattaccggttcattggctggcggaaaatcatcggcattaagatcgaccagcgccatccactcaccgggttgcccttctttaccccacggcttcccttcccagcgttcgaccagccagaaccacagtgttatatgcctgtccgggaattcatattccagtttttcaaatagcgaaaaatgttgtggggtaatcccgacttcttcctgaagttcacgcaccaccgcctgttccggcgtttcacccatttcaattttaccgccgggaaactccagtttattcgccatgtgcgcatctgctgcgcgacgcgttataaagatttcattgttctcgttgcgaataatacctaccgcaatttgcagctttttcattgtcttaaacctataaaaaaggcgcagaatcctgcgccttttacttcaactgttagcttttattgcaggcgaccatggcactgcttgtattttttaccagaaccgcacgggcaaggatcgttacgtcctactttgcgttcaccggtttgcgccgccagtgcagctgcggctgcagagtcgtcatcctgatggctaagctgctgcatttgcgctaaacgctcggcttccatacgacgctgttgttccagctcctcaacttcttcaggcatacgtacctgaactttgctcagcgtactgataacttcatatttcaacgactccagcatcgctgcaaacatggagaacgattcacgtttgtattcctgcttcggatctttctgtgcatagcctcgcaggtggataccctgacgcagatagtccatcgctgccaggtgctctttccacagggagtcaagcgtttgcagcatgacgcctttctcgaagtgacgcatcatctctgcaccaaccacttcttctttacgctgatacacttcgatggactgcgccagaatgcgctcacgcagcgtctcttcatgcagttcgggttctttatccagccactcagcaattggtaaatcgaggtcgaaatcgttcttcagacgttcctgcagccccggaatatcccacatttcttccagcgactgcggcggaatgtaggcatcaatggtggctttgaacacatcttcacgaatgctgttgatggtttcgctcacatcgctaacatccagcagttcgttacgctgggagtaaatggcgcgacgctgatcgttagccacgtcatcatattccagcagttgcttacgaatgtcgaagttacgactttcaactttacgctgggcgttggcaatcgctttggtcacccacgggtgttcaatggcttcgcctggcttcatacccagtttacgcatcatgccggatactcggtcggaagcaaaaatacgcatcagcgcatcttccatcgacaggtagaaacgggaagaaccagcatccccctgacgaccagaacgaccgcgcaactggttatcgatacgacgggattcgtgacgctcggtaccgatgatatgcaggccacctgctgccagtaccgcatcgtgacgtacctgccagtcggctttaattttttcaatttgctctgcggtcggattttccagcgcggcaacttctgcctgccagctaccaccgagcacaatatctgtaccacgacccgccatgttggtcgcgatagtcaccgcagccggataacctgcctgagcaacaatcgccgcttcgttggcgtggaatttggcgttcaggacattgtgcttaataccggctttggtcagttcgtttgacaccagctccgatttttcgatggagatagtacccaccagcaccggctggcctttcgcagtacgttctttgatatcttcaatgatcgcctgaattttttccgcttcagtcatgtagaccaggtccggcaaatctttacgaatcattggacggttggtcggaacaacgacggtatccagcttgtagatggagctaaattcgaaagcttcggtatcagcagtaccggtcatccccgccagtttttcatacagacggaagtagttctggaaggtgatcgaagccagcgtttggttttcgttctggatctgcacaccttctttcgcttccacagcctggtgcagaccatcggaccagcgacggccctgcatggtacgaccggtgtgttcgtcaacgatgataacttcaccatctttaacgatgtagtcgacgtcgcgggtaaacagcgcatgagcgcgcagcgccgccgttacgtggtgcatcagcatgatgttggccggagagtacagagactccccttcatccatgatgccctctttcaccagcagttcttcaatcagcaccagaccacgttcggtcaggttcacctggcgagatttttcgtccaccgagaagtggccttcgccctggaaggtttcggagtcttctttttcctgacggatcaggtgcggaataattttattcacgcgtttatacatttccgagctgtcttctgccgggccggaaatgatcagcggtgtacgcgcttcatcgatcaggatggagtccacttcgtccaccagcgcatagtgcagtttacgctgtacacgttcttcagggctgaacgccatattgtcgcgcaggtagtcaaagccgtattcgttgttcgtaccgtaagtgatgtcagctgcgtaagcttcgcgctttgccggtgctggcatgcccggcaggttgataccgacagtcaggccaaggaattcaaacagcggacggttgttttcggcgtcacgttgcgccaggtagtcgttgacggtaactacgtgcacgcctttaccggttagtgcgttcaggtaagcaggcagcgttgcggtcagggttttaccttcaccggtacgcatttcggcgatgcagcgttcgttaagaaccataccgccgagtaactgaacgtcgaagtgacgcataccaaagacgcgcttacttgcctcacgtaccacggcgaaagcttccgggatcagattttccagcacttcgcctttttccagacgtgcacgaaactctgcggttttccctttcagttcttcgtcggagagtttttccatctccggttccatggcattgatgatgttgaccactttgcgcatccggcgcagggtgcgatcgttacgactaccgaaaactttagttaacaatttgattagcataataaaatctcaaacgccccgcgttgcggagttaataaaatgaagtaaaggtttattgttgttaggtgaggcgttgagggccagcacggatgccttgcgcctggcttatccagacgggcgtgctgaattttgcttgtggggtaaaatgcgcataatcaatgcgataacccttttcagacggcgtgccttcctgggtcagcagcgcgctgagcgtatccagtaatgcaagatgttgcgcctgaagaggcaaagattcttcagcaacgggcagtgtttgcggtgccattgcgaaagaaagatgacggattaccgtgcgaatggcatgttgatgccagtaatcaacggaatagttcgaattcgggcggcgtgtgttcgcttccagcaaggccaattgaccaaagttaactttggctgaaggctcgtggttgcgggttgtcgcttttgcgggcgcgtttggttcggcggcgttgctgagcgcaggcaaacctaaactcgccgcaaccatccctaataagagatgcggccagaagtagcgtttaccaaactgtcgccagcgcgtcagtattccactcacgttattgccatcccgatcgtattcaaacgtatttagcgcacaaatcttatcattaaagcctgcagtccacagcacgaatgaagataagttgtgcggaaaagtgcttaagaaaacagcgttcgcaccgttttttatagctcttataaannnnnnnnnnnnnnnnnnnnnnnnnnnnnnnnnnnnnnnnnnnnnnnnnnnnnnnnnnnnnnnnnnnnnnnnncgactggttcacctggccggagagagtgccagatttgccagtcgaattttatacgacagtataaatgtcgttatgccagtacagctgaaggcgctttgaaggccaacggcagttctgcgtcgtcctggaaggtcacatattcccaggcttcctgtttcgccaggacagcctgcagcagtttgttattcagtgcatgaccggatttataagcggtaaatgcaccaataatattgtgaccacacatgaacaagtcaccgatcgcatcgagcattttgtgacgcacaaattcgtcttcaaaacgcaggccgtcttcgttcagtacgcgataatcgtcaacaacgatggcacaatcgaagctgccgcccaggcacaaaccacgggactgcagatattcgatatcacgcatgaaaccgaacgtacgcgcacggctgatctggcgcataaacgcatcagcggagaagttcatcgcatagcgctggttgctggaatcaatagccggatggttaaaatcgatggtgaaatccagcgaaaaaccattgtacggcttaaattcagcccacttatcgccatcttcgacacgaacagtctctttgatgcgaacaaattttttggcgcagttcaactcgtcgataccggcgtcaagcagcaggtatacaaacggagcggcgctgccgtccatgatcgggatttccggcgcgttaacttcgataacaatgttatcgatgcccaggcccgcgagagcagcattgaggtgctctacggttgaaatccgtacatcatgctcgttgaccagacacgtacagagcatggtatcacgcacagatttggcatcggccgggaaatctaccggtggattcaagtcggtgcgacgatagatgaccccggtgttggccggcgcagggcgtaacgtcagggtgactttcttgccggtatgtaaaccgacacccgtcgcctgaacgatacgtttaagtgtcctttgtttgatcatcgtattatctcgccaaattacctatccaaccgaagtgtactatacattcggcgggccagtttagcacaaagagcctcgaaacccaaattccagtcaattcttaatcagcttgcttacgcaggaatgctgggatatccagataatccggctctttcgcagtttgcggcgcattgtcattcacgactttagcaactggcttctgctcctgggtcagcggagccatcccatgctgctggtagcgatccatcactggctgctgaacctgcttattggtcaccagagtgatttcaggacgtttgtccatgccgatacctgtcgcaacaacagttacgcgcagctcgtcattcatatccgggtcaagagaagtaccgataaccacagtcgcgttgtcggaagcaaatgcacggatggtgttacctaccgtttcgaactcatccagacgcaggtcgaagcccgctgtgatgttaaccagcacgccgcgtgcgccagataggtcgatatcttccagcagcggagaagaaatagccatttcagcagcttcttccgcacggtcttcaccgctcgccacgccagaacccatcattgcgtagcccatttcagacattacggtgcgtacgtctgcaaagtccacgttcatcaaacccggacgagtaatcagttcggcgatgccctgaacagcgcctttcagtacatcgttcgctgcgccaaacgcatccagcagggagataccgcggcccagaactttcagcagtttgtcgttcgggatagtgatcagagagtccacatgcttggacagttcagtgatcccctgctccgcgaatgccatacgcttcttgccttcaaagttgaaaggcttagtgacgacagcaacggtcaggatacccaaatcttttgccacttcagcgacgactggtgctgcacctgtaccggtaccaccacccatacccgcagcaataaagaccatgtctgcaccttccagcgccgcacgcagtgcatcgcgatcctcatcagccgcattgcggccaacttctggattagcgccagcgcccagtcctttggtgataccgctaccgatttgaatcgtctgtccaaccgctgttttacgcagcgcttgtgcatcggtatttaccgcgaagaattcaacaccttcaatacgctcgcgcaccatgtgttcaacagcattaccgccgccgccgccgacgccgatgactttaatcaccgcgtcattggtaagttccattggttcaaacatagtttctctccgatttgtgcctgtcgcctgaggccgtaatcatcgtcggcctcataaaaattaaaactcttttcgcagccaactattgagtcgcttgatccacgagccaactgatgctgtaacacgtttttctacttcagcttcaccgttaagatgtgactctttcccatagtgaagcaatcccaccgccgtcgaataatacggctcctgagcataatccgttaaaccggtaatgttcagcggcgcgccgatacgcacttgcgtatgaaacacgcgctgagcacaggctgcaagaccttcgatctgcgctgcgccaccggttaatacaatgcctgccgccaggtgatgtttaaccccttgttggcgaagcttttcctgcaactgcaatatctcttcgttgaccaggttgagcagctcggtatagcgcggctcgatcacctctgccagggtctgacgttgcagactccgcggcggacgaccacctacgctcggcacttccacgctctcatcttttccaacgatggaacccagcgcacaaccgtggcgaactttaatcgcttcggcgtcgcttggcggcgtgccaaaggcgtaagcgatatcactggtcacgacattgccagcataaggaattaccttagtgtggcgcaatgccccaccggtataaacggcgatatccattgtaccaccaccgatatcgacgacgcagacacccagttcacgttcatcttccgtcaataccgaataacttgatgccagtccggcaaatatcagttggtcaactttcagcccacaacgttcaaccgctttgacgatgtttttcgccatatcgttgtgacatgtgatcaggtgcacttttgcctgcatccgcacgcccgaaagtcctaccggattcttgatcccttcctgatagtcaatcgcatactcttgcgggatcacatgcagcacacgatgctcatcgcgcacacgcaccgatttcgcggtatggacgacgttttccacatcttcttgcgtcacttcttcttcagaaataggcaccataccaatttcattctggcagctgatgtgcttaccagaaagcgccagatataccgaagagatctgacaatctgccatcaattctgcctggtcaatggcgcgttgtacgcacttgaccacggattcgaggtcgttcaccccgcctttatccataccacgcgacgggcagctgcccacgccaatgatattgaccataccgtcgggcagaacttcccctactaaagcggcaaccttcgcggtaccaatctccagtcctactaccagttttctgtccgtcgccttgatcattgttgttctgcctgtgcctgattttgttgctgagtagattcctctggcggcaagggcgcccagcctactgccgctccagagtcataacgcaaatcaacgtagctaatccgtttgccatcggtttgcgcctgctgctgtaaaaccggataaagttctacaaagcgagccaaacgtttcatcgtatcgccccggccaagattgagcttaatatcgttattcagcgtcaactgccaggaacgccgcgcggtcatcgccgcttccttcagagtaaatctgtcctttgccagcatctgccccatttcgcgatagccctgcaacacttcattggcgctgccttccgggccatacagcattggaagcacctgcttgctggtgcgttctggcggcacgctgaaggtatttccttccgcgtctaccatatgttgatcattccaccgcgcaatcggcacatattcaaccagatgaatcttcaattcatcaggccactgctttctgacgctcacctgcttaatccacggcaggcgttgttctatttgcgtctggatgatgttgacatcctgggtcataaaggtacccggctcacccaatgccaggatcgactgccggatatcgtcattacgtgtgtaatggcgttcaccggtcaacaccagctttgagagcggcaggcgttgcgcatcttccatccagcccaacacgacccagccgctcaccaacactgtcgttaaaacggtcagcaggaaaaggatccccgccagacgcgttccattattgcggcgagaagaaacctcttcttcgctgtttcgcgtgttcagagcagcctgcgacatattagtccgccagttccagaattcgtactaccaactgcgagaagctcatacctgcctgacgtgccgccatcggcaccaggctgtggctggtcatacccggtgaggtattggcttccagcagataaaactgtccatcgctgtccagcataacgtcaatacgtccccatcctttgcaacctaacgtcgtccatgctttcagcactaatgcctgcaaattggcctcttgtgacgcttccagacctgcggggcagaaatactgtgtctcatcagagagatacttcgcctcataatcatagaaggttccggacggttgaatacgtattgacggtaaaatttcttcaccgagtatcgcaaccgtgaactccggcccacttagccatttttcaatcaatacttcttcatcgtgctgaaatgccaatcttaatgcatcttgtagagcattttctgctactacttttgacattcccacactggaaccttcgcggctcggcttaacgataaccggcaaacccagagcagaaatttctgctaactgcttatcgctcaggcctttttcaaactctgcgcgggttaacgctacccacggcgcgaccggtaaaccggcaccttgccatagaagtttgctgcgtagtttatccattgaaagcgcagatgccatcactccgcttccggtataaggcaagcccatcagctcgagcatcccctgcagcgtaccatcttcaccgccgcgaccgtgtagcgcgataaacactttctgaaagcccatcgacttcagttgcgtcacgtcgacttctttcgggtcgacaggatacgcgtcaataccgccttcacgcagtccggctaacaccgctgcgccagaattcagagaaacttcccgctcagcggaggtcccacccaacaggaccgcgattttatcagtcatgttgttcttcctccggagtttgcggcttcagtttgatttcagctaaagaacgagcaatttttccaatattaccagccccctgaacgagaatcaggtcgttaccggttaataccggtgccagcatctcggctacccgcgccggatccggcaccagaatgggatcaattttcccacgtccacgaattgtgcgacacagcgaacggctgtccgctcccggaattggcgcttcgccagccggatacacttccagcatcaacagggtatcaacctgcgtcagcacattggcgaaatcatcatacaggtcgcgcgtacgggtaaaacggtgcggctgaaacagcattaccaggtttttatccggccagcctgcgcgcgccgctttaatggtggcgtccacttcagtcgggtggtggcnnnnnnnnnngtcatcgaccagcattgccgtaccgcttttaccattcactggctccagcgggaattcaccgaggaaatcaaaacggcgaccagtcccctggaagctttcaagcgcccgcaaaatagcctcgtcgtcaatgccctcttccgtagcaaccgcaaccgcagctgcggcgttcagcgcgttatgacgacctggcgcattcagggtgacgcgcatcggctctttgtcctggcgcagcagcgtaaagtgcccctgcgggccaatctgctgataatcttctacacgcacgtcggcatcttcgctgaagccgtaagtcgtggtctgacgccccactcgcggtaacaattcgcggatcaccggatcatcaacacacatcaccgcacgaccgtaaaacggcaggttgtgcagaaaattaataaaagtctgttttaaattctcaaagtcgccctggtaggtatccatgtggtcggcttcgatattggtgacaatcgccaccatcggttgcagatgcaggaacgatgcatcactctcatctgcttcggcaatcaggtaccgaccatgccccaaacgcgcatgaacccccgccgcttttaccagcccgccgttaacgaaggttgggtcgagccccgcttctgcgtagatgctggaaaccatcgcggtagttgtcgttttgccgtgcgttcctgcaatggcgatgccatgacgaaaacgcattaactcagccagcatttcggcacgacggatcaccggaatacgcgcttcatgagctgcgacaatttccgggttgtcggcagaaatcgcgctggaaacaacgaccacgctggcatcacgtacgttttccgggcgatggttgaaataaatcgtcgctcccagattcattaactgctgcgtgaccggatttggcgctaaatcggaaccactgatctgataaccttcattggccagaacttcggcaataccgcccataccggcaccaccgatgccgacaaaatgtatgtgccgaacgcgacgcatttcgggcacgatggaacgcagttttgccaattgttgtgtattcattctttacgccattaacttcttaaattcatacgatgcaaaaggcatcgctacaattacgcccgggcagcccggctcacttcatttgccactcgctcggtggcatccggaatggatgcagcgcgggcgcgttctgccatggttaataaggtttctcgcgaccacccggccagggtgttggcgacagcatccacgctaagctgtggctgttcgataattttggctgcgcccgctttttccagcggtagcgcattccagtattgctggcggtctttatgttgaaacggcacaaacaacgccggtagtcctgccgcggcgatttcactcaccgttaacgcaccggagcggcaaacgacgacatccgcccacgcatacgccgccgccatatcatcaataaattccgtcactttatgctgcggttgccccgcttcggcatacgcctgttcaacggattgttgcgaacctttgccgctctgatgccagatagtgactgaatcacccagtttcgcagcaacctgcggcattgtctggttaagaatgcgtgcgccctgagacccccccactaccagcacacgaaccggaccttcacgtccagccaaacgttgctgcggcaacggcagcgccaacacatcggtacgcaccgggttacccactacttccgcattagggaaagcacctggaaacgcctgcatcactttggtggcaatcttcgccagccatttattggttaagcccgcaataccgttttgttcatgaagtacaaccggaatgcctaacgaccacgcggccagaccacctggacctgacacatagccgcccataccgagcaccacgtcaggtttgtacgctttcataatcgcccgcgcctgacgccaggcattgaagatacgcagcggcgcagctatcagtgcttttataccttttccacgcagaccagagatacgaatgaaatcaatttcgatgccatgttttggcactaagtccgcttccatacggtcagcagtccccagccagcgaacttgccaaccctgagccattagatggtgcgcaaccgccagtcccgggaatacatgtccaccggttccgcctgccatcaccattaatcgctttccttgaccactcatcgtgaacctcgtacaaacgcctgcgctttctccagacgcgtttcataatcaatacgcaacagcatcatgatggctgtcgacataatcagtaagctcgaaccaccgtaactgatcagcggcaatgtcagacctttggtcggtaacatccccgccgccgcgcctacgttaaccagcgcctggaagctaaaccagatgccaatggaacaggcgagaaaaccggaaaaacggtggtcaatttctaacgctttgcggccaatcgacatcgcacgaaaagcgacgaagaataccattaaaagtgccagcaccacaccgacataccccagttcttcgccgataatggcgaaaataaagtcagtgtgcgctcccggcagatactccagtttttgtaccgagttacctaaaccttgcccccaaagttcgccgcgacgaagcgcaatcagcgattgcgttaactgatagccgctgccaaagggatcttcccacgggttccagaatgcggtaacacggcggatacggtacggttcggcgagtatcagcaacacaaccgctgaaatgcccataccgataatggcaatgaactgccacaatttcgctcccgccaggaacaacatcgccagcgtagtcacaaacaacaccaccaccgtaccaaggtctggctgtgccagcagtaacactgccaacaccagaatcacgcccatcggtttcaggaagccgcgcaggttattacgtacttcgtcgcctttacgcaccagatagttggcgatatagcaaaacagcgacagttttgtcagctccgcaggctggatacgcagcaaaccgagatcgatccaacgcgatgcccctttaaccgagctacccactaccagaacgatcatcagcaggatgatagatccgagcagcatcgtggcactgtagcgttgccagaactccatcggcagacgcagcgtaatgatcgccagaataaacgccaaaatcagatagacaccatcacgcttcgcgaagaagaacggatcgttggttaagcgttgccctatgggcattgacgccgaggtcaccatgataaagccaatcgccgcgaggccgaaggtcagccacagtaaggtgcgatcgtacatgatcaggctgtcggtatctttttcccgcgagcccatcacccagccctttagcgccgtggagatccagaccaggatactgaatcctggcaggcgcggcattttcaggcgagggagagataaacgcatcaacctaactccttcgccagacgggcaaactcattgcctcgttgttcaaagttcttgaactgatcaaggctggcacaggccggggagagtagaaccatatcgcccggctgaacacgcggagccagcaagcgcatcgcctgttccatagtttcggtttgttctgccacttccgggtgtagcgccgccagctgcgcgccgtcacgaccgaaacaatacagacgtacgttatcgccattcaggtaacgcgccagtgggctaaagtccgccgatttaccatcgccgcccagcaacaaatgcagcgtgccgtctacgtgcaggccattcagcgccgcttccgtactgccgacgttggtcgcttttgaatcgttaatccaacgtacgccgttatgctccagcacaacttcaaagcgatgcggcagaccagtgaatgtggttaacgctttcaggctgctggcacgcggtaaccctgcggcatctgccagtgccagcgccgccagcgcattggtgtagttatgctgcccggaaagtttcatctctttcacgttcagcactttctcgcctttaacccgcagccaggtttcgccctgctgatgattcaggtgatagtcacccatgttgacgccaaagctgacgcagcgttcatccgcaccgcgaatcggcattgttaaggcatcatcggcattaaccacgcaaacttttgcgttttcgtaaatgcgcagttttgctgcacgatactgttgtaaaccaaacggatagcgatccatatgatcttcagtcacgttcagaatggtcgctgctaccgcctgtaagctagaggtggtttccagctggaagctcgacagttccagcacgtacagttcgcactcatcatccagcagcatcaacgcaggcaggccaatattgccacccactccaacgttaacccccgccgctttcgccatttcacccactagcgtggtgaccgtgcttttgccgttagaaccggtaatcgccacaatcggtgcttgtgcttcgcgacaaaacagctcgatatcgccaacgatttcgattccggcatcagcggcagcgcttaaggatggatgcgccagtgcaataccgggactggcgacaatcagatctgccgccatcagccattcatcattcagactgcccgtgtggcgttctacggcttcgggtaatttatccaggccaggcggtgtcatacgcgtatccataacgcgcggcgtcacaccgcgagcgaggaaaaagtccacgcaggaaagcccggtgaggcccaggccgataatgacaacatttttaccctggtaatcagccatgattaacgtaccttcagcgttgccagaccaatcaggaccagcatcagcgaaataatccagaaacgcacaatgacgcgcggttccggccagcctttcagttcatagtggtgatgaatcggtgccatgcggaaaatacgttgtccgcgcagtttaaaggagccgacctgcaggatgacagaaagcgtttctaccacgaacacgccccccataatcacnnnnnnnnnntgacgtagcagtacggcgataatgcctaacgcaccacctaacgccagcgacccgacatcgcccataaagacctgcgccggataggtgttaaaccacaggaagcccagtcctgccccgactatcgcggtacagacaataaccagttccccggcgtgtcgcagatacggtatgtgtaaatagctggcaaagttcatgttgccggtcgcccacgccaccagcgcaaaaccaccggcgacaaatacggtcggcataattgccagaccgtcaagaccatcggtcaggtttaccgcgttgccagtacccacaatgacgaagtaagccagcagaatgtagaacagccccagttgcggcatcacatctttaaagaatgggaccaccagctgcgttgcgggcgtgtctttgccggcaaggtacagggcgaaggcgacacccagcgcaatgaccgacatccagaaatacttccaacgagcgatcaaccctttggtgtctttacgcaccactttgcgataatcatcaacaaagccaataacaccgtaacctaccagcaccaccaacacgcaccagacgtacggattggacgggtaagcccacagcagtacggagatcacaatcgccgtcaggatcataatcccgcccatggtcggcgtaccgcgcttgctgaagtgtgattcaggaccgtcgttacgcaccacctgaccaaaggaaagtttttgcaaatgagcaatcatacgcgggcccatccacaatgagatgaacagcgcggtcagcaggctgacgatggcgcgaaacgtcagataggaaaagacgttaaagccggaataatatttgaccaaatgttcggccagccaaactaacatgtcccattctcctgtaaagcgcgtactacctcttccatggcggcactacgtgaacccttaactaaaatcgtaattacctgttgctcagcaatcagtgatttaagacgcgtaattaacgcagttttatcagcaaaatgttcgccaacgccgctggcggtgctgatagcatggctttgtttacccacgcttaacacgcggtcaataccagcagcttttgccgcctcgcccacctgtacatggcaggcttcgctttcagcgcccagttccgccatatcgcccaccaccagcacgcggtagcccggcatttcagccagtacctggactgctgcagtcattgaaccgacattggcgttgtaggagtcgtcgagcagcaactggttttctgccagttggatggggaacagacggcctggaacagctttcagatttgccagccccgctttgatagcatcaagcgttgcgcccacggacatggagagcgcagcggctgccagcgcattcgcaatattgtgacgccccggcaacggcagcagaacatcgacgctaccggttggggtttgtagggtaaattccgtaccgtgcgaggtcacatggatattggtggcggtgaaatcgctgttggcggcattgggtgagaaacgccacactttgcgtgagccaattacgctctgccagttcagccagtcgttgttgtcggcgttcataatggcgataccgttttccggcaggccgctaaagatttcacctttcgctttcgcgacacccgcaagcgagccaaaaccttccagatgcgccgctgccaggttgttgaccagcgcagcttccgggcgagtcagactcacagtccaggctatttcgccctgatggttcgcgccaagttcaataactgcgtaatcgtattccggcgttaagcgcaacagcgtcatcggtacaccgatgtcgttgttgagattgcctgccgtataaagcgtgttgccgcactggcttaaaatcgccgccgtcatctctttaacggaggttttgccggaggaccccgtcagagcaaccacgcgcgccggaacttgctggcgaacccatgcagccagttcaccaaacgccagacgcgtatccttgacgattaactgcggcaggtcgatgtccagcggacggctaaccagtagtgcgcctgcgccgccagctttcgcctggtcggcaaaatcgtgggcatcaaaacgttcgcctttcagggcaacaaacaggcagcccggcgtcagttttcgggtatcagtggttacagcatcaagggtgatatctgcaccttgcagttcaccgttgagaatgtcggtaagttggctaagggttacgctaatcatgcaatcacccccagcagacgcgccaccgtgacgcgatcggagtagtccagacgctgattgccaacaatctggtaatcttcatggcctttgcccgcgaccagtaccacatcattctctttagcctgcataacggcgcaagtcaccgcttcagcacggccttccatcactttggcatgtccggcatctaacattcccgccagaatatcgttgatgatggcacgcggttcttcggtacgcgggttatcgtccgtcaccaccgccacgtcagcaaactcttcggcaattgcgcccatcagtggacgcttacctttatcgcgatcgccaccacagccaaagacgcaccacagcttgcccgcacagtgcaggcgcgccgcctgtaaggctttttccagtgcatccggcgtatgcgcgtaatccaccaccaccgtcggtttgcctggcgcagtgaacacttccatacgtccgcaaaccggttgcagacgcgcggcggtttttaacagatcagccagcgggtagccaagtgccagcagtgtcgccagcgcgagcagcaggttgctgacgttaaaagcgcccatcagatggctttcaatttcgccatcgccccaacttgaactaaagcgaatggtcgcgccgctgtcgtgatagttcacttcggtcgctttcaaccagcgtccgtgacagttcggattgatatgatcttccattgataccgcaaccgcgtccggcagttttgccagccagcggcggcccacttcatcgtcggcgttaacaatcgcctgaccacaatgatgttcagaataaagcagccatttcgcggcttcgtagtgttccatatcaccatgataatcaaggtgatcgcggcttaagttggtaaagaccgacgccgcaaatttcaatgccgccacacggtgctgtaccagcccgtgggaggaaacttccattgcgcaaaacgtcgcgccctgatccaccagccccgccagctcatgctgaacatcgactgccgaaccggtggtattttctgtcgggatcactttccccagcagaccgttaccaacggtgcccattaccgcgctggtttcgccaagcagttggctccactgcgccagcagctgggtagtcgtggttttgccgttggtgcccgttacgcctacgagacgtaaattgtcagagggttcatggtaaaagcggcccgccagtgcagataaacgctcgttgagctggctgagatagatgaccggtacgccgtgcatttcacggatttcaccgtcggtcgcctcacctttcgcctctgcaataatggcagccacaccttgcgctatcgcctgcgggatatatcgacgcccgtccgcctgatgacctactacagctacaaagagatcgcccgccgcagccacacggctgtcgagtgtcatctctcgcagtgctcgcgaaggtgcgtctggcacccacggagcaagaaggtcgcgcaaattacgatctgccacctgtcccctcgccttgattaatcacaaattcatttttatcgcccgttgtcagcgcatccggctcgatgttcatggtacgcaatacgccgcccatgatggcaccaaagaccggcgctgaaacggcgccgccgtagtatttacccgcctgcggatcgttgataacaacaaccagcgcgaagcgcggctgactcgcaggcgcaacgcctgcggtataagcaatatatttattgatgtagcgaccgtccggcccgacctttttcgcggtaccggttttaatggcgatacgatagcctttaatcgccgccttcacgccgccgccgcctggtagcgccacgctttccatcatatgcaccacagtgcggacaatggattccgggaagacacgttcaccgggaaccggggggtcaactttggtaatcgacagtgggcgataaatgccgtagctgccgatagttgcgtagactcgcgctaactgtaacggtgttaccattagcccgtagccgaaagagaaggtggccctctctatgtcagaccaccgttgtttttgaggatataagccactgcgttctccgaccaaccccaaattggtcgcttttcccagtccaaagcgtgagtaagtatctactaacgctgaggacggcatcgctaacgccagcttggaaacaccgacgttactcgacttctgtaataccccggtcagggttaattcgctgtagcgtgccacgtctttgatttcgtggccgttaattcgataaggaatggtattgagtaccgagttttcccgcaccacgccacgttgcaacgcggtcattaccaccatcggtttaaccgttgagcccggttcaaacacgtcggtgatggtacggttacgcatcgcctctttcggcgtgccgctcagattgttagggttgtatgacgggctgttagccatcgccagcacttcaccggtgttgacatccaccagcacggcgctaccagattcagccttgttaaaggccaccgcgttgttcagttcgcgataaaccagcgcctgcaggcgttcatcaatactcagcgccaggttgtgcgctgcctggctgtcagtagaagaaatatcttcaattacgcgaccatagcggtctttacgcacaatgcgctcacccggctgcccggtaagccatttatcgaaactcttctcaacgccctcaatcccttgactatcgacgttagtaaagccgatgaggtgagcagtcacttcgccggacggatagtaacggcgagactcttcacgcagatgaatccccggcagtttcagttttttgatgtagtccgccatgtcagggttcacctgacgcgccagataaataaagcgccctttcgggttggcgttaatgcgggctgaaagctgatccagcggaatattgagcgcgttagccagcgccttccagcggtcaccgacgctgataccgccagcgtcatgcacttctttcgggtcagcccaaatcgcttttaccggcacgctcaccgctaacgggcgaccagaacggtcagtaatcatgccgcgggaggtggaaacttgctgaacgcgaagagaacgcatgtcgccctctttcaccagcatatccggggagataacttgtaaccacgctacgcgtccgagcagaaaagccagcgccaggagaatacagccgcataacaacgcaaaacgccaactgataaagttggcatgttcttcctgacgttttggtttctgcgttttcgccgctgctttcatgcgtcgcgtttatccttatttttgcactacgatattttcttgtgacggatcaacatgctgcatttgcagcttttccgtggcgatcctttccacccggctatggtcgccgagcgcattctcttcaaggatcaggttgcgccattcaatgtctaaagcatctcgctccagcaccagttgttcgcgctgagcggtcagtaaacgggtatggtgcgccgtggttaccacagtcaccgccgtcaaaataatgcaaatgaacaggcagagtggcagcttcccaaatcgcaaaagatcgtcaccgataacaccaggcaatgcatggcgctcgtggcttcccatcgatcctttaactttgcttagagcttctgtcactctgctgatcatgcattcgtcctctctgcaatacgcagaactgaactacgggcacgagggttctcagccacctcttcttcgcccggcattaacttgcctagtgctcgcagctgacggccacccagttttttgagctgctcttcagtcatcggtaaccctgccggaacttgcggaccgcggctgttttcacgcataaaacgtttcacaatacggtcttccagcgagtggaagctgatgatcgaaagccgcccacccggggccagcacgttgagcgagctttttagcgcctgctctatctcctccagttcactgtttacccaaatgcgcaccgcctggaaggtacgggtcgcgggatgtttaaacttatctttcaccggcgttgcagcagccacgacttccgccagttctttggtgcgggtcatcggctgttcgcggttacgctcgacaatggcgcgggcaatgcgtttggcaaaacgctcttcaccataggttttcaatacccaggcgatatcggcttcttctgcggtttgtagccattcagcggctgactgcccacgggttgggtccatacgcatgtccagcggaccatcgcgcataaaggaaaagccgcgctcagcatcatcaagttgcggtgaagagacgccaagatcgaggagaatgccgtcgatcttgccgataagatcgcgctcggcaacgtattcgcccagcgcggagaaaggtccgtggatgatggagaagcgcggatcatcaatagtcttcgcaacggcgatagcctgcgggtcgcgatcgatcgccagcaaacgcccctcttcgccaagctgcgagaggatcagacgtgagtgaccaccgcgaccaaaagtcccatcaatgtagatgccatcaggacggatattgaggccattaacggcttcatccagcagcaccgtagtatgtttatagttttccatcattttatagagacaagtcctgcagtcgctccgataagtctccggtagccaactgctctgcgtcgatatcttccttgacctgttgatgccaggttgtttcatcccacagctcaaacttgttgaactgtccaaccagcatcacttcttttgtcagcccggcatgttgccgcagtactggcgcgattaacaatcgacctgcgccatccatctgacattcgctggcatgacctaacagtaggcgctgcacacggcgctcaaccgggttcatgctcgacagacgcgataatttttgctcgataatttcccattcaggcagggggtaaagcagcaggcacgggtgatgaatgtcaatggtgcaaaccatttgaccggcagcgttctcaagcagctgttcccggtaacgggtaggcactgataagcgccctttgctgtcgagattgactaacgttgctccccggaacatgccagcctcaccccttattcccactttgccccacaatttcccactgaaaggagtttacggagcggaggaaaagcttgtcaagccagtcacaaggcataccgaggtaaaaaacccgatgtttacggctaatatcagcgttgtttattttacgtccaacgtgcgcagcaaattaacgttatgaatagctgtaagaaaaaatccctcatcgtcatcaccgttttaaaatgactcactattttccacagcaaatataaagtgtcagtttgcgacgcgagcggcattttaggacatatcttccccggttaacagtccctgttgcgtctgtgtggcgcttgatgccagcgggtttgcgcaaaagcaaagaaaagtgcttgttaaatcggcaattcatctctgcatgtaacaaaataatgcaaaaacgcgctgtcgatatcacttaattattgtgaatttcagctggtgagttaattaacgggcgggtttaaaagaacttatcaataatagtcaggaatagtcttatttactttaaggatattgatgtccattcccgtactctacgcgccagagggaaattcacctggcgcgtatttttgttcgcggcttagctacggctgagcacaccgcggcgatagagattacgtttaatgcgcgttaaaccaggttttggcttacgcggttcgtccaggcttgccaggacaatctccagcacacgctctgcgacatcgcggtgacgttgagccactgccagcaccgggcactgtaagaagtcgagcagttcgttatcgccaaaggtggcaattgccaggtcagaaggcagtttaccatcgcgacgtagcgtgacatccatcaccccttgcaacaacgcaaacgacgttgtgaacagcgcctgcggcatcggatgcgtttccagccatttttcgaataactgggcagccgcctcccgctcatagctgttggcatacaggaaatgcacttcgcgcggatcatctttccaggcagtacggaaaccttgttcacgcaggaagctgacagaaagctccggcagcgcgccaagataaagcaccgtctcggcgggaaacttacgtaactcttccgccagcatttcggcatcatcctgatcggcaccaaccacgctggtgaaatgttcacgatcgagggcgcggtccagcgcgacaatcgggaacgggtcgttagcccagcgttgataaaaaggatgctcaggtggcaacgacgtcgaaacaataatggcatcaacctgacgctgtaaaaggtgctcaatgcagcgcatttcgttgtctggctgatcttctgagcaggcaatcagcagttgataaccccgttgccgcgcctggcgctcaagatagttagcgatgcgggtatagctggtgttctccagatcggggatcacaagaccaatagaacgtgtgcgtccagcacgaagcccagctgccacggcgttcgggtggtaattgtgctcacgcaccacagccatgactttttcaacggttttgtcgctcacacggtattgcttcgctttgccgttaataacatagcttgcagtggtccgcgacactcccgccagccgagcgatttcatccagtttcacaattgccccttgcgtaaaatgtaaaaaccatagccattgtactggtatgggttaaattcattaacatctaagcgcagaaaattaactgcggcaactgcttttattccaggttcccactgatttcgcaaaaaaagcccaacgtgacatgttgggctgcaaattgcgcactgagatcattctcaacgcattattttatcgccgcgcgaaagtccgaccacaccagagcgagcaacttccacaattttcgccacatcgcgaatcgatgctaaaaatgcatcaagcttatcgctggtgcctgctaattgaacggtataaagcgagggggtgacatcgataatttgcccacggaatatttccgtattacgtttcacttcgtcacgcccgtaaccgctggcctgaattttcaccagcatgatttcccgctcaacatgcgcgccctgccccaactcactcacgcgcaagacatcgaccagcttgtgtaattgcttttcgatctgctcaagcactttttcatcgcccacggtctggatggtcatacgcgataatgtcggatcgtcggttggcgcaacggtcaggctttcaatgttgtagccacgctgggaaaaaaggccaatcacgcgggataacgcgcctgattcattttcgagtaagactgataatatccggcgcataatcaggttctctccgttttgcttaaccacatttcatccattccgcccccgcgaatctgcatcgggtagacgtgctcactgccatcgacggtaacatcaacaaacaccaggcgattattgcacacctgttccagcgcctcgctaagtttgctttccagctcatgcggatgagagatctggatcccgacgtgaccataggcttccgccagacggacgaaatcgggtagtgattgcatataagattgtgaatgacggccggaatagatcatgtcctgccactgtttcaccatccccagatagcggttattgagattcaccaccagtaccggcaactcgtattgcaacgcggtagacagttcctggatgttcatctgaatactgccgtcgccagtgacgcaaaccacggtttcttctggcaacgccattttgacgcccagtgccgcaggtaaaccaaaacccatcgtgccgaggccaccggaattgatccagcgacgcggtttgtcgaatggataataaagtgcagcaaacatctggtgctgcccgacatcggacgtcacgtaagcgtctcccttcgtcaaccgccaaagagtctcgatcaccgcctgcggtttaatcttttcactgtgagtgtcatatttcaggcactgacgagcgcgccactgttcaatttgctgccaccagtcgcggatctcatccagtggttgatgggcggattcttgcgacaagagttcaagcatttgttcgaggacctggcgagcatcccccacaatcgggatatccgcagtcacggttttagaaatggaagtaggatcaatatcgatatgcagaacagtggcatttgggcagtactttgccagattgttcgtcgttcggtcatcaaatcgtaccccgacggcgaaaatcacatccgcgttatgcatcgtcatattggcttcgtaggtaccgtgcattcccagcatgcccagtgcctgacgatgcgttgccggaaacgcccccagccccatcaatgaggaaacaacgggcagattcaacgcctccaccgtttctttcaactgctgatggcagcccgccatgattgccccaccgcctacgtagacaaccggtttttttgccgctaccagcgtttgcagagcgcgcttaatttgccctttatgtccggtagtagtgggattgtaagaacgcatactgaccgactcaggccagacatagggtaatttgttcgccggattaagaatatctttcggtaaatcaacgaccactggtcctgggcgaccacttgccgccagccagaaagcctttttcagcacctgcggaatgtcttccgtttgcttaaccagaaaactgtgtttaaccaccggtcgcgaaatccccaccatgtcgcactcctgaaaggcatcgtaacctatcaacgaggtcgctacctgcccggaaaggacaactaatggaatggaatccatataagcggtggcgatgccggtaatcgcattggtcgcccctggacccgacgttaccagcacgacgccgacttccccggtcgcgcgcgccagaccatcggccatatgcactgccgcctgctcatgacgaactaaaacatgatcgataccacccacggtatgcaatgcatcgtaaatatcaaggactgcgcctccgggataaccgaatacttgtttaacgccctgatcgataagcgatcggacgaccatctcggctccagacaacatctccatggcctgcctcactgtttgacggaaaaaatgtgtaaaacacattaaccgtccgatcttgcttaagcaattggcagccagagacataaacgcagggtaataagaataaacaggaggaaaggtgaaaagaaacgataaaatcctccattacgaaggattaaattgataataaatcggctgaatcccacaacttacagcaatttctctatttttttaattaatcctaaaatagagagcccacacattcagaataaaattctacattcaataaaaaatacagaataaaccagacattcatgtctgacctattctgcattcagttagcgtttgcaaattgagactaattgctcttccatccactgatggcctttatcgcgcccggcagcttcatgccaggagagataacaggttctgctattttgttttaacggcagcggtaatacctgtaattctaaggattcagcgaactcttcagccagccaacgcggcgcaatagcgaccaaatgcgtttgcgacaccacgctaagtacgctcatcattgccatgccctgatacgcgatactggcttgcttatctaccgtgtcataccaaggttgactaaatgacgcgaaacgatcgagcgaaaccgccgcatgttgttcgttataaacatcatgtttcagtaacgggcccttaattgttggatgatttttgctggctaccagcaccatttcatctttaaataatggcacgctggtaaattcaggacgatggaagtcttcataactaatcacaaactccgtttcctgataacgcagctgatgttcagtgttctgatttaatgaagacttgaacataacatgtatatttggcgcaatctgctcaatgtgattataaatctgcgaggtcagaatgctgtctaacgggctgcaaacacaaagatgaaatacacgttcactgctcgcgggttcaaaacctgaaccaggcaattcattttgtactagttgcaatgcctgacgaactgagccaaaaagttgaaatgcgcgagcagtcggttgaataccacggccataacgaacaaaaagctcgtcattaaacatcaccttcaggcgtgcaacagcgttactgaccgcaggttgcgacatacccagaacatgagcggcacgggtaatgttttgctcctgcatcacggcatcgaaaacggttaataagttgagatcgaccatgcgtagctgtggcttgcttaactccgccgtctctgaatgatctgtttgtacctctggcatacttaactccactgtcacacttaactccctttcccttattggaatgcagagaaataatcctgaagaatatgatttatcatgcatataaaataagaaaaagcaaaatgagtaaaattcggaaaacataaagatacgggttctgataaaaacagaatcc

SEQ ID NO: 190 - DNA, 37647 bp, Escherichia coli
  source 1..37647: mol_type = genomic DNA
gccgaagatcgtgaaaacgttaacctttcccaatttgaaactgatggccaattacccgtaggtaaatactcattaaacgctcttattaataataaaaggacgccaatccatctggacctgcaatgggtattaattgataaccaaactgcagtttgtctgactccagagcaattaacattattaggctttactgatgagattattgaagaggctcagcaaaacctgatcgatggttgttaccctatcgaaaaagaaaaacaaattacaacttatctcgataaagggaaaatgcaattatccatatctgcacctcaggcatggttaaaatacaaagatgcaaactggacgcctcctgaactttgggatcatggtattgctggggcatttcttgactacaatttatatgcctctcattatgcaccacatcagggcgataattcacaaaatataagttcctatgggcaggctggggttaatcttggggcctggcgcctgcgtactgattaccagtacgatcagtcatttaacaatggcaaaagccaggcgaacaacctggattttccgcgtatttatttgtttcgcccaatcccagcaattaatgcaaaactaactataggtcaatacgatactgaatcctctattttcgactctttccatttttctggcgtttcgttgaaaagcgatgagaatatgttgccgcctgatctacgtggttacgcaccgcaaatcacgggtgttgcacaaacgaatgcaaaggtcactgtctcacagaacaaccgtattatttatcaagaaaatgttcctcctggcccatttgctattactaatttattcaatacattacaggggcaactggacgtcaaggttgaagaagaggacgggcaagtcacgcaatggcaagttgcatctaatagtattccttatctgacgcgtaaagggcagattcgctacaccactgctatgggtaaaccgaccagcgttggtggtgattccttacaacaacccttcttctggactggtgaattctcatggggttggctgaacaatgtatccctgtatggtggttcagttttaacaaaccgtgattatcaatctctggctgccggcgttggctttaaccttaactcattgggttcattatcttttgatgtcacacgatctgatgctcagttgcataatcaggataaagaaacgggttatagctaccgcgctaactattcaaaacgttttgaatctaccggtagccagctcactttcgctggttaccgtttctctgataaaaactttgtgacaatgaatgaatatatcaatgacactaaccattacacgaattatcagaatgaaaaagagagttatattgtcacgtttaaccagtatcttgaatcattaaggttaaatacatacgtaagtttggctcgtaatacttactgggacgccagcagtaatgtgaattattcattatcacttagccgcgattttgatatcgggccattaaaaaacgtctccacttctctaacatttagccgaataaactgggaagaagacaaccaggatcaactgtacctaaatatttcgattccctggggaaccagtagaacattgagctatggtatgcaacgaaatcaggataacaagatttcgcatactgcttcgtggtatgactcttccgatcgaaataattcctggagcgtttctgcttcaggcgacaatgatgaattcaaagatatgaaagcgtcactacgcgccagttatcagcataataccgagaacggtcgtctctatctctccgggacatcacagcgagacagttattattctctgaatgccagttggaatggttcattcacggcgactcgtcacggagccgctttccatgactatagtggtagtgctgactcgcgttttatgatcgacgcagatggtgcagaagatattccgttgaacaataaacgcgcggtaactaatcggtatggcatcggagttattccatcagtcagcagttacataacaacatcattaagcgttgatacccgaaatcttccagaaaatgtggatatcgaaaactcggttatcaccaccaccttaaccgaaggtgctattggctacgccaaacttgatacccgcaagggctatcaaatcatgggggttattcgcctggcagatggtagtcacccaccactggggattagcgtaaaagataaaaccagccataaagaattaggactggttgctgatggcggctttgtatacctcaacggcattcaggatgacagcaaacttactttacgctggggtgataaatcctgttttattcaaccacccaatagcagcaacttaaccaccggaacggttattttaccgtgtattagccaaaattaattcaggatgaaactaatgcgctacttaaacacaaagaatctcattgcagcaggagtattactcgcctgcatgagcagcattgcctggggtgccatcatcccggaccgtacccgtatcataattaatgagtcagataaaggggaagcattaaaacttactaatcaaagcaaaaatctaccctatctggcgcaaacatggatagaagatacgaaaggcaataaatcacgtgactttattgtcacggttccccctatggtacgtttaaatcccagtgagcaaattcaaataagaatgataagtcaggaaaaaattgctcaactgcctaatgacagagaaacgctcttctattttaacgtgcgagaaataccgccaaaaacagataaaaaaaatgtgatgcaagtcactatgcagcacgcattgaaactattctggcgaccaaaagctattgaattagaagatgatggggtaatgtcttacgaaaaagttgaaatcatccgtagaaatgatggttcgatccgctttaacaataagatgccttatcacgttacgctgggttatatcggaacaaacggaatcacaatgttgccacaaacgcaaagtttaatggtaaccccttatagccatgcagatacgcagtttaaaaatgttccgtcagcttttcaggttggttatatcaatgattttggtggattaagtttttatgaaataaactgcccgacggttaataactcttgtaatgtttccgtagccaaacgagataaataatatgcgctacttattaattgtaattatatttattataggttttagtgcattacctgtatgggcaatggactgctatgctgaacatgaagggggaaataccgtagtcattggttacgtaccaagaatttctatccccagtaatggtaaaaaaggtgataagatctggcaaagcagtgagtattttatgaatgtcttctgtaataatgcattacctgccccatcacctggagaagaatacccatcagcctggactaatataatgatgtttttaccaggcggtcaggacttttataatcagaactcctatatttttggcgtaacatacaatggagttgattatgattcgactgcccctaatgctatcgcagcaccagaatgcattgatataaaaggagcgggtacctttaataatcactataaaaaccccgctgtctgtagtggaggtcctgagcctcaattatcagtaacctttccagctcgcgtacaactctatattaaattagcaaaaaatgccaatagagttaataaaaacatggtgttacctgatgaatatatcgctctagagtttaaaggtatgagtggcgcaggagctatagaagtagacaaaaatttgaccttcaggattcgtggattaaataatattcatgtccttgactgctttgttaatgtcgcactggaaccagctgatggcgttgttgactttggtaaaataaattcccgaacaattaaaaataccagcgttagtgagacgtttagtgtagtcatgacaaaagatcctggtgcggcctgtactgagcaattcaatattttagggagctttttcactacggatattttgagtgattatagccatctggatatgggtaatggactgctattgaagatatttcataaagatggaacagcaacggaatttaaccgcttctcacaatttgcttctttttcatcgtctagtgcaccttcggtcaccgcaccattcagggcagaacttagtgcgaatccggcagagactgttgttgagggaccgtttagtaaagacgtcatcctcaaaatcacctataactagcatctaatacaaacactaaaacgggccatcaggcccgttatatcagtgctctaactccagctctcttgcctgcatcatctgttgacaataccaggcataacgtgcgcaaaaccaggttctatgttcttcatccatgttaccagtaacggcaagaatatcgaccgggcgaccttctgcgtgcattctggcaaaactacgcgccaggaaatcgaaattatttaaagaattaagactatgatccataagcacatcctccggttatcgcataccttttaaggccatatgctttttctgatttcagtattccccaatcagtgtagtgcctttaaacataacgtgcgtaaatatattgtccccgatcacactttttagtgaaaaataaaaaaccatattaaaaaactttctcttccagaacttctctaacatgtgttattattaacaaagataaatgtaagcaaggaaactatcccaaagtaaatattgcgtcactaaatggacattggagtgacatatgattttattcgccgactataataccccttatcttttcgctatttcctttgtactgttgatcggccttttagaaattttagcgcttatctgcggtcacatgctctccggtgctcttgatgcacatcttgaccattatgattccataaccacaggtcatattagccaggcacttcattatctcaatatcggaagattgccagctctcgtcgttctctgcttgctggctggtttttttggtcttattggcatcctgttgcagcatgcctgcatcatggtctggcaatcaccactgtcgaacctgttcgtggttcctgtcagtttactgtttacgattattgcggtgcattataccggtaaaatagttgcgccctggattccacgcgacaatagttcagctattacagaagaagaatatattggtagcatggcattaattaccggtcatcaagccacttcaggtaatccctgcgaaggaaaactcaccgatcaatttggccaaatacattatttactactggagcctgaagaaggaaaatttttcactaaaggagacaaagtgttaattatttgccgactttctgcaacgcgatatttggcggaaaacaatccctggccacaaatattgtaatttattaatcaaaaggaaatttaataatggatgatattgttaattctgtgccctcctggatgtttaccgcgattattgccgtatgcattctgtttattatttgaattattttcgccaggctctatcgtcgcgcttcggcagagcaagcttttgttcgtactggtttaggtgggcaaaaagtggtgatgagcggtggcgcaatcgtgatgccgatctttcatgaaataatccccatcaatatgaatactctgaagctggaagtcagccgctcaaccattgatagcctgattacgaaagatcgtatgcgtgtcgatgtagtagtcgctttctttgtacgggtaaaaccgtctgtagaaggcatcgccactgcggcgcagacgttggggcaacgcacgctatcaccagaagacttacgtatgttggttgaagataaatttgtcgatgccctccgtgcaacagctgcacaaatgaccatgcatgagttacaggatacccgcgagaacttcgtgcagggagtacaaaatactgtcgcagaagacctgtcgaaaaacggtcttgagctggaaagcgtttcacttaccaactttaaccagacctcgaaagaacatttcaatccgaacaatgcctttgacgccgaaggtttaaccaaactgactcaggagacggagcgccgtcgtcgcgaacgtaacgaagttgaacaggatgtagaagttgcggtgcgtgagaaaaaccgtgatgcactttcgcgcaagttggagattgaacaacaagaagcgtttatgacgcttgagcaggagcagcaggttaaaacccgtactgccgaacagaatgcacgtattgcggcttttgaagctgaacgtcgtcgtgaagcagagcagacgcgaattctggctgaacgacaaattcaggaaacggagatcgagcgcgagcaggccgtccgctcaagaaaggttgaggctgaacgtgaagttcgtattaaagagatcgaacaacagcaggttaccgaaatcgccaaccagacgaaatcgatcgctattgccgccaaatcggaacaacagtcccaggcagaagcgcgtgctaaccttgcactcgcagaagcagtaagtgcgcaacaaaacgtagaaaccactcgccagaccgcagaagccgatcgtgctaaacaagttgccctaatcgctgccgcgcaggatgcagaaaccaaagcggttgaactgaccgtgcgggcgaaagcagaaaaagaagccgcagagatgcaggcggcggctatcgttgagttagccgaagctacacgtaaaaagggtctggcggaagcagaagcacaacgtgcgctgaacgatgctatcaacgtactttctgatgaacaaaccagccttaaattcaaactggccttgttgcaggcgctacctgcggtaatagaaaaatccgttgagccgatgaaatctattgacggtatcaagattattcaggtcgatggtctgaatcgtggcagcgctgcgggtgatgcaaacacgggtaatgtggggggcggaaacctggcggaacaagcattatcagccgctctctcttaccgcacacaggcaccgctgattgactccttgctcaatgaaattggcgtttcaggcggctcactggcggcattgacttcacccttaacctcaacaacgttgaaaaaaaatcagcgtcaagaaggtttcattaacacatatccctggcccaaaaagccggggattttttatatctgcgttccgctaaaaggtgcaaatgctcaggacgttgcagcgttttgcgtgaccgctcggggaaggcaaaactgcttcagggaaagcgttgcgcggggtccggcgctcatcaacaatcggggagtcagcaaggggctgaaacgggaaagcccctcccgaggaaggggccttatagaaggaaagggttatgatgaagttcgtcatcatactggttgtgttgttactgttaagtttcccgacttactaacaactgatcagaggggggagaaatcctcccttacccttgttcctttactttaggttgaaaaaacaacagcgtcaataggcctgcctgctacgaagcgagatctgtgaaccgctttccggttagccttttttatcctgttggatcttcttgatgatgttagtggtcgagcaaccgtcttcgaagttgagcaccagcacttcgccgccgttggcccagacttctttactcccggcgatctcttctggtttatagtcgccgcccttcaccagtaaatctggcaggatcccggcgatcaagcgctgcggcgtgtcttcttcaaacgacaccacccagtcgaccgcttccagtgcgcccagcacaatcatacgctgttcgagcgggttaacggggcgggaatcccctttcagccgtttggtggaggcatcgctgttcacagcgacaatcagacggtcacccagtttgcgagcatttgccagataggagacgtgcccggcgtgcaggatgtcaaagacaccgttggtcattaccaccttttcgccgcgtttacgcgctgccgctacagcaagcttcagttcctcttcggtcatcacaccaaagccggtatctgcgcgcccacgcactgcattttccagctcgatcggcgaaaccgtggaggttcccagtttgccgaccaccacgccagccgccgcattggcaaagaagcaggcttcttccagcgaattacccgctgccagcattgccgccaggacgccaatcaccgtgtcgcccgcaccggtaacgtcatacacttcctgcgcctgggttggcatatgcagcggcgctttacccggttgcagcagcgacataccctgttcggaacgggtcactaacagagccgagagttcgtaatcggcaatcagtttcatgccgcgctcaacaatctcttcttcggtcttacatttaccgacaacagcttcaaattccgagagattcggcgttaacagcgtagcgccgcggtagcgctcaaaatcggtaccttttggatcaatcagcaccggaacacccgctttacgcgccagttggatcatctgctgtacgcttgccagcgcacctttggcgtagtcagaaagcaccagcgcgccaatcgaactcagcgcctgattaatccgctcgtgcagcggctgcggatcaacaccttcgaaaccttcttcaaaatccagacggatcagctgttggttgcgggaaagtacccgtaatttggtaatggtcggatgcgtcggtacagaaacgaagtcgcatttgacgttgacgtcggccagagatttactcagcgcgcgcgctgcatcgtcaatgcccgtcaacccgaccaggcgtgcattagcaccgagagaagcgatattcatcgccacgttagccgcgccgcccggacgttcttcgatggtattcactttaaccacgggcaccggcgcttccggcgagatacgactggtggggccgtaccagtaacgatccagcatcacatcaccaaccaccatcactcctgcacgttcaaactctggcagcgttactttcattcctgtctcctgagagattcaaaatttgcgcgcgataataccatacttcattcttccaccagccacttctgccagcttgcccgcaccagttcacgctctgcggtgaagcaatcctccgacacatggcccggcaattcctgtaatgccagatgatgaagttcatcgcgaagcgtagtgtaagcacgggtcagcgccatcgcttcctgctcttccataatgtcgttttgcgccagtagttccagaatacgcacgttgtctgaccagcgcgttaacttcggtttttcatgagcgtagcgcaacaccagatattgggtaataaattcgatatcggtaattcccccttcatcagctttgatatcaaagcgatcgcgatgtttattgccgagatgagcgcgcattttctcgcgcatttcccgcacttccgtttgcagagttttaccatctcgcgacgcactgcgtcaaagtgcgcggtgagctgcggatcgccgtacactacacgcgcacgcaccagcgcctgatgttcccacgtccaggcctcgtttttctgataatcggcaaatgcttctgcggatgtcaccagcattcccgccgccccggacggacgcagtcgagcatccacttcatacaaaatgccggaagaggtacgcgtactgaacagatgcataatgcgttgcgccagacgcagataaaactgccgcccgtcgatttcccgctcaccgtcagtcatcgcatccattgggcaatcatggaggaagataaggtcaagatcggaactgtagcctaactcccagccgcccagcttgccgtagccgaccaccgcaaaaccacgcccttcgcgttcgttcaggtgattcggcttaccgtagcgggcaaccatttgaacccacgcctgctgaacgacggcatctatcatggcttccgccagccaggttaagtgatcgctcactttcatcaccggtagcgtaccggcgatatccgctgcggcgatgcgtaacagctgcgcctgtttgaactgacgcagcgcctcaagctgttgctcttcgtcatcttccggcacgcgcagcaaatactggcgcaactcatcgcggtaggcatcggtcgccgtcggctggtaaagggtgtttggatcgagaaattcatccagcaacaatggataccgcgccagctggatggcaatcatcggcgacgcggcacacagagaaatcaaatgtttaagcgccgcggggaattcactgagcaattctaaataggtggtgcgggtaacaatccccaccagcaaggcggtaatgcgcgacagcgtaacggcagcgtcttcacgcgcacagacatcacttagcagatgcggcatcagatggtcgagcacctgacgtcctcgcggcccgatggtgcgcttatccagctctttgcggaaatcggcaatcagcgttagcacctgtttgcgatcatcctcgctaagatgcgccagcactggcgtagtgtcatcttcctgcaacgcatcctgccacagctcacgccactgttccgacagcgactcttcctgagtttcactttcgtcgtcgccaatcaattcattaaacacccggcgcacattggtcatatgtgcggtcagcgccccggtcaattgcggccagtcagcaaagtccatcgcccacgccagccgcgcacgattaagctcatcagaaggaagcgtctgggtttgttcgtcgttaatgctttgcagcaggttttccagacgccgcaggaacagatacgccactcgcaattgttcagcatcgttttcagaaagcagatgcagctcggcaatggcgctgagcgttggcagtaaagagcgcgattgcagcgacggttcgcgtccgccgcgaatgagctggaacacctgaacgataaattcaatttcgcgaatgccgcctgcgccgagtttgatattgtcggtcaaaccacgtcgacgcacttcacgggcaatcatccctttcatgttgcgcagcgactgaatcacgctgaaatcgatgtaacgacggaaaacaaacgggcgcagcatcgcacgcaactcgttagcatagacgccttcgctatcgcccataatccgcgccttgaccatcgcgtaacgctcccagtcgcgcccctgctcctggtaataatcttccaacgcggcaaagctcagcaccagcgggccactttcgccaaacggacgcagccgcatatccacgcgatagacgaagccatcctgcgttggttgatccagcactttaatcagccgctgccccatgcgggtaaaaaactgcgcgttatccagttcccggcgtccaccctgcgtacaaccatgttccggccaggcaaaaatcagatcgatatcagaggagaaattcagttccccgccgcccagcttacccatgcctaaaatcagcagcggttgcgcttcgccctgcgcattgcacggcgttccccactcgcggcagcaggcgtcatatagccagtcacgcgccgcaacaatcagcgtctccgccagatagctgagctgctgcaatatgctctcttcagtaaccagtgccagcgtttgcgcccaggcgatacgtaccatgatgcgccgacggaacagccgcagctcgcgcattaacccggcttcgtcactcacattactgagcgcctcctgcaaccatgcaacgtaatgctgccattcgtcggcctgcggcggttggctttccagttccgtcagccactctggatgcgcacttatgctgtcctgcacaaaatcactgaaagtaagtactgacttcgcctgtgcactaagtgattcctcggctaaaggctctggcagccgctcaacaacggtctgccagtactgctgtaacggtgaagagagcggcttcataagcgattttatccttgcctgattaacgttttccgctgtgcaaccagaacggttcctgattgtttgcctcattacggaaatgttcaatttcgatgcgttgcccggtcgcaatagcgtgatgcagcccctgccagttctccagccaggcttgcgcgacgacaggatcatagtaacccgccagcaacagtattgagtcaatatcacgcgtcaggcgtggcaactggtcacggtagcgatcgcctaacggctggcagaaaacgcttttcagttcagcggcatggcgggaaagatggatatcggcaaagcgtttgaaggagtcgctgattttgccctgcgctttggcatctaaaaatggctgccatgctttgcttaccaaccattcggtcaacgccagcttcgccattgccgtttcggtagagtagaccgccgtcacggcagacaccgcagaagcaatggtcgcctcgcattgagtcagcagatcacgtaagtgagtgctcgctttacgcggcacaataccaccgaacagcatcagcgtatgacggaccaggctaatggctgccagcacctgttctttcgccgcatcgttgccgcgtacccacagttcttcatgatactgccattgcgctaacgccagctcgagcgccgcttccagcccctgttccacatcggcttttgccgcaacatgcaaaatggtggtcggtttgatttcacgcgccggattgccctgcgccagatgatagccacgcgccgctttgctcaggctgccctggcgtaatccggtttgcgataccagttggttcgccagtttcagcaccgcgcgcgtgtcgccgctaagcagttccagttccagctcacagataggttcagcaaattcacccgctttcacttccccctggtcgagggcgatttcaatttggctaccatcgaccgccaccagccatttttcgcgataaaaatcggtgctgaacagcggctgcacgcgggaggcgagatcggcgggcaattcgccgttcggccagacttccgtcggtaactgcgccaggtcgagcgtcggttcgctcaacgccacgttatattccgggcgctgatgtaagccgcctgtcactcttcctgcaactttcatggtcatctcatagcgaccgttttcgccacgaatacgtaagcccatatcgtgcccacgcagccagttatccggcgtttcgtagtaaatattcagcaactgcacggggtcatggtgctcgccgcccagcgtattgagatggtcacgcaacgcctcaacggcactgtgattaacaataaactttaattcgatttcctgagccatggcctttacttatcggttatgtcacataagtgacgatgaacggcgaacttaatgcgatcttttttgtcagtagatagtattttgcgccaaattgccatgcaacgggcaatttgacgggcgtaaaagtttgaagcagtggcaagacctgacacagaggattccgattgatgtcgaatgctttgcgtagcgacactgatgccactactatcgttccactttccatgacaataacgacagcctgatgccaaaattacgcctgatcggattaactttactcgcacttagcgcgactgccgtctcacacgctgaagaaacgcgctatgtttccgacgaactgaatacctgggtccgcagcggtccgggagatcattatcgcctcatgggcacggttaacgccggcgaggaagtgaccttattacaaactgacgccaacaccaattatgcccaggtgaaagacagctctggccgtaccgcctggatcccgttgaaacaacttagcactgagccaagcctgcgctcccgtgtgccagatctggaaaatcaggtcaaaaccctgaccgataaactcaccaatatcgataacacctggaatcagcgcaccgcagaaatgcagcaaaaagtggcgcagagcgacagcgtgatcaacgggttaaaagaagaaaatcagaaactgaaaaacgagctgattgtcgcgcagaaaaaggtcgatgccgccagcgtacagctggatgacaaacagcgcaccatcatcatgcaatggtttatgtatggcggtggcgtgctggggcttggcttgctgctcggtctggtactgccgcacctgatcccaagccgcaaacgcaaagatcgctggatgaactaaatcgccttcttcgttgcactgtcttattattaggaattgtgtatttgacgaagggatgatggcgtgaagatttatctggtcggtggtgctgttcgggatgcattgttagggctaccggtcaaagacagagattgggtggtggtcggcagtacgccacaggagatgctcgacgcgggctaccagcaggtaggccgcgattttcctgtgtttctgcatccgcaaacgcatgaagagtatgcgctggcacgtaccgaacggaaatccggttccggttacaccggttttacttgctatgccgcaccggatgtcacgctggaagatgatcttaagcgtcgcgatctgaccattaatgcgctggcccaggacgataacggcgagattatcgacccgtacaacggtctgggcgatctgcaaaatcgtctgttgcgccatgtttcccccgcttttggcgaagatccgttacgcgtattgcgcgtggcgcgttttgctgcgcgttatgcccacctcggttttcgtattgccgatgaaactctggcgttgatgcgcgagatgacccatgcgggtgaactggaacacctgacgcctgaacgggtatggaaagagacggaaggcgccctcaccacccgcaatccacaggtattcttccaggtactgcgcgattgcggcgcactgcgcgttttattcccggaaattgacgcactgtttggcgttccggcccctgccaagtggcatccggaaatcgatacgggtattcataccttaatgacgctctcaatggcggcgatgctgagtccgcaggtcgatgtccgtttcgcaactttatgccacgatctcggtaaagggctgacgccgccagaactctggccgcgtcatcatggtcatggcccggcgggtgttaagttagtggaacaactatgccagcgtctgcgcgtgccaaatgaaattcgcgatttagccagactggtggctgagtttcacgatctcatccacaccttcccaatgctgaacccaaaaaccatcgtcaaattatttgattccatcgatgcctggcgtaaaccgcagcgtgtcgagcaactggcgctgaccagcgaggctgacgtgcgcggcagaaccggttttgaatcagcggactacccgcaaggccgctggttgcgcgaagcctgggaagtggcgcagtcagtgccgacaaaagccgtcgttgaagcgggatttaaaggtgtggagattcgcgaggagctgacccgacggcggattgcggcggtagccagctggaaggaacaacgttgcccaaagcctgaatgagtattgggcattttgccggatgcggcgtaaacgccttatccggctacatgtcaacgacagttgtaggcctgataagacgcgcaagcgtcgcatcaggcgttgattgccggatgcggcgtgaacgccttattcggcctacgcaatcgttgacaacgccaagcatccgacactattcctcaattaaaagaacacgacatacaccgcagccgccacaataaagcgataaatggcgaacgggataaacgaaatgcgcttaatcaattgcaggaaggttttaatcgctatcagcgccaccacaaaagcggtgataaacccaacggcaaacatcgggatatcgccgcttgtcaggaagccccagcttttgtagagatcgagcgccgttgcgcccatcatcatcggcaccgccagcaggaacgaaaactcggaagcagcgtaacggctcacccccatcagcatcccacctgaaatggtcgccccggaacgggagaaacccggccacagcgccagacactggaaacagccaatcataaatgcctgacgataggtcatatcatcaagacccggcgcacgcggctctttcggcttcaggcattcggcggcaatcagcaacaaaccgccaacgaccagcgcatacatcacatttatcgggttaaacaatgacttaatcgtgtcgtggaacaacagccccaataccaccgccggaatcatccccagcaaaatgtggatcagcgttaaacgacctttgctttcaccttcgtgctgcaacgggcggccaaagtggatgccaatcaggccaaacagacgccgccagaacatcactactaccgccagaattgatcctaactggatcacaacttcaaaggttttcgccgtgtcgccctcaaaccccaacaagtgaccgacaataatcatatggcccgtgctggataccggcagaaattctgtcaatccttcgaccacacccaatattgccgctatcagcagcgagtgcatatcgctcatcaataaacccctaaattattaaaatgtaccgcttgtccgaactactgcgtatgaccaggttataaccgtttggtttaacagctgtaaaattaattattttctttcagattattgccacgctcaatgattacgccaacattcgccgcccgcgccactgcgcctggcttgctgagtttgatacgcacccacggcgagttgaagcgtgctaacagcagctccgccacctcttcagccacgcgttccaccagcgcaaaacgcgccccctcgacgtggctgaccaccgtttctgcaatgtcagcgtaactgaggcaatccgccacatcatcacttttcgccgctttacggttatcccatgccatttcgatatcgaacactaacttctgttcgatggtctgttcccagtcgtaaacaccaatagtggtgattaccgaaagttgctctataaatacaatatccatcacgtcctgcctgctttttggctaaccggataccacttccggcgaaatgtgcgtattatccacagattaatcgttgaacacgaattttcaaaacggaacagcttatgagtgcaatcgcgcctggaatgatcctcatcgcgtacctctgcggctccatttccagtgccattctggtttgccgcttgtgtgggctgcccgatccgcgaaccagcggctccggcaatccaggcgcaaccaatgtgttacgtatcggtggcaagggagcagccgtagcagtactgattttcgacgttctgaaaggaatgttgcccgtctggggcgcgtatgaattaggtgtcagccccttctggctaggcttaattgccatcgccgcctgtcttggacacatctggcccgttttcttcggatttaaaggaggaaaaggcgttgctaccgcttttggtgccatcgcacccattggctgggatctcaccggagtaatggcgggaacctggttactgaccgtgctattgagcggatactcgtcgctgggagcgattgtcagtgcactgattgctccgttttatgtctggtggtttaagccacaattcaccttcccggtttcgatgctctcttgcctgatcctgctgcgtcatcatgacaacatccagcgtctgtggcgtcgtcaggagacaaaaatctggacgaaattcaaaagaaagcgcgaaaaggatcccgagtgatttctggtggatctacatgacctgatagccttcatcgggcttgcccagccgttgctggcaccatgccgccagaaattccacgcagacacgtaatttcatgctgcgatagagcggctcccggtaaacagcccagatattggcgctttgtgcatactccggcaatacttgcaccaatttgccactctccagaaacggcaacacatcccactcggaacgcagcataatccctttgccctccagcgcccattgcaacactatctcgccgctattggaggaaagatgcccgctaaccttcaccgattttttctcctgaccgttccccaactcccatattccgtgggtcatatcgcgctctttggtcaccagacagtcatgacgacttaattcctgtaatgattgtggctgcggatatttttgcagatactcaggtgctgcgcataatattcttttatttttcgttaacagatgcgcaatataataatcaggaatttcgtcattaatacgaatatccagatcaatattatcctgcactaaatcaatttgccgatcgaacaattcaaaatgcacctgtaactcaggataattgcgcataagttcggtaatggctggcgcaatatggctgcgcccaaaaccaaaactacagccaatacgaatcatcccctccgggcgcgttttgatttgcgtgacgtcatcgaccagtcgctgatattgggtgaggatttccagcgcatgttcgtaacaacgttggccactttcagtcagcgccacgccgcgagcgnnnnnnnnnngttcagcagcgttgttgccagcgtattttcaaggatttggatccgcttggtgacaaatgcaggcgtctgcccaagcgtcgccgctgcggcgctaaaactcccgctgtggacgatttctaccagtacctgcaagtctttggctaaaggccagctattcagcatcgttaattatccgcagttgtgataagcgcagtgtatttcgcaaaacattgccattccctgctctggcgcaatattcattcttattttcgcgttgattcacgaactgttaattacatattcacggtggcaaaaaatataaaaccacatttttagtggtagtttgtggcggtgaatttttccagacaaatacaaaaactggagttgccatgatgagcgaaagtaataagcaacaggcagtgaataagttgacagagattgtcgctaactttaccgccatgatttctacccgaatgcctgatgacgtggtggataaactaaaacagctaaaggatgccgaaacgtcgtcgatggggaaaattatctaccatacgatgttcgacaacatgcaaaaagcgattgacctgaatcgtcctgcctgtcaggacaccggggagattatgttcttcgttaaagtcggttcccgcttcccactgcttggcgagctgcaaagcatactcaaacaagccgtggaagaggcaaccgtcaaagcgccactacgtcacaatgcggtagaaatttttgacgaagtaaacaccggcaaaaataccggtagcggcgtaccgtgggtcacctgggacatcatccccgacaatgacgatgcggaaatcgaagtttacatggcaggcggcggctgcacgctacctggccgctcgaaagtgttaatgccgtcagaaggctacgaaggcgtggtgaaattcgtcttcgaaaatatctccaccctcgccgtaaacgcctgtccaccggtactggtgggcgtgggcatcgccacctcggtggaaaccgccgccgtactctcgcgtaaagccattttgcgcccgattggcagccgccatcccaatccaaaagcggcagaactggagctacgcctggaagaaggactcaaccgtctggggattggtccacaagggctgaccggcaacagttcagtgatgggcgtacatatcgaatctgccgcccgccatccgtcaaccatcggcgttgctgtctctaccggctgctgggcgcatcgtcgcggcacgctgctggttcatgccgatctcacctttgaaaatctgtctcacacccggagcgcgttatgaaaaagatcctgacaaccccgatcaaagctgaagatctgcaagatattcgcgtcggcgatgtgatctacctgaccggtacgctggtgacctgccgcgacgtttgtcaccgccgtttgatcgaactgaaacgtccgatcccttacgatctcaacggcaaagcgattttccacgctggccccatcgtgcgcaaaaacggcgacaaatgggagatggtctccgtcggcccgacaaccagtatgcgtatggaaagttttgaacgtgaatttattgagcagaccggcgtgaaactggtggttggcaaaggtggtatggggccgctgaccgaagaaggctgccagaaattcaaggcgctacatgtgattttcccggcaggctgcgcggtgctggcggcaacccaggtggaagagattgaagaagtgcactggacagagctcggaatgccggagtcactgtgggtctgccgggtcaaagagttcggcccgctgattgtctctattgatacccacggcaacaacctgatagccgaaaacaaaaagctgttcgccgaacgccgcgatcccatcgtggaagagatctgcgagcacgtccattacatcaaataaccctcccggagaggctcacccctctcctttttcgcaggcataacacgatgaaaccttccactgaatggtggcgatatcttgcgccgctggcggtcatcgccattattgctctacttccggttcccgcagggctggagaaccatacctggctctactttgccgtttttactggcgtgatcgttggactgatcctcgaacccgtgccgggtgccgtggtggcgatggtgggtatatccatcatcgccatactctctccctggctgctgttcagcccggagcagctcgctcagccaggctttaaattcactgcaaaatccctctcgtgggccgtttccggtttttctaattcggttatctggctgattttcgccgcctttatgtttggcacaggctatgaaaaaaccgggcttggacgccgcattgcgctgattctggtgaaaaagatgggacatcgcacgctgtttctcggctatgcggtgatgttctccgagctgatcctcgcacctgtaacaccgtccaactcggcgcgtggtgcggggattatctatcccatcatccgtaacctgccaccgctctatcaatcacaaccaaacgacagcagttcgcgcagcattggctcgtacatcatgtggatggggattgttgccgactgcgtgaccagcgccattttcttgacggcgatggcaccaaacttgctgttaattggactgatgaaaagcgcatctcacgccacgctgagttggggcgactggttcctcgggatgttgccgctcagcattttactggttctgctggttccctggctggcttacgtgctgtacccgccggtactgaagtctggcgatcaggtgccgcgctgggcagagacggaactgcaggcaatgggcccgctctgttcgcgtgaaaaacggatgctggggctgatggtaggcgcgctggtgctgtggattttcggcggtgattatatcgatgccgcgatggtcggttacagcgtggtggcactgatgctgcttctgcgcattatcagttgggacgacattgtcagtaataaagcggcgtggaacgttttcttctggctggcctcgcttatcaccctcgccaccggactcaacaacaccggttttattagctggtttggcaaactgttagcaggcagcttaagcggttattcgccaacgatggtgatggtggcgttgattgtggtgttttatctactgcgctactttttcgccagcgccacggcgtatacctccgctctcgcaccgatgatgattgccgctgcgctggcgatgccggaaatcccgctgccggtgttctgcctgatggttggtgcggcaattggtctggggagcattcttacaccatacgccaccggccccagtccgatttactacggcagtggttatctgccaacggcggattactggcgactgggggcgatttttgggctgatattcctcgtattgctggtgattaccggcttactgtggatgcccgtggtgttgctttaagtgaggacggtgccggaaattgctctccggcacccaatagttttacgcagccggtaactccgccagcggccagcgcggacgcacgctaacgccgagatccgccgtcgcgcctgctttaaaccgcaccattccggcataggcgatcatcgcgccgttatcagtacaaaattccggacgcgcgtagaacacttcgccgcggcgttttttcatcatttcagccagcttcgcccgtaacgtacggttagcactcacgccgcccgccatgaccagtcgcttaaagcccgtctgatccagcgcccgcttgcacttaatcatcagcgtatcgaccaccgcatcttcaaaggcgcgggcgatatcagcacgcgtctggtcgtcggtgccgttgtcacgaatggtatttgccgcgaaggttttcaggccggagaagctgaaatccagccccggacggtcggtcatcggacgcgggaagacaaagcgcccggcagtaccctgagccgccattttcgacagtaacggcccgccaggataatccagccccagcagcttcgcggttttatcaaacgcttccccggcggcatcatcgatagactcgccgagcagctcgtactgaccaatgccagtcacgctgattaactgcgtatgaccgccggaaacaagcagcgcaacaaacggaaattccggcgggttatcttccagcatcggcgctaacagatgcccttccatatggtgtacagggatcgccggaacgtcccaggcaaacgccagagaacgccccacggtcgcgccaaccagtagcgcgccgactaatccagggcctgcggtataggccacagcatcaatgtcttttgccgttaaaccagactcctttagcgccgcctggatcaacggtacggttttacgcacatgatcgcgggaggccagttcaggcacgacgccgccgtagtcagcgtgcaatttcacctgactatacaattggttggctaacaaacctttttcatcgtcgtaaatggcgatgccggtttcatcgcaggaagtttcaatacccagtacacgcatgacttgttttacctcgctttattaccgcgcagtgtaggaccaatgcgggttgatgtaaaactttgttcgcccctggagaaagcctcgtgtatactcctcacccttataaaagtccctttcaaaaaaggccgcggtgctttacaaagcagcagcaattgcagtaaaattccgcaccattttgaaataagctggcgttgatgccagcggcaaaccgaattaatcaaaggtgagaggcacatgccggtaattaaagtacgtgaaaacgagccgttcgacgtagctctgcgtcgcttcaagcgttcctgcgaaaaagcaggtgttctggcggaagttcgtcgtcgtgagttctatgaaaaaccgactaccgaacgtaagcgcgctaaagcttctgcagtgaaacgtcacgcgaagaaactggctcgcgaaaacgcacgccgcactcgtctgtactaattccccgagagcgttgctctccgatcagaccgagttgtagttgtaaggccgtgcttccgaaaggaatgcgcggcttattttcgtttatgaattgctaaaaatcggggcctatggctggacgaatcccacgcgtattcattaatgatctgctggcacgcactgacatcgtcgatctgatcgatgcccgtgtgaagctgaaaaagcagggcaagaatttccacgcgtgttgtccattccacaacgagaaaaccccgtccttcaccgttaacggtgagaaacagttttaccactgctttggatgtggcgcgcacggcaacgcgatcgacttcctgatgaactacgacaagctcgagttcgtcgaaacggtcgaagagctggcagcaatgcacaatcttgaagtgccatttgaagcaggcagcggccccagccagatcgagcgctatcagaggcaaacgctttatcagttgatggacggtctgaatacgttttaccaacaatctttacaacaacctgttgccacgtctgcgcgccagtatctggaaaaacgcggattaagccacgaggttatcgctcgctttgcgattggttttgcgccccccggctgggacaacgtcctgaagcggtttggcggcaatccagaaaatcgccagtcattgattgatgcggggatgttggtcactaacgatcagggacgcagttacgatcgtttccgcgagcgggtgatgttccccattcgcgataaacgcggtcgggtgattggttttggcgggcgcgtgctgggcaacgatacccccaaatacctgaactcgccggaaacagacattttccataaaggccgccagctttacggtctttatgaagcgcagcaggataacgctgaacccaatcgtctgcttgtggtcgaaggctatatggacgtggtggcgctggcgcaatacggcattaattacgccgttgcgtcgttaggtacgtcaaccaccgccgatcacatacaactgttgttccgcgcgaccaacaatgtcatttgctgttatgacggcgaccgtgcaggccgcgatgccgcctggcgagcgctggaaacggcgctgccttacatgacagacggccgtcagctacgctttatgtttttgcctgatggcgaagaccctgacacgctggtacgaaaagaaggtaaagaagcgtttgaagcgcggatggagcaggcgatgccactctccgcatttctgtttaacagtctgatgccgcaagttgatctgagtacccctgacgggcgcgcacgtttgagtacgctggcactaccattgatatcgcaagtgccgggcgaaacgctgcgaatatatcttcgtcaggaattaggcaacaaattaggcatacttgatgacagccagcttgaacgattaatgccaaaagcggcagagagcggcgtttctcgccctgttccgcagctaaaacgcacgaccatgcgtatacttatagggttgctggtgcaaaatccagaattagcgacgttggtcccgccgcttgagaatctggatgaaaataagctccctggacttggcttattcagagaactggtcaacacttgtctctcccagccaggtctgaccaccgggcaacttttagagcactatcgtggtacaaataatgctgccacccttgaaaaactgtcgatgtgggacgatatagcagataagaatattgctgagcaaaccttcaccgactcactcaaccatatgtttgattcgctgcttgaactgcgccaggaagagttaatcgctcgtgagcgcacgcatggtttaagcaacgaagaacgcctggagctctggacattaaaccaggagctggcgaaaaagtgatttaacggcttaagtgccgaagagcgatcgggaagcccccgacagccgcactgagaggcagcggcaaatatataagtacgccctcgtaattatcgttggcggtaaacaaccgttggatttcagcgttaacggctgaaggacatcgggtcaatcgcccaacaccaacctcatgaaataagtgtggataccgtcttatggagcaaaacccgcagtcacagctgaaacttcttgtcacccgtggtaaggagcaaggctatctgacctatgccgaggtcaatgaccatctgccggaagatatcgtcgattcagatcagatcgaagacatcatccaaatgatcaacgacatgggcattcaggtgatggaagaagcaccggatgccgatgatctgatgctggctgaaaacaccgcggacgaagatgctgccgaagccgccgcgcaggtgctttccagcgtggaatctgaaatcgggcgcacgactgacccggtacgcatgtacatgcgtgaaatgggcaccgttgaactgttgacccgcgaaggcgaaattgacatcgctaagcgtattgaagacgggatcaaccaggttcaatgctccgttgctgaatatccggaagcgatcacctatctgctggaacagtacgatcgtgnnnnnnnnnncagaagaagcgcgtctgtccgatctgatcaccggctttgttgacccgaacgcagaagaagatctggcacctaccgccactcacgtcggttctgagctttcccaggaagatctggacgatgacgaagatgaagacgaagaagatggcgatgacgacagcgccgatgatgacaacagcatcgacccggaactggctcgcgaaaaatttgcggaactacgcgctcagtacgttgtaacgcgtgacaccatcaaagcgaaaggtcgcagtcacgctaccgctcaggaagagatcctgaaactgtctgaagtattcaaacagttccgcctggtgccgaagcagtttgactacctggtcaacagcatgcgcgtcatgatggaccgcgttcgtacgcaagaacgtctgatcatgaagctctgcgttgagcagtgcaaaatgccgaagaaaaacttcattaccctgtttaccggcaacgaaaccagcgatacctggttcaacgcggcaattgcgatgaacaagccgtggtcggaaaaactgcacgatgtctctgaagaagtgcatcgcgccctgcaaaaactgcagcagattgaagaagaaaccggcctgaccatcgagcaggttaaagatatcaaccgtcgtatgtccatcggtgaagcgaaagcccgccgtgcgaagaaagagatggttgaagcgaacttacgtctggttatttctatcgctaagaaatacaccaaccgtggcttgcagttccttgacctgattcaggaaggcaacatcggtctgatgaaagcggttgataaattcgaataccgccgtggttacaagttctccacctacgcaacctggtggatccgtcaggcgatcacccgctctatcgcggatcaggcgcgcaccatccgtattccggtgcatatgattgagaccatcaacaagctcaaccgtatttctcgccagatgctgcaagagatgggccgtgaaccgacgccggaagaactggctgaacgtatgctgatgccggaagacaagatccgcaaagtgctgaagatcgccaaagagccaatctccatggaaacgccgatcggtgatgatgaagattcgcatctgggggatttcatcgaggataccaccctcgagctgccgctggattctgnnnnnnnnnngcctgcgtgcggcaacgcacgacgtgctggctggcctgaccgcgcgtgaagcaaaagttctgcgtatgcgtttcggtatcgatatgaacaccgaccacacgctggaagaagtgggtaaacagttcgacgttacccgcgaacgtatccgtcagatcgaagcgaaggcgctgcgcaaactgcgtcacccgagccgttctgaagtgctgcgtagcttcctggacgattaatcggtaggccggatcaggcgttacgccgcacccggcactaggccctctgcacaaacgccaccttttcggtggcgttttttatcgcccacgcactaccagcgcctggtccagctcgcgatacgcttcaaccagtttctccagtgaaacgcgacttaaaccgctgggatttggcagcacccaaatctgcgtcgaaccaatggtgagcgtttgtttcccccactgtgcaccgcgctggctgaatccctgttcatatgcttgtttgcccagaatcgccaacgcctgcggctgataatcttcaannnnnnnnnncttacgcccgcctgcgtgtagctcctgctttgaaacttcattggcttgcaccgttggacggtctaccagtttggtgacgccacaacgataatccagcagatgctgtgcctcctgcggcttcaactgacggtcggtaaacccggcctgatatatcaccttccagaagcgatttgccggatgagcaaagggaaaaccagtcccggcggatgaaagcccagggttgataccgcaaaacacgacccgtaaccctggagccaaaatatcctcaaccatatttactcctttctaacatcaccaggaaaagtataacggattgaaaatacattgtttataaaaacagcaggcgcgcggtaatggctggattgcgacacggagttactttataatccgctaccatggccccttagctcagtggttagagcaggcgactcataatcgcttggtcgctggttcaagtccagcaggggccaccatatacaacaaagggttagctaataaaccagctaaccctttttcttttgcctttgaattgggtcaggtaatgggtcaggtaagctttttctccatctgactcagatggctgatagttgccccggataatgcttcgcaatgatgtcatttagccgatcaaccagttccggttttctgaacgtgatgtgcgcggagcccttcttaaagtatctgatgctgaacatctcatcttcatagctctctttaccctgaacagactgaatgtgatcatccagacgaatagtgatgttttcccggttgtcggggatcggtttgccgctgaacagatgcagcattctttccaggtcggcaagtcgatcggcctgttgcccggtgataagatgaaacccccaccggtcccacctcaccaggttgttgacgataattttactgctaaatttgcaggggcaattggttttgtaattccagctcagccctctgaagacgttgatcacccctcgctcaaacacctcatccttattctggtgcagttgttcaaatgtgctcagaatgttcgcttcactgatttccggaaaattatcgtactccagtgaccggtaccatgtatcacgggcctgcgcatccattaatgacagcatcccggaacgttgcatcagatcacgccagagttcgcgatcaagattgtgtgtgatggctttcattgccgtttcaggtttctccatgagccagcagccacagcgaaaatcctgtttcatcgcccagcccagtgcggttttaccgccaatactttctgtcattgctgagatttcagccagttgccggataagtgtgtcgatttgcagcagtgaactctttcgtacagccagaatgtggcggatactggttgagcagataacgtccgtatgcccgttgacaacttccggacgggaggctgtgatatcagacataatcgatattcctttttgcagataaatgaaaacgccagccctgttcaggctggcgtcagtggaatgaagtctggtgagtaagactcaccggttctgttgcagaagctgcagttggcgcagggtatggatatcttccctggcctgttcaatgcagggcagcagtgctgccgaatccattttatcctcatcgttgtcgaagataattccggattcgcagtcgatattgttctgtagccacgcaatcagaatatccagcgccgtttctgtggttaatgattccatactgtgtcttttgtccaggttaccagttgaaggtgggtaaacccggcaggcattcagcgctggcatccaggtgaatgagactgacgccataacgccggatgagtgtgacaaccagacgacggaatgtttttgacaggcccagacgtttaagttgcagaaccgggtatgaccacgcatcggtacgtaacagatatccgctaccggtaaaatgaatccattctgattcgccgaagtcactggtctggtgtgacagcgagtacaaccaggcgttgtctgtttccgtgatatgtgcggtgctgcagcgtataccgctcagggcagcggagggtggcatgctgtcagttgcggtccggtcagattcatcaacaacacgaagggagtagccattgtcgcaggccacgttaatcagttcagcaagattaacaccatcgacgtcaacgacaatgcgccccatgttcagtgcctgcacgttaatgctgtcggcttccagcgtcagggccagtttcattgtttcgcccccggatgtttacccaagataatgttatttaccgttctgtaattgtcgcgggccatcaggccggttgcccggcgggtccggaggatatcaatactgtttattaactgagagcgggtacaggtgctgaaccccggctggtcggttcgtaccagtgcgtatttttccacgagaaagttcaccgcatcgcacagtgaaatgcctgcctcaatatgctgctcaatcacacgttcatcggcaaacggtgtgtcattcagcgtgaggccgtaatgctggtccagcagtcgggtgagcagtatctgccagatggtgacgggagacgggcagcgcgatgcctcccgtacatgcgtgtcgggtaatgttttcatactgaagattttcctgatatgcagagatgaaaaatggaaaagtggcgtggtgaaaacaccaggccggagcagaaggttattctggagagttactttttcgtttcgggcgtcggataaacagccatataaacgtagccacaactgccgagggtgtcggcttcgcaggtcagcccttttgcatacagtgtcacggtatgctgatggcgggggctgagttcaccgctggtgagcatgagctccagttgtttcatcagcagcggaaaggcctggtccaggtggtacgaatccgcgtcgctgaaccggcctctgataccggcgcggtctgcaaggtaatgcaaccggttaccctcctgcaccagacgtgcaccgaaacagggcgtcacggagcagggtagcccccaccaggggcggtcgttgttatcgtcgggatgcgttgtcccggggagtgtgtctgacacgataaaatcctcacagaaaattggttaagaatggtccggtggtggcgataattctgctcttctgaatgcctttccagactcagttcagggtgacgctcatcagccggacatacggaccaaaactgtccttacggcgttcggcaaacacggcaagaacgccgggaatatcctgcacttcacgaccggtatacgcctcagcaccgccgtgccagcggtatttaccggtacagaacggaaaaagacgggatgcaggatgctgacggtgaatacgcatggcttcaccacaggtgatgattttcatgagaatagtcctcctgaatgtgaaagtaagaaacagctgagaaagagaaactgaagtgatatgaaggtgattgtgacggtgacgggttaaagcagaccgtgttccgcaaaggagaaaacctggctgccaccgattatcagatggtccggcacccggatgtcaaccagggccagtgcctgtaccagacgttccgtaataaggcggtcagccttactgggtgtgacttcaccggacggatgattgtgtgccagtaccacggcagcggcattgtggtgcagggcgcgtttaatcacctcccggggatggacttccgtgcggttgatggtgcctgtgaagagggtttcaccggcaatcagctgattctggttgttcagatacagcacccggaactcttcccgctccagtcctgccatgttcagaatcagccattcccgtgccgcatgcgtggaggtgaaggccacaccgggttcatgaagatgacggtccagagttttcagggcccgctgaatgaggctgcgctcgccgggcgtcatctctcctggcagaaaggaaagctgctgcattgtccctgcctccattcagtcgatgatgcgcataatggcgcagcattcaggatgctgcagggcgtaatcccgcaaccgataataatggaccgtcatggcataacattccgtacggcaggcatgatggctgtacgccatcagacaggcggtaatgccggctgcttccgggctcatttcagcgcggttgccgttcatggcattgaacagtacccatgtttcgtcatcatcgtcatcatcgtcatccggttcgggtgctataaatgcgccaccgttgttcagggtgtacagattccagataccaccgcagtagtcttcacacagacagtccatccagccgaagatacggggctccagggtcacccactgtggaatgaggccaaagtgctgcggccagaagctgatgcgctgttcatcagggactatggtggcaaccagttgagactggttattccctgatgcagtggttacggaaacagaaggtgtggtggagctatgcgaaaaggttgtcatgagatgattccttatacaaagtaaatgaatggaagaatgcctggggactggtacagacgtgagtcagggctgcactttcagggaaacggcatcagcgcaggctctccagcaacgtttccgccatcacccataacgcgcgattgagcttaatgtcggtgtcaatgctgtgaatggcccgggtatggatacgttttccttttgcactgcgaccggaaatcccgcctttcagcatattctcctggatggtctgataagcactccacaggtccttaccgtaatcctcccggcgtcgtggcgtcagaatgtcggcggtggtgacgggctgatgttcgtcaccataacggtaagtcagtgcagcctgtgccagcgcctggcatgccggtggcggcagaaccagcgactgcatggcatcacgtttctcttcaatccggtcaaaaacccccaccacctcgtaagccccttcgataactttctccactacatttccccggtgtggaacacgcacttcccccagagactgaccgcagacgcagccattctggcagacgaacctgaagtaacccggcagcatctggtagctggaggtaccgtcatgggagttcagcaggatgatttcagggacatgctgtccgtttatttctccgtcacggcgcagacgcagcatgtgtttggtatacccccggcggcccgggtcacgcacacgggtctggcaggcaaagaagggctgaaaaccttcccgctgcaggctttccagcactgtgatggtggggatccaggtatagttctcgcttctggatgtgtgcttatcttccccgaatacgctggggacgacctgcatcagttcttcgcgagttaaggggcggtcacggcgtatctggtttacatgaccaaaacgacttgctaatcgcatgatttgctccttatgaatgagttagcggtataaatgaaaaagccgcgtctcccggagaagacacggcctgacagatgaaatgaatgacgtttattgtctgagaagcccttcactggcgagctgcgtatttttatgaaaggagatcacccaatacccccatcgggatcgggtaataaccggccagactgtgatcgattcagatgccatttggcagcaaaagagccttcggcaataaacgtgatgtacaacccggcatatctgttactccctgaaagtaaaaggccccggtcattatgaccggggcctgaaggggagtgacctgattatcagaaagtcacattcagcgtggcctgaccgttatagccttcggcgctgctgccgctgacgctgacgctgtgggcataaccggcctgaacgcccagggtgatattttcccggacacgggcttccagtccggcctgcaggtccagtgacgtgccattctgggacggtgagaacgtcatgttactgccggcggcggctgtccccatgctcatgtcaccccgggagctgaaggtgcggataacagaaggctgtacccaccagttcaccggcaattcacgcacactgtgtttggcactgtcgcgcagggtgtcacgggatgaggtgcctttaccaaagttcatatcgttgtggctgcccagacggaagccggcacgcacatgttgtgcactgccatgcccgaacttcacataaccggcgttatcctggccgtcatccagggagagtccctgccaggtgtactgcagttgcggctccagcatcagattgtcagtgatactgaagggcagaccggtttccagtgagcccagccagccccagccccgggcgcggaagtcgttattgtccgatgacgctttcatgctgtggcgggttccctgtgccacaatgtcagcccacaggccggaggacgtgtgtgtcagattcaggtatccgcccaggctgccggcatcatcccggaccgtgccggcgcgggaaccgtcatcatccttaacatcaacggaagaatggcctgcagcaccatatacccctgtcgtcagagacataccggcaacctctgttctcagcaggtcaccctccagacggacgaagccatagctgccgctgctttccggcgtggctccacgggcaataccgccgttgttatcgtgaccgagatgaccgccctgaatgctgagacggacgctgttattttcaccgtttacaccggtctgatggctgcgggagcctgccagaatccggtcatagtccattgcctgtgtcaacatggatgtatacagggggacttcagcacgataagcattttcactgcgcaggtaccagtcttcatcgctgtcacggttcagggtgtagttaaaggcgccggcctgaagcgggcgactcagggcaaacgcaccttcttctgtggtggcgccattctgtgcgtccacaacccggataccctgtccggaggttgccaccccgaggttactgtttccgacatttgtaaacgcaagccaggttttgccggttgcctgaccaccattaatcaccagctggtcagaggtattgctgccatcaaggcgaacacgcatattgatggtgccaccctgaccggtgaggttactggttgtcagtttatggaacgttaccggggagtcgccttttgcaacagcacggctcagcgcggcatccggtgttgtctgattatcaaagcgaatctcccctgcgttaacaatatcgccggtactgaccacatcgccattcagtaccatgctggcacctttactgagctgtgttctgccactcagacttcccccggcagccagcatcagtgttccacgatgtccgacagtggtgttgctggcttgtcccccggcattaaccgtaaagctgccgccattttccagcagcaggccgctggcctgaccggatatgccatcaatactgaacttaccgctggcattggtcccctcaacagtggcaccactgtctgcaatcagggcaccaccggatgtaatggtgacatctgttgccttaccaccggcagacactgccagggtaccgccgtcatccaccagggttttccaggctgaatggctctccagtacatccagacgaccgccattttccagaacgacgttatctgccatgccatttcccacggagaaatgccccaggcggtttgtgccggtgacagttgcagcagtactggtaaccagtgcaccgcccgtgttctgggtgactgcagtggcttccccgccggcatgtaccctcagttcaccgttctgatttatggtggtgttaccagcagcgccacctgccttaacaacctgccagcccccctcgttaattaccgtgttcagcgcaagcccgtccttgtgcacatactggtaaccgccattcagtgtggtattcagagcccttccgtgtaccgactggtcaccacctgcgtaaatgagagtgtcacgggctatcccggaagataagataatctgccgtccatttttgttgatggtggtggattctgctgttccctggaccttctgccccgtgtacgagttgtcagaatccgggccgccttctgcgccggtgttgatgatggttcctgtnnnnnnnnnnnnnnnnnnnnnnnnnnnnnnnnnnnnnnnnnnnnnnnnnnacttttaacgctctggtaaccgtcgcggttaataattgtaccggtggcaaccccgccttcatgaacccactgctcgcctctgttaatcagcgtggtgttcaccgccagtccgttcaggctctgccccccgccgtcacgaataaccgtatcactggctgttcccccctccagcacgacctgacgaccatttgtggtgacagtggtgtttccggctatcccgccattctgtatccattgcccaccggtgttttcttcactgtccggccccagttccagcccggtactgatggtcattccgttggccgtaccgaggacaatctggttgtcatgatttgtcagtgttccgccgctcacggtttctcccgcctgtacaaccgtgtcagcagccagtgccgggactgatgtgacagcagcaagagacagcgcaatcgccacaccggcgcgttttccccgtgagcgggccagttcggaggccaccaccagggtacccgtaatgtgattccataccagcctgtagctggtgttcagatgtcgtttcatcagcttttccttacagagggtgaataaaaaagccggtacccacaaaagtggataccggcaggtacaaaacagagttatcgggcacagcgatacgccccgggcgtaaacgctctcacccttcatcaggcagagaagtatcagtccgttgtgtgcaattccgttctgcatgatgaagagattcagctgccttttcgcaggccattaatcactataaatgatcgatagtaacgatcgatacctgttttatcgatcgttttattctattaatagcagagcagtcacgcaagagaaacaggaggggtatgaggtgtttgtgtcatgttttcagttggttaacgcaatgtaatcaggcatttcccctggcagactgttcagaagaaaatccagttccatacagcgcgggcaacagagaccaccgtgtcacggacggcccgcagaaccgtgcgtgcaacagaggcaatacagacgctctccgccgtgtcaaatatccggtccaccgcaccggtaaactgttcacgggcctgaccccggacagattccgtgcgcagctcgtcctgcaggcgggtcatcaggggactggcggcatggtcgggaagcgctgtcatgagcgcactgaccagcgtatccagttcccagccggtgcgggccgatacggcaacaaccggatgtacgggccggaacagacggaataccgcctccgttttttcgcgaatattctgtgcctgtgcgggagaaggctgaatagcggccatatcccattcatggcagggctccgttttgtcggcctgcgtcaccacaaacagcacctgctgatgtccgcactgcaggatgtgtcgccagaaatactcatccacagacagggcacggtcatcggctttaatcagccacagtaccaggtccagttctggcagaatgtctcggtacagggtttcatactctgcatccctgtcccggctctcgcccaccccgggcaggtcagtgataatcatgctgtgaccgtggccactcagacggaagcgctgcacttcccgggtgccggcgtgaacatcactgaccggggtgacttccccctgaaacagcgcattacagagtgaggatttaccggctccgcttttacccataatgccaatcacgggttcgtgactggtgagtttgcgcagatgttccaggatgtgacgggaaagcgaataaggcagggaggccagtggtttttcaattgcctcaatggcatcagacagattcatacatgtattcccggtgaaaaaagacaaaaccccgcgcaccggaaaggtggcgggagattcacggagataatatctgtctgaaattatttaggatgcaggtatcttcagataatcgcacctccagaattttattcttaatagttgaatagtggtatttggtttccctgagagaatataaaggtgaatcatgctgtattgagtttgattctatttgtactgagacaggcatcttcatgattataatcaaaagtcgggtggattggtctggcgctcattattttttcgaataaactcactaattattgtaaccatcccaaaggagatgattttatgtataattgtggtgaatcatattcagaatacgacatatcattatctgacgatgaaaactataacgatgactattatcgtgaacgcccgtgcccgggagaagttttcggctatgataatactgaggataatgatgaggcggcatctgattatgcactaaaaataaatgaaaactctgattaatacgagggtagctgataataagac

SEQ ID NO: 191 - DNA, 37567 bp, Escherichia coli
  source 1..37567: mol_type = genomic DNA
attaataatagttaatatggaaatttgttaccgcattcacattaccagaagtcgctttccccgtagcgatataatcaactttaaaggtcactgtttgctcagcagaatccgctaactgaatattcgacgtttcggtaccgggagttaccgatgtagaaccatctggcagatacatttgtagagcaacattcgtcgctgcatcggtggtagcctggttggcaaatgctgtaggttgcacgccgtcagccgtaccactaaaggtaaacgtcgcatttttagttacagtaacatcacagccttctaaggcaattggtacatcagttttaacgccagagactgctccattagtttgcaacttggtggcgctgacatttggcaatgtgactactgaatctttcgtcgcagctaccagggtacaagctggagcaataactttaccattaaatgttactttgccatccgtgatagcattatcatcagctgccataacgctggacgttgcacataccacagttataaacgccgtcaatacactttttttcatcgtcatcatcctgatctcttcgtaaatatgataatgcctttaaatgacattagacttaataataacaataattgaccgccatttaaatcaagcatactaaatccaataagtgacaaatctttaatttatagatttcatgaatatttaaatattaactgaacgagtaattcattgattcaacatctaatgactatccaacaaataaatatgcgtgatatataaagccctttctttagtttattttcagaaaaagatacacaaaatttatatttggcattttcttgtctctccgacagactgaccgaattgttatcaatgttaacaaaaaaagaacaattggttataaggagagagtatgcgtgtcatcaccctggcgggtagtcctcgctttccttctcgctccagctccttgctggaatatgcgcgggaaaaactaaatggcctcgatgtagaggtttatcactggaatctgcaaaacttcgccccggaagatctgctttatgctcgtttcgatagtccggcactcaagaccttcaccgaacagctgcaacaggctgatggactgatagtcgctacacctgtgtataaagccgcctattccggcgcgctgaaaaccctgctcgacctgctgccagagcgcgctttgcaaggcaaagtggtgctaccgctggcgacgggcggtaccgtggcccatctgctggcggtcgattatgcccttaaaccagttttaagcgcactgaaagctcaggagatcctgcacggcgtgtttgccgatgactcacaagtaattgattaccatcacagaccccagttcacgccaaatctgcaaacccgtcttgataccgcgctagaaactttctggcaggcattgcaccgccgcgatgttcaggttcctgaccttctgtctctgcgaggtaatgcccatgcgtaacatcattaaactggcgctggtgggattgcttagcgtctctacgattgcggttgctgcagaatcctcgcctgaagcgttacgtataggctatcagaaaggcagtattggtatggtactggcaaaaagccaccagttactggaaaaacgctatccgcaatcaaaaatctcctgggtggagttccccgcgggtccgcaaatgttggaagcgttaaacgttggcagtattgatctcggcagtaccggggatattccgccaatctttgcccaggctgccggggctgatttggtatatgtgggcgtcgagccaccgaagcccaaagccgaagtgattctggtggcagaaaacagcccgatcaaaaccgtagccgatcttaaaggtcacaaagttgcctttcagaaaggttccagttcacacaaccttttactgcgtgcactgcgtcaggccggacttaagtttaccgatatccaacccacttacctgacgcccgctgatgcccgcgccgcgttccagcaaggtaacgttgacgcctgggctatctgggatccctactactctgctgcattattacagggcggcgtgcgggtgctgaaagacggcaccgatctcaatcaaactggatcgttttatctggcagctcgtccctatgcagaaaaaaacggcgcttttattcagggcgtactcgcaacctttagtgaggccgatgcgttaacccgcagccagcgcgagcaaagcatcgctttactggcaaaaacgatgggcttaccggcaccggtgattgcctcttacttagatcatcgccctcctaccaccatcaaaacggttaacgccgaggttgccgccttacagcagcaaacggcagatctgttttatgaaaatcgtctggtgccgaaaaaagtcgatattcgccagcgcatctggcagcccactcaactggaaggaaaacaattatgagtctgaatatgttctggtttttaccgacccatggtgacgggcattatcttggaacggaagaaggttcacgcccggttgatcacggctatctgcaacaaattgcgcaagcggcggatcgtctgggctataccggtgtgctgatcccaacggggcgatcgtgtgaagatgcgtggctggtggcggcgtcgatgatcccggtgacgcagcggctgaagtttcttgtcgccctgcgccccagcgtaacctcacctaccgttgccgctcgccaggccgccacgcttgaccgtctctcaaatggtcgtgcgttgtttaatctggtcacaggcagcgatccacaagagctggcaggcgacggcgtgttccttgatcatagcgagcgctacgaagcctcggcggaatttacccaggtctggcggcgcttattgctgggggaaaccgtcaatttcaacggtaaacatattcatgtgcgcggagcaaaactgctcttcccgccgattcaacagccttatcctccgctttactttggcggatcgtcagacgttgcccaggagctggcggcagaacaagttgatctctacctcacctggggcgaaccgccagaactagtaaaagagaagatcgaacaagtgcgggcgaaagctgccgcgcatggacgcaaaattcgtttcggtattcgtctgcatgtgattgttcgtgaaactaacgacgaagcgtggcaggccgccgagcggttaatctcgcatcttgatgatgaaactatcgccaaagcacaggccgcattcgcccggacggattccgtaggacaacagcgaatggcggcgttacataacggcaagcgcgacaatctggagatcagccccaatttatgggcgggcgttggcttagtgcgcggcggtgccggaacggcgctggtgggcgatggtcctacggtcgctgcgcgaatcaacgaatacgccgcgcttggcatcgacagctttgtgctttcgggctatccgcatctggaagaagcgtatcgggtcggcgagttgctgttcccacatctggatgtcgccattccggaaattccccagccgcagccgctgaatccgcaaggcgaagcggtggcgaatgattttatcccccgtaaagtcgcgcaaagctaaggaagaaataatggcaacgccagtgaagaagtggttattgcgcgttgccccctggtttttaccggtgggcatcgtggcggtgtggcaactggcctcctcagttggctggctgtcgacgcgtattttgccctcaccggaaggggtggtgacggcgttctggacgctctccgccagcggcgaactgtggcagcatctggcgatcagttcctggcgggcgctgattggcttttcaattggcggatcgctggggttgattttgggactgattagcgggctatctcgctggggagaacggctgctggatacctcaattcagatgttgcgcaacgtaccgcatctggcgctgatcccgctggtgattttgtggtttggcattgatgaatccgcaaaaatctttctggtggcgctcggcacgctattccccatttatatcaacacctggcatggcatccgtaatatcgatcgcggtctggtggaaatggcgcgtagctatggattatccggcataccgctgtttatccatgtgatcctgcctggtgccctgccctcaattatggtcggcgtgcgttttgcgttgggcctgatgtggctgacgctgattgttgccgaaaccatttctgccaattcaggcattggttatctggcgatgaatgcgcgggagtttttgcaaacggacgtggtggtagtcgctattattctttacgccctgctcggcaaacttgctgacgtcagcgcgcagctgttagagcgcctctggttgcgctggaacccggcttatcatttgaaggaggccacggtatgaatactgctcgtctgaaccagggcacaccattgttgctcaatgcagtaagcaaacattacgcggaaaatatcgtcctgaaccaactggatttacatattccggcaggtcagtttgtggcggtggtgggccgcagcggtggtggcaaaagtaccctgctgcgcctgctggcaggtctggaaacgccaaccgcaggcgatgtgttagcgggcaccacaccgctggctgagattcaggaagacacgcgaatgatgtttcaggatgcgcgtctgctgccgtggaaatcggtgattgataacgttgggttaggccttaaaggccagtggcgcgatgccgcgcgtcgggcgttggctgcagtaggactggagaatcgcgccggggaatggcctgccgcactttctggcgggcagaaacagcgtgtggcgctggcaagagcgttgattcatcgaccgggtttattgttgcttgatgaaccgatcggggcgctggacgccttaacgcgactcgagatgcaggatttgattgtgtcactttggcagcagcacggctttaccgtactgttggtgacgcatgatgtgagcgaagcggtagcaatggctgaccgggtgttgttaattgaagagggaaaaattggtctggatttgacagtggatatcccccgtccgcgtcgattagggtcggtgcgattagcggagctggaagcggaagtattgcaacgggtaatgcggcgtgggcattctgaacaactgattcggcgtcatggttaatatgccggatgtggcgcacaaaaccagcattttcaacggactagtaggcctgataagacacgtcaagcatcgcatcaggcagttgggcacggctgccggatgcggcgtgaacgccttatccagcctacaaaaccagcaatttcaacggagttgtaggcctgataagacgcgtcaagcgtcgcatcaggcattttggctcaaaagtatcaagccagtgctttggtgatcttctcgtacagatcgccagagagattttccagccctttcaactgttccagcgccgcgcgcattttctcctgacgtttggcatcataacgtttcaggcgaatcagcggttcaatcagacgtgaagctacctgcgggttacggctgttgaggtcggtaagcatttccaccaggaactggtaaccgctgccatcttcggcatggaacgctgccgggttgctgcccgcaaacgcaccaatcaacgaacgaatacggttcgggttgctcatggtaaatgagcgatgctgcaacagaccacgcaccgtctccagcacattcgccgccgggctggtggcttgcaggataaaccatttatccatcaccagaccgtcctgatgccacttatcgtcgtactcctgcatcagcgcgtcacggcaaggcagctgtgcagcaaccgccgcagaaagcgctgccagcgcatcggtcatattgtttgcttcatggtattgcttgctcaccagcacgtcagccagatgcgtttcaccaaaagcaaggaagcgcaggcaggcattacgcagagtgcgttttgcaatatcttcatgctcaacacggtactcgctctggtaattcgcgttgtaaatagccagcagctcatccgccagttcagtcgccagagtacgagtgagtgcttcgcgtacttcggcaatagcaatcgggtcgatgatatcgaacagttcagccatttcattgacagaaggcagcgtcaggatttctgccgccagcgccggatcaatcttctcatcgagcagcaccgcgcggaaagcgtcagccacatgtaccggcagagacagcggctgcccttgctgatgacgggcgacgttcagcttgatgtaggttgccagcaaactttgcgccgcatcccaacgggagaaatcattacgcgcatgacgcatcaggaaggtcagttgctgatcgctccacttatattccagtttcactggcgcagagaattcgcacagcagcgcaggcaccggctggaagtagacattatcaaaaacaaaggtctgttccgcctgggtgacgttcagcacggaattcaccggatgaccgcctttctgcaacgggatcactttgccttcgttgtcatacaattcgatggcaaatggaatatgcagcggctgtttttctgcctgatccggcgtggctggcgtgcgctggctgatggtcagggtgtactgctcggtttccggattgtagtcgtctttgacggtcacaatcggcgtgccggactggctgtaccaacggcggaaatgggagagatcgacattcgacgcatcttccatcgcctgcacaaagtcgtcgcaggttgccgcgctgccatcatggcgctcgaaatagagttgcatccctttctggaagttttcttcgcccagcagggtgtggatcatgcgaatcacttccgcgcccttctcgtaaacggtcagggtgtagaagttgttcatctcaatgaccatatccgggcggatcgggtgcgccatcgggctggcgtcttccgcaaactgcaatccgcgcatggtgcgcacattattgatacggtttaccgcgcgggaaccaaggtcagagctgaattcctgatcgcggaagacggttaaaccttctttcaggctgagctggaaccagtcgcggcaggtgactcggttaccggtccagttatggaaatattcatggccgataacgcgttcaatatcgaggtaatctttgtcagtggcggtgtcggtgcgggccagcacatatttggagttaaagatattcaaacccttattctccattgcgcccatattgaagaaatccaccgcgacgatcatatagatgtcgaggtcatactccaggccgaagcgttcttcatcccatttcattgagtttttcagcgaggtcatcgcccacggcgcgcgatcaaggttgccgcgatcgacgtacagctccagcgccacttcgcgaccagaacgcgtggtaaaggtgtcgcgcagtacatcaaagtcgcctgccaccagcgcaaacaggtagcacggtttcgggaacgggtcctgccactgtacccaatggcgtccgttttccagttcaccttgcgcaacgcggttaccgttggaaagcaggaagggatatttggttttatcggcaataattttggtggtaaaacgcgccagcacgtccgggcggtcgagataatacgtaatatggcggaaaccttcggcttcacactgggtgcaaagcgcatcgcctgactgataaagcccttccagcgccgtattcgccgccgggcttatttcattaatgatcttaagcgtaaaacgctccggcaaattactgatgaccagtgcgccctcttcttctttccaggcggtccacggctcatcattaatatgaacagaaaccagtttgaggtcttcgccgttgagacgaagcggagcatctgatgcaccatgacggacagcctgactgaccgcggtaacgaccgtcttttgcgcgtcgaggtcaaaggtcaagtcaatatcagtaatctggtaatccggcgcacgataatcgtgacggtatttggcttgtggctgttgagtcataaataacctttagcatcttttatagagtctggtgttcagtctattcctgttgcgtaaatcgcgctatgcagaatcttcatcttttcaggtacaaacgcctttattgctacatttttataacatacaccgcgtaatgccatcgaccagaaaggtggcatatggtgtgatcggggttcaataaattgcgaaacaaggtatactccagcagttcctgaagatgtttattgtactaaacgctcctgtacgaggacgctactgcgcacctatgacacaattcgcttctcctgttctgcactcgttgctggatacagatgcttataagttgcatatgcagcaagccgtgtttcatcactattacgatgtgcatgtcgcggcggagtttcgttgccgaggtgacgatctgctgggtatttatgccgatgctattcgtgaacagattcaggcgatgcagcacctgcgcctgcaggatgatgaatatcagtggctctctgccctgcctttctttaaggccgactatcttaactggttacgcgagttccgctttaacccggaacaagtcaccgtgtccaacgataatggcaagctggatattcgtttaagcggtccgtggcgtgaagtcatcctctgggaagttcctttgctggcggttatcagtgaaatggtacatcgctatcgctcaccgcaggccgacgttgcgcaagccctcgacacgctggaaagcaaattagtcgacttctcggcgttaaccgccggtcttgatatgtcgcgcttccatctgatggattttggcacccgtcgccgtttttctcgcgaagtacaagaaaccatcgttaagcgtctgcaacaggaatcctggtttgtgggcaccagcaactacgatctggcgcgtcggctttccctcacgccgatgggaacacaggcacacgaatggttccaggcacatcagcaaatcagcccggatctagccaacagccagcgagctgcacttgctgcctggctggaagagtatcccgaccaacttggcattgcattaaccgactgcatcactatggatgctttcctgcgtgatttcggtgtcgagttcgctagtcggtatcagggcctgcgtcatgactctggcgacccggttgaatggggtgaaaaagccattgcacattatgaaaagctgggaattgatccacagagtaaaactctggttttctctgacaatctggatttacgcaaagcggttgagctataccgccacttctcttcccgcgtgcaattaagttttggtattgggactcgcctgacctgcgatatcccccaggtaaaacccctgaatattgtgattaagttggttgagtgtaacggtaaaccggtggcgaaactttctgacagccctggcaaaactatctgccacgataaagcgtttgttcgggcgctgcgcaaagcgttcgaccttccgcatattaaaaaagccagttaatatcatcagggagctaatcggctccctttttttacctttaattccgaaatctttcgctgcatttgcgaattctgcttgtctgattgcagatgccaggtaacataggtatccccccatttacgggtggacaagtgtttattttttccgactattaacagagagaatattatgagcgttgtgcctgtagccgacgtactccagggccgcgtagccgttgacagcgaagtcaccgtacgcggatgggtacgtacccgccgagattcaaaagctggcatctccttcctcgccgtttatgacggttcctgctttgatcctgtacaggctgtcatcaataattctctgcccaattacaatgaagacgtcctgcgtctgaccaccggctgctcggtcattgtgacgggtaaagtcgtggcgtcgccgggccaggggcaacaatttgaaattcaggccagcaaagttgaagttgctggttgggttgaagatccagacacttacccgatggcggcaaaacgccacagcattgagtatctgcgtgaagtcgctcacctgcgtccgcgcacaaacctgattggtgccgtcgcgcgcgttcgccatacgctggcgcaggcgctgcatcgcttctttaacgagcagggattcttctgggtttcaacgccactgattaccgcatctgataccgaaggtgcaggcgaaatgttccgcgtttctacgctggatctggaaaacctgccgcgtaacgatcagggcaaagtggatttcgacaaagacttctttggtaaagagtctttcctgaccgtatctggccagttgaacggcgaaacctacgcttgcgcattatccaaaatttataccttcggcccgactttccgtgctgaaaactccaacaccagccgtcacctggcggaattctggatgctggagccggaagtggcgtttgctaacctgaacgatatcgcgggtctggctgaagccatgctgaaatatgtcttcaaagcggttctcgaagaacgcgcagacgacatgaaattcttcgctgaacgcgtagataaagatgccgtttcacgtctggaacgcttcattgaggccgatttcgcgcaggtggattacaccgacgcagtgaccattctcgaaaactgcggcaggaagtttgaaaacccggtttactggggcgtcgatctctcttctgagcatgagcgttatctggcggaagaacactttaaagcaccggtagtggttaaaaactatccgaaagatattaaagcgttctatatgcgcctcaacgaagacggtaaaaccgttgcggctatggacgttctggctccgggcatcggtgagatcattggtggctcccagcgtgaagaacgtctggacgttctggacgagcgtatgctggaaatgggcctgaataaagaagattactggtggtatcgcgatctgcgtcgctacggtactgttccgcattcaggtttcggtcttggttttgaacgcctgattgcttacgtaactggcgtgcaaaacgtgcgtgatgtgattccgttcccacgtactccgcgcaacgccagcttctgattttcttcctcaaagagccagcgcctgctggctcttttttatcctttctgtcaagttatctgtttgttaagtcaagcaatctatttgcaaccccgccataacgatcatcctgttacggaatattacattgcaacatttacgcacaaaaaataacccgcattcttattgcggattagttttttcttagctgatagcacaattttcatactattttttggcattctggatgtctgaaagaggattttgtgccaggtcgataaagtttccatcagaaacaaaatttccgtttagttaatttaaatataagtaaatcatataaatagataaaaattgctgtaaatatcatcacgtttctatggaaatatgacggtgttcacaaagttccttaatttttacttttggttacatattttttctttttgaaactaaatctttatctttgtagcactttcacggtagcgaaacgttagtttgaatggaaagatgcctgcagacacataaagacaccaaactctcatcaatagttccgtaaatttttattgacagaacttattgacggcagtggcaggtgtcataaaaaaaaccatgagggtaataaataatgatgaagcgcaatattctggcagtgatcgtccctgctctgttagtagcaggtactgcaaacgctgcagaaatctataacaaagatggcaacaaagtagatctgtacggtaaagctgttggtctgcattatttttccaagggtaacggtgaaaacagttacggtggcaatggcgacatgacctatgcccgtcttggttttaaaggggaaactcaaatcaattccgatctgaccggttatggtcagtgggaatataacttccagggtaacaactctgaaggcgctgacgctcaaactggtaacaaaacgcgtctggcattcgcgggtcttaaatacgctgacgttggttctttcgattacggccgtaactacggtgtggtttatgatgcactgggttacaccgatatgctgccagaatttggtggtgatactgcatacagcgatgacttcttcgttggtcgtgttggcggcgttgctacctatcgtaactccaacttctttggtctggttgatggcctgaacttcgctgttcagtacctgggtaaaaacgagcgtgacactgcacgccgttctaacggcgacggtgttggcggttctatcagctacgaatacgaaggctttggtatcgttggtgcttatggtgcagctgaccgtaccaacctgcaagaagctcaacctcttggcaacggtaaaaaagctgaacagtgggctactggtctgaagtacgacgcgaacaacatctacctggcagcgaactacggtgaaacccgtaacgctacgccgatcactaataaatttacaaacaccagcggcttcgccaacaaaacgcaagacgttctgttagttgcgcaataccagttcgatttcggtctgcgtccgtccatcgcttacaccaaatctaaagcgaaagacgtagaaggtatcggtgatgttgatctggtgaactactttgaagtgggcgcaacctactacttcaacaaaaacatgtccacctatgttgactacatcatcaaccagatcgattctgacaacaaactgggcgtaggttcagacgacaccgttgctgtgggtatcgtttaccagttctaatagcacacctctttgttaaatgccgaaaaaacaggactttggtcctgttttttttataccttccagagcaatctcacgtcttgcaaaaacagcctgcgttttcatcagtaatagttggaattttgtaaatctcccgttaccctgatagcggacttcccttctgtaaccataatggaacctcgtcatgtttgagaacattaccgccgctcctgccgacccgattctgggcctggccgatctgtttcgtgccgatgaacgtcccggcaaaattaacctcgggattggtgtctataaagatgagacgggcaaaaccccggtactgaccagcgtgaaaaaggctgaacagtatctgctcgaaaatgaaaccaccaaaaattacctcggcattgacggcatccctgaatttggtcgctgcactcaggaactgctgtttggtaaaggtagcgccctgatcaatgacaaacgtgctcgcacggcacagactccggggggcactggcgcactacgcgtagctgccgatttcctggcaaaaaataccagcgttaagcgagtgtgggtgagcaacccaagctggccgaaccataagagcgtctttaactctgcaggtctggaagttcgtgaatacgcttattatgatgcggaaaatcacactcttgacttcgatgcactgattaacagcctgaacgaagctcaggctggcgacgtagtgctgttccatggctgctgccataacccaaccggtatcgaccctacgctggaacaatggcagacactggcacaactctcagttgagaaaggctggttaccgctgtttgacttcgcttaccagggttttgcccgtggtctggaagaagatgctgaaggactgcgcgctttcgcggctatgcataaagagctgattgttgccagttcctactctaaaaactttggcctgtacaacgagcgtgttggcgcttgtactctggttgctgccgacagtgaaaccgttgatcgcgcattcagccaaatgaaagcggcgattcgcgctaactactctaacccaccagcacacggcgcttctgttgttgccaccatcctgagcaacgatgcgttacgtgcgatttgggaacaagagctgactgatatgcgccagcgtattcagcgtatgcgtcagttgttcgtcaatacgctgcaggaaaaaggcgcaaaccgcgacttcagctttatcatcaaacagaacggcatgttctccttcagtggtctgacaaaagaacaagtgctgcgtctgcgcgaagagtttggcgtatatgcggttgcttctggtcgcgtaaatgtggccgggatgacaccagataacatggctccgctgtgcgaagcgattgtggcagtgctgtaagcattaaaaacaatgaagcccgctgaaaagcgggctgagactgatgacaaacgcaacattgcctgatgcgctacgcttatcaggcctacacgtcccctgcaatattttgaatttgcacgattttgtaggccggataaggcgctcgtgccgcatccggcataaacaaagcgcactttgccagaaatccaggcccgcattaaaagcgggcttttttatgtgccttaccagacgggcatttcgtcttgcaggaagggattatgcaggcgttcataaccaagtgtggataatggtccgtgacccggaataaatgtcacgtcatcccccagtggcagcaatttatctttgattgaagaaatcagttgattatgatcgccacgcgggaagtcactgcgccctactccgcctttgaaaataacatcgccagaaatcagcagctttgcccgatcatcaaaaaacacgacatgacccggcgtatgcccagggcaatgtaacacctgtaaagtcacattccctatgctgatggtatcgccttcgttcagccaacgatctggcgtcagcggctggcactcttccagaccaaacatacgactttgcgcaggcaagccttgcagccagaactcatcttctttttccgggccaaaaaccggcacgccgtaatgttgcgccagttccgccgctgcgccaacgtggtccagatgaccatgcgtcagcaggatctgcatcagtgtcaggccgctgtcatcaacttcctgtttgattttttccgcatcgccgccaggatcgaccagtgcggccagacgggtttgttcacaccagattaatgaacagttctgggagaatgcggtgaccggaataatacgatagttcatactgcccctgtttcgttaagcaattactaccagtgccgtgctggcccggtatcaatatgcacaaagttactacgtggataatatcctacaccacctgcgcgcatagataacgcggctttgcgaatattgcttaacgcgataccttcaatatggaaatccatcgcctggcctttagtgtgatagcttttcttcgctactccacggctgcgggcgcgtagttcattgttggtatcaatagaacgataaccggaaatgagttgcaccggtttgcgcgtgcctaacaacccttgcaggcgatacaactggtcgaataatcctgggtcgatggactttattttgttcgcgcggtaatcgcggaaaaaatggttaagttttgccaattcttcctgaatatagcctctgccatcgaaaaactccgctttgattgactctccggtatgaagattattgagtgtcaaaatgcgcgggcgtggggtagagagtgttgcaaacgcaggggtcggcaggatggcggcaccgagtgcaacgccaccaagcgccagcaatttgcggcgattagcgtcgaatttgtccatgataatcaagtctacaggtcaatgttatcgtttatatgcacttctggcgcacaagaggcaccttaaccgcccgtaaagcagacgtcaagatgactcaaccccagcagtgacgggggctgcagagaatcgcccccaatcatgctaattattacgacaactgatttccccgaactacttcatttacctgattaattgttccgctttcgatacgatttgcgagctggatcgcgcaggcagatcataattgtaaatatctgtacgatactgggtacgaccatctgcaccaacaaaggccgtcaggtagtagagattcaccggaatcgactgccgaatattgacgtaacgtgtatcaccctgcttcagcgcatcagaaatacgtttgtcattccagcctgcatcctgcaacagcatattcgccagatcggaagctttattcactcgtacacagcctgagctcaatgcgcgtgtatcacgcttgaacagattgtggttcggcgtgtcatgcaaataaatggcctctgaactcggcatattgaatttatagcgccccagcgagttccgtgggcctggagcctgctggaagcggaacggtaaattcgaggccgtgattgtagaccagtcaacctgccatgggtcaatcgcttctctgctgttccagccgcgcatcaccgtatagccatggctttcgagatatcccggatcgttgcgcacttttggcagaatatctttgcgtgccagtgttggaggtacgttccacggcgggtttaccactacgttgttaagggcactgctcatcatcggcgttttgcgatcggggcgaccgacaatgactcgcgaatccagcacctgattgccgttctgatagtagaccagcgaataggccggaatgttaaccatgatcccggtagaaagctctgttggcagcaagcgcaatcgctggatgttgagagccaacacgccagcacgctgggcgggcgttacgtttaaccagtcacgtgttgccgggccaatagcaccatctgcccccaatccttgccatgcctgaaaacgtttaacggcttccaccagttcattatcgtaggcggcacgaacggcaggcgcaggtttactacgagacgtcatttgcttgtccatcggcttagtttctgctgtttcaacagtaacagcggatgggctgactaccgcgtcagttggcgtgtcatcgccaggtagagtaattttcggccccccgtccaacatgcctgtgcgttgcaatatttcgcgcaacgccggtacgtcgttactccactgccctgggcgcaacgttgctttgccggtcagttggggccacggtttggtgtcactgagtaaggccagtaacgattcatgcatcgccgcatattgcggatgctgcggtgccagtcctgcaacaaacgtaggcaattgacctttatccagcgccagctgccattggttaatcaccgagagcggcggcgttgcaagtgcataaggtttactgctatatagccagcgagtgcctttgaccggaatatttgcaatgaaatggagatagcccatcatcgcatcagagagcactacgtcgcgtgccatcccgttaacaccaggatcggtcagtaactctacccatttattaaactgcggctggaaaccggcaatcgccacctctgccagctgttgctggaaggctttaacagcatcacggttttcccacatgggttgcatatcgcgtgcggcatacaacagttgaagctggttaagataaaccggcttgtaacctgcgggtaattgagattcgatttgagtgcgggctttttctgccgcaccttcaggcaatggctggatccccgccaatattgccgtggcttgcgcctgcggcagtgcctcgccctgttcactgacagccaccgggctgtcgccagggattacttcaggctcatcggcctgcgcattgaacagtggagcgaatgttacggccaggcacaaactgattgccgacagccgacgaccacacatcatattaagcaacatcccttgccccctgtttttatcatactctgaatagccaggctgttattttacgacttgcctgtacaacgccaatactcacgaaagtatgacgagcaagcctgttactcatcaggcttatcttcagtatataaacgccgatacgtttttacataacctaatgtaaagaagtttaaagaaaagcgcgccgtaatgtgccacttttttagtgcagaaacggagttttcggaaaaagaaaaggcggcattgctgccgccttaattttaactcgcctgagaaggcgcttcgtcacttcctggaagcgtttcagggagttgcggcgcaaatcctcgcaggccgacgacgtgaacgtgttcggtattctggaagactttacgcaccagtttataggtggtgcctttctccgggctgatattttccggcgctgcgatgatgagctgcatttgcaaacgttcacacaattcaaacagcgtggcgatagaacgagcatccagtcgcgctgcttcatcgaggaacagcaggcggcaaggagagatatctttaccgcgcaggcggcgagattcatcttcccagctttgtaccaccatcaccagaatcgacataccggtaccaatcgcctcaccggtcgacaatgcaccagactctgcgcgcaaccagccatcggaaccacgattaacctcaacttccatttccagatagttgcggtaatccagcagttcttcgccaatggtctgcggcgtgcgctgccccatatcaatctgcggattaagacgctgatacaatttcgccagcgcttccgagaaggtcagacggttgctgttaaacagatcctgatgctgctcgtgctgttcagagagcacatccagcagcatggcgtgcgtttcacgcacgttcacgttcagacgtacgctgttcacctgaccaaacgatacgttctgcaacccctggttgagcatacggatacggttctgctcgcgctgaatggttttgcgaatgatgttcgccacgctgcgggaactgatcgccagtttctgttcgcgggaggttaactcctcggtcagtcggctaagttcgatttccatctgctcgatggcttccaccggatcatcggtacgaataatatcctgacgaatacgttcacgcagatgctgataaaccgccacgaagaactgaattttacgttccggacgttttggatcttccgacatgcgcagcacgtcgcgcagatgttcgttatccgccaccgccagacgcagcgcacccaatgccttatccgacatagagcgcaaatcatcagcggagagataagccagctcgcgacggtgtaagcgccgttcaacgccgttatctttcaccatgcgcatcactgcacaccagcccgctttggcggtcactacctgctcgcgcatctcaaagtaatcccgctccagcttgcgcagtttgcgggtcaggttgtccatctccgcttcgcagaaggtaagcgctttttccagttgattgcggcgtgaacggttattgctcagttgcgcatgcagctcgtcacggcgaatacgcgcccgctcttctgccccgctatcagcacgcacgccgatatcctgcaattcacgttgcagatcgttgagtagctcttttttggtgtcgtaagaacttttcagcgaagccagcacctggttgtactgactcaactgcgctgcgtgaccacgcaacgcttcacgagcgcgagtacgctccgcttccgcctgttccagacgttcacgcagcttttcgttgagatcgctattaccgctcagcatttctgccgagtcagaatagctaaagtgcgcacgacgctgcaccacttccgtcagggcaaacgcctgctgacgggcatcgcgctgcatctgctgagagtacgcgtaatcttcttttagctgttcgaactgttccgggtcgctctgcaataccgaaacgatcggttccagtttcgccagttgattgccaaactgctgaacaaaacgcgcggcttcctgggcttcatccagacgttcgcggatttcatcgacgcgatccgccaggctgtcatcagccaacaggttgagacgcggcagaatgcggttcagcgccgtaacgccttctttcgcctgctcaaactgaatacgctgctgctggttatcattttcatgattactcaacgcccgctccagttcgacgcgacggctgttcagttgacggatttctgcttccgggtcagactcaaacgcaaccgccagatgactgccgataaagcggctgaacgcctgatgcagacgctgagttttctgtacatcaaaggagagcgtggcgaagcgttcggaaagcacttcacgctcggcatggaggctttcaatacggctttcacgcgcagcacgaccaaacagcggcacttccgggaaacgtgaataacgccactgacgatcggcgattttcaccactaccgctttttccagctcatcaacgctgaacacgctgtcatcgaatgactgcggatctccttcgatcagatagagatcttccgggcaatcggtcaagccttccaggtgttcagttacctgtgacagatctggcaccacgatggcgtggcgtgacgggccatacagcgctgagaagtacggcgcatcttccaggctaacgtcgtcataaatttctgacagcagcacaccaccaaaacgctccgccagcgcgttcagacgctgatcttcagagccgccaggctggcttaaacgttcgatctcttcatcgacggcgtttttgcgcgcgcccacttcatcgcgttcaacaatcgcctctcgctcacgctccagcaactgttgcagatattcggtgacgtcctggctggaggtaaactcttcgccgcactgttcgctcaactggttgagactgttttgcgctgccagccaaaccggcgcacgctgcatcaaactctgaatgcgagactgcagctgttcctgttcctggcgcagtgccatgcgctcttcacgggcgttagacacgctatcggaaagagaggcaatgcgcgcttccagctcctgatgcagagcttccagctcgtcaatgtcaaaattcttgccctgacgtttgcagaaatctgccagcagacgctcagcttcttgctgttcgcgcagacgctgttccagttcgcttaagcgcatccgcaacggctgaacctgctctgccaggtgacgctgatcgaccccttcgcgcaatagttcgcgagcgacatcccacgcctcgttacgcgccagcgggccgttgattgccaccaccagctgataagcctgctcaaactggctgtgcgcggtttgcgccatgctcattttctgctcaagagagagcattttttcagtcgcttccagctctttcgcctggaaggtttccagccattcggcggcgctgtcggcggttaagtccggcagatggcacagttctttggcgcgattaagcgcagcaatcgcctggttatactggatcgcgcgcgtttgctggacgtccagcgcctgctggtagtcagcaagctggcttttcagctcgtccacttccagttcggcagcttccgcgcgagcctcgttctcttcctggcgttcgatggcttctgccaccacttcgttttgctcttccagacggatctgcagctcatcgagatccgcttcgtagcgttcgatcttctcctgctgacgcagtgcggtttgcaccaggttcaggtgatcgctggccgcctgataatccgcttccagatcgccttcggcaccgttgtgctctgccagctcacgcgccatatcgacgtgtttgtactgctcagccgccagttgctgacgcgaagtatgtaactcgcgacgaaactccagggctttgtcgagatggacacggcgctcgttggcgtgacgcatgtagtccgccgccacgtagttggtagcttcgctgatcagatgcttaaacaggtcacggtccgactgggtgacacgaatcgcttccagcgtcatgcggttttcacgcagcgccgcttccatgtcctggaacgctttacgcacgccgctgttttccggcaacaggtagtcgcgcagagaacgggtaatggcactggagatcccgccatacagcgaagcttcgatcagacgatagaatttgctacggtcagatgcggagcgcagacgacgcgcgatgatgccaagatcgaacatcagcgagtggtaatcggtaatggagttgaactgtttaaactgcacgccttccatcgcctcgagcttgtctttcagctcgttaagcggcagcacgcgcgcctggcgttcgttcagggtttcggtcaccagctgtgtcggctgcaccgacatcggcagtccctgaatggcaaatggtttgatatccactttacgatcgcgtccggcaacctgttgcagacgcacaccgaccaccacgcgnnnnnnnnnnacggagcaccacgcggtggtggagcgagttaatggtgtcgagcatcgaataacagacacccgctttcagcttaccgtgcagacctttatcgcgcgaaccgctggtggccccggcttccgtagtgttacggaaatgcagcagggtcaggtcggggatcagcgccgtaacgaacgccgccatggtggtggatttacccgccccgttaccgccagaaagcgtcgtgaccagctcgtcaaggtcaaaagttcgggcaaaaaagccgttccagttaatcagcgtcagtgagcgaaatttaccgcgttcaatcattattcttcctctccgctatctggctgattctcttcggtttcatcgttgagttgcagatgattttcaatcggcattgcttcgccatcacgaatcaggcgacgctgtgcttcacggggatcgtcgccagcacgcacatcggctccgaagcggaacaccgattcggtaatgcgaaacttgctgctgtcgtggcccataaaccacaccatgcctaaacgacgcagacggttgagcgaagaacgtactttctcctgcaacttctgacggtcaacgtctgaaccggttgaacggttgttcaccagtttcagcagttttgcttcatcggccagggtgagcagttcgtcgtacagttcctgctgggtgaaaatcccctcattcgccagccgttccgggctgagatagagataacagaggattttcccgaccatcatatccagttccgacaagacggaacgagggatcagcgtggtggaacgtgggcgtaaatagaagaacccttctggtgcgcgaataagctcaacgttataacgcgcgtaaaactcttccagatattcctgaaaatccatcaggaatgcatgattatccagttcgtcgaggccaatatggcggcctgaacgtaaggcgctgtccagcgccggaaataacggattcgccagcgcctgcgccagcttaaccggcatcacttgttcaatatttgtcgatgacatgcgcctgtaccttggctccgtaatcattaatcggctgccatttcgctggcagtccggtgaaatctgcttgcgctacgccaagacgtaccgcctgatcaataacaatacgcgcaacgtcaaagtgacgtgcacgcggatactgtgacagatattcgcgtaccaccagaccaagatccagcggcacttgtctggttttgtacacggcaagttgttcttcgatgatcgccgccagctgttcgcggatctcgttaaactcttcgtattccagatcctcaggaagttccccagtcacttcttcatcgcgcagtgccatctcttcgtcacgcatatccagcagacgatcggcattggcataagttagcgcccacggctcatcaaaataggtttgtaccgactgacgtaaccgctgagcaaagacgcggtttttatccatatcgatcgcggtacgaataaatttgtgtacgtggcggtcgtagccaatccacaagtcgatggattgctggccccaactgataatacgatcgagtttgctctgcagatcgaacaccagacgatcgacgaaatgcagatcgtcatgggtcatcgtcgcatcctgaatgcgcaacagattagcctgcaatttgtcgcctgccgcttccagcgtatcctgcaattcacgcagcgttccggaagtttccgaaagcaacaattcacagctggaaatcgccgcccgccagtctttgttcagcaactgggcgatatcatccttcacctgctgctgctgttcatccatcagacgttgcgtcaggtcgatactgtcgaaaatttctgctaccgaatatttcagtggagcataaacattacggtgccagtgaaattcatcaccgccctcttcggcggcatctgctgcgcgtttgagctcacccgccacaatcgacaactgcatagaaaggcgcagcgtagaaaactcgcgctgacgaatgtaatagtcagtgatgccgatgccgagcggcgtcagacggtaaattgcgttcccttccgcctgctcgctggtnnnnnnnnnncagacgttgacgcaccatgtcgttgatcgcgttgttggcgcgcacgccgatggtttcgctggtttgctcaaacgcatcactcacatggcggaatgcatccaccagctcgccttcactcatctcaccatccagacgctcgccgttcagcgtggcaaccgccagcagaaaagagagtcggtctaccggcagcgagatggagaagtcattttttctggcccaggcaaccagttcggggactgtctgggaaaattcactcatactttatccttgctctgcggtttgcgcgcggtgacatgaatataacgccccagggtaatatacggttcctgacggcaataacgcgtttctaattcaagtaatgcttcatagcagtcgcgctgctggtgcttctcgcgcagataatcatgaaacacgcgaacgcctgtcttacccataatttgccaaccagcttcttccagccacagataaacctgcgccgggtcgcgtggataatctggcgaaagcgtccgttttttctttttcgtcattcccgcctgcacgtaatcaaaattcccggcgaccatgttatgcatcaacaaaccatgcgcattgtagaacattaacgacaacactccgcctggacgcaacactgaccacagggtctgcaatacactgcggggatcggccacccactcgagcaccgcatggaacaatatcagatcaacgggcgtttccaaatgcgaagcaacatcctgagcggcgcaatgtataaattgcatgttgtcgctcacaccttttgcttctgccgcctgttttgcgcggtcgatcatctgcgcagaaagatcgcataaaatgacctgatgcccacgctcggccattttgattgcggtctgcccttctccaccgccagcatccagcacacgcagtttttgcgggcccatttccgccagcacgtgatcgagatcctgccacagaatagcctgtcgaagctgccctttggtggtgccgtaaatgttacgggaaaacttttccgcaatatcatcgaaattgcgatcctgcattgctttctccaccggttggctaagacgttttctgataaagacgctattttgtcacagccacggcgagaatgaacccgtctggtgtaatatcgctggcgatcccttgctatatggttaaaaaaggaaccagaaaggatgctttttacactgaaaaaagtgattggcaatatgttgctgccacttccgctgatgttgttaattattggcgctggcctggcgctgctgtggtttagccgttttcaaaaaaccgggaagatttttattagcattgggtggctggcactcttgttattgagtttgcaaccggtagccgaccgcctgctgcgtcccatcgaaagcacctatccgacatggaataattcgcaaaaagtggactatatcgtggtgctcggaggtggttacacctggaacccacagtgggcaccgagctctaatttaatcaataacagtctgccacgcctgaatgaaggtattcgcttatggcgcgaaaatccgggatcaaaactgatcttcacgggaggcgtagcaaaaaccaatacggtgagtacagcggaagtaggtgccagagttgcgcaatcgctgggcgtgccgcgcgagcaaattatcaccctggatttgccaaaagataccgaagaagaagctgcggcagtgaaacaggcgattggtgacgcccctttcctgctggtgacctccgcatcacatctgccgcgggcgatgatcttttttcagcannnnnnnnnntcagcaggaagggttaaatccgctaccagccccggcgaatcagttggccatcgactcgccgcttaatccgtgggaacgggcaatcccttctccggtctggctgatgcatagcgatcgtgttggctatgaaacgcttggccgcatctggcagtggctgaaaggtccgtcaggcgagccacggcaagagtgattttgatgccagatcgaagttgcgccgactaaatcgtccggtattaaccagttgcgcaacttcatcccataacacatacaaccaacgccgccagatgaacgactccgccactggcgcgcgttgcaggtaactccagagcaaatcttccgccagagaattatccattagtcggaacagttcgtattctcgcggtgcccaaagcattagtcccggcccgaccatcgccagtaactgatcgctgcgcgaatctttcagcatgctgcgtaaacagaagttaccgtgaatcaacacacaattgtcgttaaagccttcaaataatgccgggagacattcgcgagtgcgaaacaggatccgcttatcctgcatcgtcagaccggtgttattgaactgattgagcgtggtccatagcacttcaacatgttgccggtaccatgagggccagaaattttcctgagtattgtcgaccgcgccgacgcaaccgcgactgtcctgacggtgccaggccagtaaggcttcaacgatttggtctttgagttgttcccagcgttctggtgttcgggctggtgcctccaccgaaacaccacgcatccgctccagtagcaggacatcggggccggggtgttcttcatgcgtcatcacaccataaatagtcggcatacggacagtcccacttcttgccagcatggtggttttccatgccagttgtcgggcttttccgggcgtactaaagcttcttgccattaacggcattgggtttccctggctgtcatacaaagcccacaacgccgtatccgctttttcattgacgcactcaatacgactgagtttttcgcccagtaaatggcttaattcggcacgcagctgttccattcagattaccctcataaaagctactgctttcataatgagcgccaatataaaagatgtcacctgaatgagataaattgttgaacagaaaaattgaggaaaatcgtaacggtacgacactcctcccaaaattggctgaagtgtcgtgaagtgaaattagcgcatttcagcgcgaacgcgctcgagatcttcaggggtatccacacctgtgccaggaacttcatgcgcaacagcaacatggattttttcgccgtaccacagaacacgaagctgctctaacatttcgatgtgttctaacggacttgcctgccagttgacgtaacgacggataaagcctgcacggtagccataaataccaagatgacgcaggaagttatcgccaacggtttcaaggccttctgcaaaacgatcacgatcccaaggaatggtggcgcgtgagaagtacagtgcatacccttcagcgtcgagaaccactttcaccgcattcgggttaaacgcttcttccgcattgcggattggcaccgccagagtcgccatacccacctgacgctgagcgaggttatcagcaacctgacgaatgattgtcgcagggatcatcggttcatcaccctgcacattaacgatcaccgtgtcgtcgctgaatgcgcatttttcgacaacttccgccagacgttctgttcctgactgatgatcggcgcgcgtcatacatacttcaccgccagcggcttcaacggcgcgggcaacatcctcatgatcggttgccacgatgatgcgctcggcacctgattcacgcgcgcgttcaagaacatgaacaatcatgggtttgccgttaatatcaaccaatggtttaccgggcagacgcgtggacgcgtagcgcgcgggaataatgaccacaaaactcatgatttactctcatcagcagtcagcacgcgggcttccgtttccagcaacactggaatgccatcgcggagcgggaaagccaggttatccagtttgcaaataagctcttgtttttcctggttataccaaagttttccgttgcaaaccgggcaggcaatgatttcaagcaaacgatgatccatagttcctccagatggatcgggttatgaatgcataaatcttatcataatcatttatgcgacggggtctatttcccagccagtgcggcaatcagtaaagagaccttgcgggcagcgtcctaatgtcacccgcgttgcctgctgccagctcgcgaaatcagtaatcgcctgacgtaaccctttttgcagcattgtcgttggtttaatgccttcctgtaaccacagagagataacttcaaggatgcctgtctggcgatgcattttggcatccattcgcccaactaattgcccacgatgtaataatggcagaacaaaatagccatactggcgtttcggcgctggggtatagcactccagccggtagctaaaatcaaaaagctgctctgcgcgtttgcgatcccagacaacaggatcaaaaggcgaaagtaccgcgctgtgcgttgcagtgagctttccggccagcgcacgctcgagtagcggcagcaaatcagcatgcagccaaagattgcccaatttttcaacatgcacagcaatgatttgctgctgttcagccctcgcttcgcgccacgccgccagtgccggacgtttcagccgatagtaatctgccagccactgttcgcggaatattcccaggctacgcgcactgttatccagcatgatgatttctgcttctgtttgcgaaacgagatcgcgctcatcatcccagtcaggcatgacacggtgggttaaatcataaacgcgctggaagttgcgccgttcaatcaccatcacctttccggcagtaaataaaccttccagatgccgtttatgcggcttccattcccaccagccgcttgcacctttacgaggatgctcaaaatcggctgaacgtaccggccccttatcatgaatatgctgaattaactgtgcaatttccgcctcatgttcctgcatccaggcgtctttgtatttccagcccattttttcaggtgccagcatgcggtggcgaataagacgaaagtcgctacgcggcataaagcaggcttcatgcgcccagtattccattaattcgccacgcgccagagactcatccagccactgggcaggataatttcccagacgactgaaaagcaccagatatggactacgggcaacaatattgatggtatcgatttgcagcaaggacatgcgggagatcgttgccggaatatcctccaacgacgctcgacggcggggtttgtttaacaggccttgtgcggcaaggtgaagattacgcgcatcagcaagggagaggtgcggcagcgacattcatgactccatcaatcgaacgctgccgcggcgtaactagttgccagaagccagcgaggttagttgcgtaagcagtttcgctggttcatcacctgaaagctgtgcgtctacaggcaaataccaccaattttcttctgcaaaggcccggcatttcaccgcatctttttcagtcattaccagcgtttgcccggcgcttaccaacgcactgacatccgcatggttcaaagactgatgatcggccagcggtacacatttttccggttgtacgccacacatcttcagcgtggcaaaaaagcgcggcggatgcccaatccccgccatcgccactacatgttcaagctgagcaacgtcacaacgcgtaccggtacgtaaattcaccgcctgacccggcagcagatgcatggggatttcaccgctgcgagggacaccgccgttgacgattaccgcatcaaccgactttaagcgccccgctcgctcacgcattggccccgccggcaaccaccagccattgccaaagcgacgcacaccatcaataacgacaatttccacatcacgcgccagacggtaatgctgtaaaccgtcgtcggttacgatgatctgcacatcagggtgttgcgccagaatggcttttaccgcatcagaacgaacgggagaaaccgcaacaggcgcatcagtgcgttgataaatcaacacaggttcatcacccgcctgtgctgttgtggtatctgccgacaataacagcggataagattcagccttaccaccatatccccgcgatacgacccccacgcgaataccgcgctgttgcaactgttccaccagccagacaacgaccggggtttttccgttgccgcctgcggtgagattaccaaccacgacaaccggtacgggggcacgccaggcgcgcttcagttttagtttatagcaaagacggatcgcgccactcaccaggccatacaaccaggagagtggcagcaatagccgccacaaaggggattcaccagaccagattttttcgatcattggccaaactgcattttgtgaagttgcgcgtaaacgccgcggtgctcaagcaaatcgttatgcgtaccgcgttccacaatgacaccatcctcgacgaccacgatttcgtctgccttttcaatggtagacaagcggtgggcaatcaccagagaggtacggtttttctgcaactcatccagtgccgcctgaatcgcacgttcggattcggtatccagagccgaggtagcttcgtccagaatcagaatcgggctatcacgcaacaaggctcgagcgatagcaatacgctgacgctgaccgccagagagcagcacgccgttttcaccaatcactgtatcgagaccgttatccatcttattgatgaagtccatggcgtaggccatacgcgccgcttcttcaatttgctcacggctgtactgttcagtccgtgcgtaagcaatgttgttagcaaccgtctcgttaaacagatggacattctgcgacaccagagcaacctggttacgtaacgacgccagggtatactcgcgcagatcgtgaccatccatcaggatttcgccttcatcaatatcgtaaaaacgcgtgatcaggctggcgatggttgatttacccgaaccagagcgtccaaccagagcaaccgtcttccctgccggaattttcaggttgatgttacgcaatgcaggtacgtcacgtcccggataagtaaaggtgacattgcggaattccacgtcgccagtcgcacgctcgatcacgcgcttaccttcatctttctcctgctcactgtccagaatggtaaacagcgtctgacaagccgccataccgcgctggaactgggcgttaacgttggtcagcgatttcagcggacgcatcagtgcaatcattgaagagaaaacaacggtaatcgtaccggcagtcaggctatccatgacacttgggaagctcgccgcatacagaacaaacgccagcgccaaagaggcgatcagctgaatgatcggatcagagatggaagaggctgaaaccattttcatcccctgaagacgcattcggttgctgactttatcaaagcgtttcgtttccacttcctgaccaccgaaaatcaatacttctttgtggcccttcagcatttgttcggcgctggtggtcacctgccccatggtgttctgcatgtttttactgatgttgcgaaaacgcttcgatactacgcgaatcgcaatcgaaacaatcggtgccagcacaatcaaaatgatcgacagttgccaactgtaatagaacatcatgatgaacaggccgatgattgacgcaccttcacgcacaaccgttatcagtgcgccggaagaagaagaagcaacctgttcggaatcgtaggtgatacgtgacaacagcgtccccgttgactgtttgtcaaaaaatgaaaccggcattcccatcatgtgaccaaacaggcggcgacgcatggtcattaccacctttcctgatacccaggagatacagtagctggagacatagctggtgataccacgtaaaatcatcagcccgatcaccaccagcggcatccacaccagcacggagcgatctgttttaccaaagccatcatcaagaagtggcttaaggagcgataacatgaaggtatcgctggctgcgttgaggattaacgctacgcccgccacgatcagacccgctttaaaaggcgcaatggttggccacagtcggcggaacgtctgccacgtagagagatctttgtcgttatgcattcaaaaaaccagcatttgttgaaatagccgcatattctacccgttatccactggcacgccaaaccactgatgataccaacgaggtaaaatttgctctctgaggctgctaatccgccagccttgcgctgaaaaattgaccgtcacttgaccctgatgtggagtatcaagccattgatatccttgctgttgatagcgatgcttaactttattagagggcaatcgccatgcgttatagcgcgatgccgatgcgagtgccacttttccattcactcgctgaattaatggcaacgatgatgaggtattactgccatggtgaggtacctgaagcaatgttgtctgcacttgctgccagtaacggcttagcatcttttgttcagcggggacttcaatatcaccggttagaagaatgctattcgtcccgtcatcaaccttaaccacacaggaatggttatttcctttatcgttgctagcttgtaaaggccagtgcacgctgaaacgcaatccttgccattgccacgcttcgccacgcacacagggctgatgatgttcccagtttaacggacttctgatccataacatcggccatgtgtgcaatattgagtccagccctccccggtgatccagatgttcatgactcagaataacgccttccggttcaagattatgccagtggagccaggggataatcagttgttgcccactatccccttcgggccaggccagtcctgtgtcatagagaatcgctttgccgtttctggctatcaccattgccagcccttgcccgacatcaagcatgtacagctgccactcgtcaggtcgaggtttttgccacagcggccagcacatcagcaagcctccagccacacacattgctggcaacgttcgccaggcgtttaatcgccataccaccagtaagaaccatggggaaaatgatagccattgccaacattcagcaatgttgatccacccttccggcaaactctttaacccccagaaaagtaaagccaaagaccggtcggcaagaaaccataacccttgctccaggattaacggcccgcttaaatgcacaaccatcgcggcgaggatcaacggaaccgtgataaatgtcaccaggggaattgctaatagatttgcaataaacgaggtcagactaatgccatgaaatatgacgatttgcacgggcataagcagaagtgtgattcccagttgcagatggatgagggaaacaactgcacgcaataccggcggcagttgccactcaggacagggaaaccactgataccaaaatatcaatgccgcgaccgcagcggcagagagccataaactttgcgagagaatggcaacaggatccatcagcaaaattgccgccagacaacatatccatacatcccagccactccactgtcgcccacttaacttaagcattccccacgtagcaagcgccacaacggtacgcaatgcaggaggttgcattcccgtcagccaggcataaaaagcagcacagcagattccgccaattaatggcatttgccagtggatccagcgcccaggcagaaaaatttgtccactgcgaatgagtccggcagccagcaacgccgcaaaagcgatgtgcaatcccgatatcgccattaaatgcgccgttccagtatcacgcatgatatttttgatttctttagggacagataaccgttcccccatacctaaaccaagaataaccgcattccacggatagggttgcagcgttgtttgtagtgacgccagatactgtgcacgcaggctacaattcggttcaataacacttgcctgcagaaagcggccggtgagcggctgatgctgggcaatggcataacgctggctatcaaagccgccatcattaagttgaccatgaacggcacgaactttgagtttcattgaccacagttgtccggcacaaaccgcttgcggaagatattcgccatacagcacaaggcttggcgcagggaatatacgtcgaccttgtagatgagtaatttgaccgtaatgagtggtcataccgtcagtagcagtgatctcaacaattgcatcctgcgtcgcgccagttaaggtttctcctgcccacaaaatttgctttgctgctaatatgccccaaacgaaaaacaacaacgtcagcgcgatataacggacggttttaacagggataaatgccagtacgcaggcgaagagagtcagaaacgcaagggttaatgtcccaggcaattggggcaaaatcagcaacggaaaaattccgcaaattatgcatacgccgactgtcgttattttcatgcacccctccctgtttatggaaagtgtgcaactttgttgagcggttgtctggtgggaattttgcgttccccgaggcacgttcagaagaatttaacgagagggtgaaaactgctcaaaactctgcgaggcagcttccagttcctgattagagaaatgaaaaaagcacccgacaggtgcttttctcgcgttcaagtttgagtaaaaacttaaccgtaaatattggcgcgatcgcgcagttctttacctggtttaaagtgaggaacgtattttccttccagttctactttatcgccagtcttcggattacgtccggtacgtggtgcgcggtagtgcaaagagaaactgccgaaaccgcggatttcaatacgctcgccctgcgcaagagtcgaggccatatgctccagcatctcttttactgcatcttcaaccgtcttggcgggaatgtgcgattgctgggtggcaagtctttctatcaattctgacttggtcatgattcctccggttccttaaaggcaaattaagcggctgctgttgctgcattgattaagggcggccgtagccgcccttagtgcttgattacaggacgaaacctgcaatctgtcaagtaaactcaacaaacttcggaataaaaatcccgaagagtcagagaattactcgcctttagctgctttgaaagcttcagccattgcgttgttggagaagtttgcatcttcctgtttgttaacagttgcgattgcatctttctcgtcagcttcgtctttcgcacgaacagacaggctgattgcgcggtttttacgatcaacgccggtgaatttagcttcaacttcgtcgccaacgctcagaaccagggtagcgtcttcaacgcggtcacgggatgcttcagaagcacgcaggtaaccttcaacgccgtcagccagttctacggttgcgcctttagcgtcaactgcagttactttaccggttacgatagcgcctttcttgttcagagcaacccagttgttgaacggatcttctgcgagctgtttaacgcccagggagatacgttcacgttctgcgtcaacctgcagaacaactgcagcgatttcgtcgccttttttgtattcacgaactgcttcttcgcctgcaacgttccaggagatgtcagacaggtgaaccaggccgtcgatgccgccgtccaggccgatgaagataccgaagtcagtgatagacttgattttaccttcaacacggtcgcccttgttgtgggtttccgcgaactgctgccacgggttagctttgcactgtttcagacccagggagatacgacgacgttcttcgtcgatatccagaaccataacttccactacatcgccaacgttaacaactttggacgggtggatgtttttgttggtccaatccatttcggaaacgtgtaccaggccttcaacgccttcttcgatttcaacgaagcagccgtagtcggtcaggttggtcacgcgaccagtcagtttggtaccttccggataacgtttagcgatagctacccacggatcttcgcccagctgtttcaggcccagggatacacgggtacgttcgcggtcgaacttcagcactttaacagtgatttcgtcgcccacgttgacgatttcgctcggatgcttaacgcgtttccaggccatgtcagtgatgtgcagcaggccgtcaacgccgcccagatcaacgaatgcaccgtagtcagtgaggttcttaacgatacctttaacttccatgccttcctgcaggttttccagcagctgatcgcgctctgcgctgttttcggattcgataacggcacgacgagaaacaacaacgttgttgcgcttctgatccagcttgattactttaaattcaagctctttgccttccaggtgcagagtgtcacgcaccggacgaacgtctaccagagaacctggcaggaacgcacgaataccgttcagctcaacagtgaagccgcccttaactttgccgttgataacaccggtaacagtttcagcatcttcgtaagctttttccagcgtgatccaggcttcgtgacgtttagctttctcacgggacagcagagtttcaccgaagccgtcttctannnnnnnnnncttctactgcgtccagagcaacgtcaacttcgtcacctacctggatttccagctcgccctgggcgtttttgaactgctcagccgggatggcggactcagatttcagaccagcgtcaaccagtactacgtctttgtcgatagcaacaacaacgccacgaacgatagaacccgggcgggtttcgatttcttttaaggactcttcaaagagttgagcaaaagattcagtcatgtttaatcttcaggtttatatttaacgtccacctggctccatgccggatggggttgtttaacatacccgctgtcattccattgcaacgggggtactgcaaattcggtcgcttatgcgagagccaatttctggcgcgcgtattgtagcgctttttcaatcacttgctcaatgcttaaggtggtggaatccaacactaaagcatcggctgccggaaccagtggcgctaccgctcggttacgatcgcggtcgtcgcgttctttgatctcggccaaaaggcgctcaaagttaacactaaagcccttctcctgcaactgtagcatgcggcgatgcgcacgttcttccgaggaggcgtcaaggaaaattttcactggcgcatcagggaataccaccgttcccatgtcgcggccatcggcaatcaggcctggtaattcgcgaaacgcgcgttggcgacgcaataatgcttcacgaacgcgtgggaatgccgcgacttgtgaagctgcattcgccacttcctgagtacgaatttcgccgctgacatcttccccttcgaggatcacttccagattgccattggttgacacaaaacgtacatccagatgggatgccagcggtaccagcgcatcttctgacgcaacatcaacatggtgatgtaatgccgccaatgccagtacgcgataaattgcacccgaatccagcagatgccattgcaatgcttccgccatagccttacacaaggtgcctttccctgcaccgcttgggccatcaatggtaataaccggggcaattgccgtcatctttatctccttaaaacaggcgtaccgttaacataaccgcgcgcattatacgcgccgacgccacaaatcgttaacgttgtgtgcaaaaaccagttttgtctgtattcagatggggatttattgcgcaattatagcgggc

SEQ ID NO: 192 - DNA, 37473 bp, Escherichia coli
  source 1..37473: mol_type = genomic DNA
tgcatgtggaaaaatggcttcgcgaaatgtcgtctattccggagacagacgcgcccattaagcaggcgcttgcgcatggattattattacacttaaaaaatatctaccctgtttttcctgaatcactggtgatgttattgctctctgttctggacgtaaaaacatacagagatgacgcacgattaaatgaatggatatcgaatagagtgcaggaattaggtgacagatattatcctgtaaataagcacgttaaaatccgctacactctttagttcagaaagggttccacctgcaagttgttattccaccagagagtgaatcgcaaagcaggtaatcatttcatctgtatatccgtatgctaaatggcattccaccgccttttcgccgatattttgttgtgatcagcgacgcttcgcttaaaaaagcaccagcagtggtttcgcagctatgtggtgtataaaaaatgatctcatgcagatgttttgtgaatgtgtgggttgacattcatatgaaaaaaatcataattccatcatgtttgtatggggtcttttctgtaccttacgcatcgcactcaagcctgacagaaaatatgctgtaaggctcatatcaaaaaccgccattagctcatcaggaagnnnnnnnnnnacaaccaggattgttgtatggtacggggttcgaggcctcgatggcggtccaacttttcaaaactcttctgaatcagatccccttattatcatccctgcaaagtggaacattgccattgtttggctattcaggacgggtcagaccaatgaaaaaagcccacacaggggagagtgggctgaaatgggaagctaaagactcaagtaaacttatcggaaataaggaccacgcattacgggggctatcatcgccgatggtcgggattcggcaaatcaggttgattacgtagagagtaaattatctgctcaccgctgcgtcaccccttcgtaaatcaggcgtagcgcgaatacaccaataattgcaccaataacccgactggcaacgcgttgcatacgcccataagcacgacgcacagcgggcaaagaaaacgcctgactaagaaaaactcgccagataattgatgcgagcacaatccccgcccaggccattaaacgtgcccatgttggtgtttcggcatttaatgttactgagaaaatactgataaaaaataaaacggtttgcgggttagagagatcggtaattaatccgcggcgaaaaaagacataccagggggcgctaatcggttgttgtagtgtgctcatttgcggtgttgactggcggcgcatgctgcaccacgcaaaccataagagataagcgccgccgacgattctgataagcgaaaaaatctcctcacactgcgtaattagcgttgcaagaccaaacaaacccaacccggaataaaatgcattgcccagcgccacgcccagtccggtcagcacccctgcgcgtcgaccggaagccaggctggtttgtactaccacaaagagattggctcccggattaaaaaaagtaatcacgaacagtcctacggtcaggtaaacggcgtgcaaaggatccatagtgatttcatccataaataagtgaagtaacttcatcatatttctaccaaaaataatcgggtgcgagagagatcacaaagtgtcttatttccggttactggcgtttatgccctgactgaactaattattaatcaacccaataatgtgggtggatgatagtgtgataacaactctggagccgtaatatgaaaataatctctaaaatgttagtcggtgcgttagcgttagccgttaccaatgtctatgccgctgaattgatgaccaaagcggaatttgaaaaagttgaatcgcagtatgaaaaaataggtgatatttcaaccagcaatgaaatgtcgactgcagatgcaaaagaagatttgatcaaaaaagcggatgaaaaaggggctgatgtgttggtactgacctccggtcaaactgacaataagatccacggcacggcaaatatttataagaagaagtaattctgaaccctatgtaaacatgcccgatgcgtaagtttatcggtgatcatctattgaaatttatgccggataaagcgttcgcgctgcattcggcagttcagcttttcagccgccgccagaacgtcgtccggctgatgcctaaataattcgccgctgctgttttatcgccattaaatttctccagtgcctgttgtggtgtcagtaagcgtggagcgggagttttcgccgactcgcgcgccagttccggcagtagcagctgcaaaaattgcggcgttaaatccggcgtcggttccacacttaaaaatagcgccagtcgctccatcatattgcgcagttcacgaatattacctggccagtcgtagtgcaccagcacggtttcgcttgcctgtaatccctggcgtaatgcggcagaaaacggggcggagagcgccgccagagacactttcaaaaagctttccgccagcggaagaatatccgccacccgctcgcgcagtggtggcaattgcagacgcaaaatactcagccgataaaacagatcacggcgaaaacgtccttgctgcatatcttcttccagcttgcagtgagtggcgctaatgacccgtacatctaccggaacaggctgatgcccgccgacgcgggtgacctctttttcttccagcacccgtaacaggcgagtctgcaaaggtagcggcatttcgccaatctcatccagaaacagcgtaccgccgtgggcaatttcgaacagcccggcgcgacctccgcgtcgcgagccggtaaacgccccttcctcatagccaaacagctccgcttccagcagcgattcggctatcgccccgcagttgacggcaacaaacggatgcgactttttgccctgtcgcgcatcgtggcgggcaaaatattcccgatgaatcgcctgggccgccagctctttgcccgtccccgtttccccctcaatcaacaccgctgcactggagcgggcatacagcaaaatagtctgccgtacttgttccatctgtggtgattgaccgagcatatcgcccagcacgtaacgagttctcagggcgttgcgggtggcatcgtgagtgttatggcgtaacgacatgcgcgtcatatccagcgcatcgctgaacgcctggcgcacggtggcggcggaatagataaaaattccggtcattccggcttcttctgccagatcggtaatcagccccgcgccgaccaccgcttcagtgccgttagctttcagctcgttaatctgcccgcgggcgtcttcttcggtaatgtagctacgttgatcgaggcgcagattaaaggttttttgaaacgccaccagcgctggaatggtttcctgataggtgacaacgccgatagaagaggtgagttttccggcttttgccagtgcctgtaacacatcgtagccgctcggtttaatcaaaataactggcactgacaggcggcttttcaggtacgcgccgttagagccagcagcgatgatggcgtcacagcgttcgtttgccagtttcttgcggatgtaggtcactgctttttcaaagccaagctgaataggggtaatgttcgccaggtgatcaaactcgaggctgatatcgcgaaacagctcgaacaggcgcgttacagataccgtccagataaccggtttgtcgtcattaagccgtggtggatgtgccatagcgcaccgcaaagttaagaaaccgaatattgggtttagtcttgtttcataattgttgcaatgaaacgcggtgaaacattgcctgaaacgttaactgaaacgcatatttgcggattagttcatgacgttatctctaacaaattgaaattaaacatttaattttattaaggcaattgtggcacaccccttgctttgttttattaacgaaaataacaagttgataacaaaggatgggctatgtctctacactctccaggtaaagcgtttcgcgctgcactgactaaagaaaatccattgcagattgttggcaccatcaacgctaatcatgcgctgttggcgcagcgtgccggatatcaggcaatttatctctccggcggtggcgtggcggcagggtcgctggggctgcccgatctcggtatttctacccttgatgatgtgctgacagatattcgccgtatcaccgacgtttgttcgctgccactgctggtggatgcggatatcggttttggttcttcggcctttaacgtggcgcgtacggtgaaatcgatgattaaagccggtgcggcaggattgcatattgaagatcaggttggtgcgaaacgctgcggtcatcgcccgaacaaagcgatcgtctcgaaagaggagatggtggatcggatccgcgcggcggtggatgcgaaaaccgatcctgattttgtgatcatggcgcgcaccgatgcgctggcggtagaggggctggatgcggcgatcgagcgtgcacaggcctatgttgaagcgggtgccgagatgttgttcccggaggcgattaccgaactcgccatgtaccgccagtttgccgatgcggtgcaggtgccgatcctcgccaacattaccgaatttggcgcaacaccgctgtttaccaccgacgaattacgcagcgcccatgtcgcaatggcgctgtacccactttcagcgttccgcgccatgaaccgcgccgctgagcatgtctacaacgtcctgcgccaggaaggcacgcagaaaagcgtcatcgataccatgcaaacccgcaacgagctgtacgaaagcatcaactactaccagtacgaagcgaagctcgacgacctgtttgcccgtagccaggtgaaataaaacacaacgaaaaatatctcgaccctacaaatgacgaggacaacatgagcgacacaacgatcctgcaaaacagtacccatgtcattaaaccgaaaaaatctgtggcactttctggcgttccggcgggcaatacggcgctctgcaccgtgggtaaaagcggcaatgacctgcattaccgcggctacgatattcttgatctggcggaacattgcgaatttgaagaagtggcgcatctgctgatccacggcaaactgccgacccgtgacgaactcgccgcttacaaaacgaaactgaaagccctgcgcggtttaccggctaacgtgcgtaccgtgctggaagccttaccggcggcgtcacacccgatggatgttatgcgcaccggcgtttccgcgctcggctgcacgctgccagaaaaagagggacataccgtctctggcgcgcgggatattgccgacaaactactggcatcacttagctcgattctcctttattggtatcactacagtcacaacggcgaacgcatccagccggaaaccgatgacgactccatcggtggtcacttcctgcatctgctgcacggcgaaaagccatcgcaaagctgggaaaaggcgatgcatatttcgctagtgctgtacgccgaacacgagtttaacgcctccacctttaccagtcgggtgattgcgggcactggctctgatatgtattccgcgattattggcgcgattggcgcactgcgcgggccgaaacacggcggagcgaatgaagtgtcgctggagatccagcaacgctacgaaacgccggacgaagccgaagccgatatccgcaagcgggtggaaaacaaagaagtggtcattggttttggtcatccggtttataccatcgccgacccgcgccaccaggtgatcaaacgtgtggcgaagcagctctcgcaggaaggcggctcgttgaagatgtacaacatcgccgatcgcctggaaacggtgatgtgggagagcaaaaagatgttccccaatctcgactggttctctgctgtttcctacaacatgatgggcgttcccaccgagatgttcacaccactgtttgtcatcgcccgtgtcaccggctgggcggcgcacatcattgaacaacgtcaggacaacaaaattatccgtccttccgccaattatgttggaccggaagaccgccagtttgtcgcgctggataagcgccagtaaacctctacgaataacaataaggaaacgtacccaatgtcagctcaaatcaacaacatccgcccggaatttgatcgtgaaatcgttgatatcgtcgattacgtgatgaactacgaaatcagctctaaagtggcctacgacaccgcacattactgcctgctcgacacgctcggctgcggtcttgaagctctcgaatacccggcctgtaaaaaactgctggggccaattgttcctggcaccgtcgtacccaacggcgtgcgcgtccccggaactcagtttcagctcgaccccgtccaggcggcatttaacattggcgcgatgatccgctggctcgatttcaacgatacctggctggcggcggagtgggggcatccttccgacaacctcggcggcattctggcaacggcagactggctttcgcgcaacgcggtcgccagcggcaaagcgccgttgaccatgaaacaggtgctgaccgcaatgatcaaagcccatgaaattcagggctgcatcgcgctggaaaactcctttaaccgcgtcggcctcgaccacgttctgttagtgaaagtggcttccaccgccgtggtcgccgaaatgctcggcctgacccgcgaggaaattctcaacgccgtttcgctggcgtgggtggacggtcagtcgctgcgcacctatcgccatgcgccgaacaccggcacgcgtaaatcctgggcggcgggcgatgccacttcccgcgcggtacgtctggcactgatggcgaaaacgggcgaaatgggttacccgtcagccctgaccgcgccggtatggggcttctacgacgtctcctttaaaggtgaatcgttccgcttccagcgtccgtacggttcttacgtcatggagaatgtgctgttcaaaatctccttcccggcggagttccactcccagacggcagttgaagcggcgatgacgctctatgaacagatgcaggcagcaggcaagacggcggcggatatcgaaaaagtgaccattcgcacccacgaagcctgtattcgcatcatcgacaaaaaggggccgctcaataacccggctgaccgcgaccactgcattcagtacatggtggcgatcccgctgttattcgggcgcttaacggcggcagattacgaggacaacgttgcgcaagataaacgcatcgacgccctgcgcgagaagatcaattgctttgaagatccggcatttaccgctgactaccacgacccggaaaaacgcgccatcgccaatgccattacccttgagttcaccgacggcacacgatttgaagaagtggtggtggagtaccccattggtcatgctcgccgccgtcaggatggtattccgaaactggtcgataaattcaaaatcaatctcgcgcgccagttcccgactcgccaacagcagcgcattctggaggtttctctcgacagaactcgcctggaacagatgccggtcaatgagtatctcgacctgtacgtcatttaagtaaacggcggtaaggcgtaagttcaacaggagagcattatgtcttttagcgaattttatcagcgttcgattaacgaaccggagcagttctgggccgagcaggcccggcgtattgactggcagacgccctttacgcaaacgctcgaccacagcaatccgccgtttgcccgttggttttgtgaaggccgaaccaatttgtgccacaacgctatcgaccgctggctggagaaacagccagaggcactggcattgattgccgtctcttcggaaacagaagaagagcgcacctttacctttcgccagctgcatgacgaagtgaacgcggtggcctcaatgttgcgctcactgggcgtgcagcgcggcgatcgggtgctggtgtatatgccgatgattgccgaagcgcatattactctgctggcctgcgcgcgcattggtgctattcattcggtggtatttggtggttttgcctcgcacagcgtggcggcgcgaattgatgacgctaaaccggtgctgattgtctcggctgatgccggagcgcgcggtggcaaaatcattccctataaaaaattgctcgacgatgcgataagtcaggcgcagcaccagccacgccatgttttgctggtggatcgcgggctggcgaaaatggcgcgcgtcagcgggcgggatgtcgatttcgcgtcgttgcgccatcaacacatcggcgcgcgggtaccggtggcgtggctggaatccaacgaaacctcctgcattctctacacttccggcacgaccggcaaacctaaaggcgtgcagcgtgacgtcggcggatatgcggtggcgctggcgacctcgatggacaccatttttggcggcaaagcgggcagcgtgttcttttgcgcatcggatatcggctgggtggtggggcattcgtatatcgtttacgcgccgctgctggcggggatggcgactatcgtttacgaaggattgccgacctggccggactgcggcgtgtggtggaaaatcgtcgagaaatatcaggttagccggatgttctcagcgccgaccgccattcgcgtgctgaaaaaattccctaccgctgaaattcgcaaacacgatctctcgtcgctggaagtgctctatctggctggagaaccgctggacgagccgaccgccagttgggtgagcaatacgctggatgtgccggtcatcgacaactactggcagaccgaatccggctggccgattatggcgattgctcgcggtctggacgacaggccgacgcgtctgggaagccccggcgtgccgatgtatggctataacgtgcagttgcttaatgaagtcaccggcgaaccgtgtggcgtcaacgagaaagggatgctggtggtggaagggccgctgccgccgggctgtattcagaccatctggggcgacgacgaccgctttgtgaagacttactggtcgctgttttcccgcccggtgtacgccacctttgactggggcatccgtgacgctgacggttatcactttattctcgggcgcactgacgatgtaattaacgttgccgggcatcgtctgggcacgcgcgagattgaagagagtatctccagccatccgggcgttgccgaagtggcggtggttggggtgaaagatgcgctgaaagggcaggtggcggtggcgtttgtcattccgaaagagagcgatagtctggaagatcgtgatgtggcgcattcgcaagagaaggcgattatggcgctggtggacagccagattggcaactttggtcgcccggcgcacgtctggtttgtctcgcaattgccgaaaacgcgatccggaaaaatgctgcgccgcacgatccaggcaatttgcgaaggacgcgatcctggggatctgacgaccattgatgatcctgcgtcattggatcagatccgccaggcgatggaagagtaaggtattgtcggatgcgtcgcgtggcgcatccgacaccatgcgccgatgcctgatgcgacgcttaccgcgtcttattatgcctacccactgtttttacaccgataatttttcccccacctttttgcactcattcatataaaaaatatatttccccacgaaaacgattgctttttatcttcagatgaatagaatgcggcggattttttgggtttcaaacagcaaaaagggggaatttcgtgtcgcaagataacaactttagccaggggccagtcccgcagtcggcgcggaaaggggtattggcattgacgttcgtcatgctgggattaaccttcttttccgccagtatgtggaccggcggcactctcggaaccggtcttagctatcatgatttcttcctcgcagttctcatcggtaatcttctcctcggtatttacacttcatttctcggttacattggcgcaaaaaccggcctgaccactcatcttcttgctcgcttctcgtttggtgttaaaggctcatggctgccttcactgctactgggcggaactcaggttggctggtttggcgttggcgtggcgatgtttgctattccggtgggcaaggcaaccgggctggatattaatttgctgattgccgtttccggtttactgatgaccgtcaccgtcttctttggcatttcggcgctgacagttctttcggtgattgcggttccggctattgcctgccttggcggttattccgtgtggctggccgttaacggcatgggcggcctggacgccttaaaagcggtcgttcccgcacaaccgttagatttcaatgtcgcgctggcgctggttgtggggtcatttatcagtgcgggtacgctcaccgctgactttgtccggtttggtcgcaatgccaaactggcggtgctggtggcgatggtggcctttttcctcggcaactcgttgatgtttattttcggtgcagcgggcgctgcggcactggggatggcagatatctctgatgtgatgattgctcagggactgctgctgcccgcgattgtggtgctggggctgaatatctggaccaccaacgataacgcactctatgcgtcgggtttaggtttcgccaacattaccggtatgtcgagcaaaaccctttcggtaatcaacggtattatcggtacggtctgcgcattatggctgtataacaattttgtcggctggttgaccttcctttcggcagctattcctccggtagggggcgtgatcatcgccgactatctgatgaaccgtcgccgctatgagcactttgcgaccacgcgtatgatgagtgtcaattgggtggcgattctggcggtcgcgctggggattgccgcaggccactggttaccgggaattgttccggtcaacgcggtattaggtggcgcgctgagctatctgatccttaacccgattttgaatcgtaaaacgacagcagcaatgacgcatgtggaggttaacagtgtcgaataacgctttacaaacaattattaacgcccggttaccaggcaaagaggggctgtggcagattcatctgcaggacggaaaaatcagcgccattgatgcgcaatccggcgtgatgcccataactgaaaacagcctggatgccgaacaaggtttagttataccgccgtttgtggagccgcatattcacctggacaccacgcaaaccgccggacaaccgaactggaatcagtccggcacgctgtttgaaggcattgaacgctgggccgagcgcaaagcgttattaacccatgacgatgtgaaacaacgcgcctggcaaacgctgaaatggcagattgccaacggcattcagcatgtgcgtacccatgtcgatgtttcggatgcaacgctaactgcgctgaaagcaatgctggaagtgaagcaggaagtcgcgccgtggattgatctgcaaattgtcgccttccctcaggaagggattttgtcgtatcccaacggtgaagcgttgctggaagaggcgttacgcttaggggcagatgtagtgggggcgattccgcattttgaatttacccgtgaatacggcgtggagtcgctgcataaaaccttcgccctggcgcaaaaatacgaccgtctcatcgacgttcactgtgatgagatcgatgacgagcagtcgcgctttgtcgaaaccgttgctgccctggcgcaccgtgaaggcatgggcgcgcgagtcaccgccagccacaccacggcaatgcactcctataacggggcgtatacctcacgcctgttccgcttgctgaaaatgtccggtattaactttgtcgccaacccgctggtcaatattcatctgcaaggacgtttcgatacgtatccaaaacgtcgcggcatcacgcgcgttaaagagatgctggagtccggcattaacgtctgctttggtcacgatgatgtcttcgatccgtggtatccgctgggaacggcgaatatgctgcaagtgctgcatatggggctgcatgtttgccagttgatgggctacgggcagattaacgatggcctgaatttaatcacccaccacagtgccagaacattgaatttgcaggattacggcattgccgccggaaacagcgcaaacctgattatcctgccggctgaaaatggatttgatgcgctgcgccgtcaggttccggtacgttattcggtacgtggcggcaaggtgattgccagtacacaaccggcacaaaccaccgtatatctggagcagccagaagccatcgattacaaacggtaatttcctctgtgttgaagagccactgacctgtgtcagtggctaccgtgattcattctcgccaacatccgcacattcctccaacgccatgtgcaaaaatgccttcgcggcggctgtctgccagctatttttccgccgcaacaaaaccgccgttctctccagtagtggcggggcaagagaaatcgctttaagcccgtcatgttgtgtggcaatcgctgctggtaacaatgtggaaagggaagtgcggcgaatcagctccagaaccgcgctaattgagttcgcctcaatgaccacctgtggatgtagccccgctttctcgcagtagtggtcaatttgctctctggtggcaaattccgcgctgagcaggaccagtttttcatcatgcaagcgactcaacgccacctgttcacaggcagccagcggatgatgttgcgccacgactaacgctaaactttctgtcagtaaaggaattgcctccagctccggcgaatgcacaggcgcgaaggcaatcccaacgtccagctcgtcgcgacaaagcagatcttcgattttctcctgcgacatttcctgtagctggagcgtgatgccggggtagcgcgcatagaaatccgccattaaagggccgataaagtagcttgtaaaggtgggggtgacggcgatacgcagcgatcctcgcgtcagatcggcaacatcatgaatcgcccgtttacccgctcccagttcctgtaacgcccggctggcgtactgtcgccagacttctcctgcatcggtgagacgaatcgttcgcccgctacggtcaaacagcggcacgcctaaactctcctctaactggcgaatctgctgggaaagcgcaggctgagagacgtgcaacgcactggcggcacgggtgaagctgccatgttcagccacggcaagaaaataattgatatgtcgagagagcattcgccaacctataagtaaatccaatagaactcatcataaatgagacttttaccttatgacaatcggcgagtagtctgcctctcattccagagacagacagaggttaacggtgaaagagattattgatggattccttaaattccagcgcgaggcatttccgaagcgggaagccttgtttaaacagctggcgacacagcaaagcccgcgcacactttttatctcctgctccgacagccgtctggtccctgagctggtgacgcaacgtgagcctggcgatctgttcgttattcgcaacgcgggcaatatcgtcccttcctacgggccggaacccggtggcgtttctgcttcggtggagtatgccgtcgctgcgcttcgggtatctgacattgtgatttgcggtcattccaactgtggcgcgatgaccgccattgccagctgtcagtgcatggaccatatgcctgccgtctcccactggctgcgttatgccgattcagcccgcgtcgttaatgaggcgcgcccgcattccgatttaccgtcaaaagctgcggcgatggtacgtgaaaacgtcattgctcagttggctaatttgcaaactcatccatcggtgcgcctggcgctcgaagaggggcggatcgccctgcacggctgggtctacgacattgaaagcggcagcatcgcagcgtttgacggcgcaacccgccagtttgtgccactggcagctaatccgcgcgtttgtgccataccgctacgccaaccgaccgcagcgtaaccttatttttaaaccatcaggagatgcaccatgattcagtcgcaaattaaccgcaatattcgtcttgatcttgccgatgccattttgctcagcaaagctaaaaaagatctctcatttgccgagattgccgacggtaccggtctggcagaagccttcgtaaccgcggctttgctggggcagcaggcgcttcctgccgacgccgcccgcctggtcggagcgaagctggatctcgacgaagacgccattctactgttgcagatgattccactgcgtggctgcattgatgaccgtattccaaccgacccaacgatgtatcgtttctatgaaatgttgcaggtgtacggcacaaccctgaaagcgttggttcatgagaagtttggcgatggcattatcagcgcgattaacttcaaactcgacgttaagaaagtggcggacccggaaggtggcgaacgtgcggtcatcaccttagatggtaaatatctgccgaccaaaccgttctgacagccatgcgcaaccatcaaaagacgttcacgatactgctggttctggtgctgattggtcttaatatgcgaccactgctcacctccgtcgggccactgctaccgcaattgcgccaggcgagcggaatgagctttagcgtggctgccctgttgaccgctctgccggtggttaccatgggnnnnnnnnnngctggccggaagctggcttcatcagcatgtcagcgaacgtcgcagcgtcgccatcagtttgttgctgattgccgtcggtgcattgatgcgtgagctttacccccaaagtgcgctgctgcttagcagcgcactgctcggtggggtggggatcggcatcatccaggcggtgatgccttcggtgattaaacggcggtttcagcagcgcacgccactggtgatggggctatggtccgcggctctgatgggcggcggtgggcttggtgccgccctgacaccctggttagttcaacatagcgaaacctggtatcaaacactcgcctggtgggcgctgcctgccgttgttgcgctctttgcctggtggtggcaaagcacccgcgaggtcgcctcttcccacaagacaacaaccactccggttcgcgtggttttcactcctcgcgcgtggacgctgggtgtttactttggtctgattaacggtggttacgccagcctgattgcctggttacccgccttctatattgagattggtgccagcgcgcagtacagcggttccttgctggcattgatgacgcttgggcaagccgcaggagctttgctgatgcctgctatggctcgccatcaggatcggcgcaaactgttaatgctggcgctggtgttacaactggtggggttctgcggctttatctggttgccgctgcaattgccggtcttgtgggcgatggtgtgtgggttaggtctgggcggcgcgtttccgctctgtttgctgctggcgctcgatcactctgtgcaaccggctattgctggcaagctggtggcgtttatgcagggaatcggttttatcatcgccgggcttgccccgtggttttctggcgtgctgcgtagtatcagcggcaattacctgatggactgggcatttcatgcgctgtgcgtcgttgggctgatgattataaccctgcgttttgcaccagcacgttttccgcagctgtgggtcaaagaggcatgatgcgacgcttgttcctgcgctttgttcatgccggatacggctaatgtagatcgctgaacttgtaggcctgataagcgcagcgtatcaggcaatttttataatttaaactgacgattcaactttataatctttgaaataatattgcttatcccggtcgtttatttcgcgaataacccgacaaggaacgccagccgccacgacgtttggtggaatgtcttttgtgacgatactacccgcgccaataacagaattatccccgatggtgacgcctggattaataaccacatgacttccgatccagacgttattgccaatcgttatcggaaaagagtacatctcgccgttttttctcaattcatggtgtacagggtgtcccgtaacggaaagagtaacgttgggtgcaatcagtacgttatcaccgattgttaccgtgtagtcatcgacaatggttaaattgaaatttgcataaaaattgcggcctatatggatgttggaaccgtaagagaaatagacaggtggttctacccaggcgttttcccctaccgtggcaaacatttctttaagcaggctttcccttttttcaacttctgatggatgcgagtgattaaactcatacattaacgttttcccacgaagtcttttttcaggtaagccttcgcacatatcggtaaatagcttgcctgcttttattctttctgtcatcgacatgttcattgcgatcattccgtcctgatatgttggtcggataaggcgctcgcgccgcatccgacattgattgcttaagcgacttcattcacctgacgacgcagtagagaaagcgggccggggccgctaagcgtgaacacggaaattaaggtgaagcccagcgccaccagacccagcaccagataagcgccctggaaaccgatgctttcatacatattgcccgccagtacagacataaaaatcatcgccagttgcttaaagaagcagaaacagaccagataaatcgtcgctgaaaaacgcacttcaaactggctggtaatatatttaaagcagcccaccagcaggaacggtacttcaaacatatgcagcgttttcagaataactacttccagcgctgaggtggcgaacgatgagccaataatacgtacagacataatagtgccagccagcagcagggcatttttcccaccgatgcgattaatgatcagtggcgcaaagaacataatcgaggcgttaagtaattcgcccattgtcgttacgtagccaaatacccgcgtaccctgttcaccggtagcaaagaacgaagtaaagaaattagcaaactgttggtcaaaaacatcgtaggtgcaggaaacgccaataacatacagtgacaaaaaccacagttttggctgtctgaacagttccagcgccagcttaaggctaaatgccgaatggttggcacctaccgcattggcaaccgtggcagaagagggcgcatccgttttggcgaaaaagagtaaaacggcgaggatgagtgcacagccagagcccagccagaaaacaaactgattattgacggtgaacatgatgccgacaatcgaggcacacagcgcccagccaacacagccaaacatccgcgcgcgaccaaattcgaaattactgcgacggctgactttctcaataaatgcctctactgctggcgcaccggcgttaaaacaaaagcctagataaataccaccaacaatcgatcctactaaaatgttgtattgtaacagtggcccgaagataaaaataaagaacggcgcaaacattactaacatgccggtaataatccacagcaggtatttgcgcagcccgagtttgtcagaaagcagaccaaacagcggttggaataatagcgagaacagagaaatagcggcaaaaataatacccgtatcacttttgctgatatggttgatgtcatgtagccaaatcgggaaaaacgggaagtaggctcccatgataaaaaagtaaaagaaaaagaataaaccgaacatccaaaagtttgtgttttttaaatagtacataatggatttccttacgcgaaatacgggcagacatggcctgcccggttattattatttttgacaccagaccaactggtaatggtagcgaccggcgctcagctggaattccgccgacactgacgggctccaggagtcgtcgccaccaatccccatatggaaaccgtcgatattcagccatgtgccttcttccgcgtgcagcagatggcgatggctggtttccatcagttgctgttgactgtagcggctgatgttgaactggaagtcgccgcgccactggtgtgggccataattcaattcgcgcgtcccgcagcgcagaccgttttcgctcgggaagacgtacggggtatacatgtctgacaatggcagatcccagcggtcaaaacaggccgcagtaaggcggtcgggatagttttcttgcggccctaatccgagccagtttacccgctctgcgacctgcgccagctggcaggtcaggccaatccgtgccggatgcggtgtatcgctcgctacttcaacatcaacggtaatcgccatttgaccactaccatcaatccggtaggttttccggctgataaataaggtttttccctgatgctgccacgcgtgagcggtcgtaatcagcaccgcgtcggcaagtgtatctgccgagcactgcaacaacgctgcttcggcctggtaatggcccgccgccttccagcgttcgacccaggcgttagggtcaatgcgggtcgcttcacttacgccaatgtcgttatccagcggtgcacgggtgaactgatcgcgcagcggcgtcagcagttgtttttcatcgccaatccacatctgtgaaagaaggcctgactgacggttaaattgccaacgcttattacccagctcgatgcaaaaatccgtttcgctggtggttagttgcgggatgatatgggacgcggaggggagcgtcacactgaggttttccgccagacgccactgctgccaggcgctgatgtgcccggcttctgaccatgcggtcgcgttcggttgcactacgcgtactgtgagccagagttgcccggcgctctccggctgcggtagttcaggcagttcaatcaactgtttaccttgtggagcgacatccagaggcacttcaccgcttgccagcggcttaccatccagcgccaccatccagtgcaggagctcgttatcgctatgacggaacaggtattcgctggtcacttcgatggtttgcccggataaacggaactggaaaaactgctgctggtgttttgcttccgtcagcgctggatgcggcgtgcggtcggcaaagaccagaccgttcatacagaactggcgatcgttcggcgtatcgccaaaatcaccgccgtaagccgaccacgggttgccgttttcatcatatttaatcagcgactgatccacccagtcccagacgaagccgccctgtaaacggggatactgacgaaacgcctgccagtatttagcgaaaccgccaagactgttacccatcgcgtgggcgtattcgcaaaggatcagcgggcgcgtctctccaggtagcgaaagccattttttgatggaccatttcggcacagccgggaagggctggtcttcatccacgcgcgcgtacatcgggcaaataatatcggtggccgtggtgtcggctccgccgccttcatactgcaccgggcgggaaggatcgacagatttgatccagcgatacagcgcgtcgtgattagcgccgtggcctgattcattccccagcgaccagatgatcacactcgggtgattacgatcgcgctgcaccattcgcgttacgcgttcgctcatcgccggtagccagcgcggatcatcggtcagacgattcattggcaccatgccgtgggtttcaatattggcttcatccaccacatacaggccgtagcggtcgcacagcgtgtaccacagcggatggttcggataatgcgaacagcgcacggcgttaaagttgttctgcttcatcagcaggatatcctgcaccatcgtctgctcatccatgacctgaccatgcagaggatgatgctcgtgacggttaacgcctcgaatcagcaacggcttgccgttcagcagcagcagaccattttcaatccgcacctcgcggaaaccgacatcgcaggcttctgcttcaatcagcgtgccgtcggcggtgtgcagttcaaccaccgcacgatagagattcgggatttcggcgctccacagtttcgggttttcgacgttcagacgtagtgtgacgcgatcggcataactaccacgctcatcgataatttcaccgccgaaaggcgcggtgccgctggcgacctgcgtttcaccctgccataaagaaactgttacccgtaggtagtcacgcaactcgccgcacatctgaacttcagcctccagtacagcgcggctgaaatcatcattaaagcgagtggcaacatggaaatcgctgatttgtgtagtcggtttatgcagcaacgagacgtcacggaaaatgccgctcatccgccacatatcctgatcttccagataactgccgtcactccagcgcagcaccatcaccgcgaggcggttttctccgacgcgtaaaaatgcgctcaggtcaaattcnnnnnnnnnnctgtcctgaccgtaaccgacccagcgaccgttgcaccacagatgaaacgccgagttaacgccatcaaaaataattcgcgtctggccttcctgtagccagctttcatcaacattaaatgtgagcgagtaacaacccgtcggattctccgtgggaacaaacggcggattgaccgtaatgggataggtcacgttggtgtagatgggcgcatcgtaaccgtgcatctgccagtttgaggggacgacgacagtatcggcctcaggaagatcgcactccagccagctttccggcaccgcttctggtgccggaaaccaggcaaagcgccattcgccattcaggctgcgcaactgttgggaagggcgatcggtgcgggcttcttcgctattacgccagctggcgaaagggggatgtgccgcaaggcgattaagttgtgtaacgccagggttttcccagtcacgacgttgtaaaacgacggccagtgaatccgtaatcatggtcatagctgtttcctgtgtgaaattgttatccgctcacaatttcacacaacatacgagccggaagcataaagtgtaaagcctggggtgcctaatgagtgagctaactcacattaattgcgttgcgctcactgcccgctttccagtcgggaaacctgtcgtgccagctgcattaatgaatcggccaacgcgcggggagaggcggtttgcgtattgggcgccagggtggtttttcttttcaccagtgagacgggcaacagctgattgcccttcaccgcctggccctgagagagttgcagcaagcggtccacgctggtttgccccagcaggcgaaaatcctgtttgatggtggttaacggcgggatataacatgagctgtcttcggtatcgtcgtatcccactaccgagatatccgcaccaacgcgcagcccggactcggtaatggcgcgcattgcgcccagcgccatctgatcgttggcaaccagcatcgcagtgggaacgatgccctcattcagcatttgcatggtttgttgaaaaccggacatggcactccagtcgccttcccgttccgctatcggctgaatttgattgcgagtgagatatttatgccagccagccagacgcagacgcgccgagacagaacttaatgggcccgctaacagcgcgatttgctggtgacccaatgcgaccagatgctccacgcccagtcgcgtaccgtcttcatgggagaaaataatactgttgatgggtgtctggtcagagacatcaagaaataacgccggaacattagtgcaggcagcttccacagcaatggcatcctggtcatccagcggatagttaatgatcagcccactgacgcgttgcgcgagaagattgtgcaccgccgctttacaggcttcgacgccgcttcgttctaccatcgacaccaccacgctggcacccagttgatcggcgcgagatttaatcgccgcgacaatttgcgacggcgcgtgcagggccagactggaggtggcaacgccaatcagcaacgactgtttgcccgccagttgttgtgccacgcggttgggaatgtaattcagctccgccatcgccgcttccactttttctcgcgttttcgcagaaacgtggctggcctggttcaccacgcgagaaacggtctgataagagacaccggcatactctgcgacatcgtatagcgttactggtttcacattcactaccctgaattgactctcttccgggcgctatcatgccataccacgaaaggttttgcgccattcgatggtgtcaacgtaaatgcacgccgcttcgccgtccggccaccagaatagcctgcgattcaaccccttcttcgatctgttttgctacccgttgtagcgccggaagatgcttttccgctgcctgttcaatggtcattgcgctcgccatatacaccagattcagacagccaatcacccgttgttcactgcgcagcggtacggcgatagaggcaatcttctcctcctgatcccagccgcggtagttctgtccgtaaccctctttgcgcgcgcgcgccagaatggcttgcagctttaacggttctcgtgccagttgatagtcatcaccggggcgggcggctaacatttcgattaattccttgcgttcttgttccgggcaaaaggccagccaggtcaggcccgaggcggttttcaggagcggtaaacgtcgcccgaccattgcccggtgaaaggataagcggctgaaacggtgggtggtttcgcgtaccaccattgcatcaacatccagggtggacacatctgttggccataccacttcgcgcaacagatcgcccagcagcggggccgccagtgcagaaatccactgttcgtcacgaaatccttcgcttaattgccgcactttgatggtcagacgaaaactgtcatcggaggggctacggcggacatatccctcttcctgcagcgtctccagcagtcgccgcacagtggtgcgatgcaggccgctgagttccgccagcagcccgacgctggcaccgccatcaagtttatttaacatatttaataacattagaccgcgggttaagccgcgcacggttttgtattccgtctgctcattgttctgcatattaattgacatttctatagttaaaacaacgttgtgcacctggtgcacattcgggcatgttttgattgtagccgaaaacacccttcctatactgagcgcacaataaaaaatcatttacatgtttttaacaaaataagttgcgccgtactgtgcgcgcaacggcattttgtccgagtcgtgaggtactgaaatggcaatacaacaccctgacatccagcctgctgttaaccatagcgttcaggtggcgatcgctggtgccggtccggttgggctgatgatggcgaactatctcggtcagatgggcattgacgtgctggtggtggagaaactcgataagttgatcgactacccgcgtgcgattggtattgatgacgaggcgctgcgcaccatgcagtcggttggcctggtcgagaatgttctgccgcacactacgccgtggcacgcgatgcgttttctcaccccgaaaggccgctgttttgctgatattcagccaatgaccgatgaatttggctggccgcgccgtaacgcctttattcagccgcaggtcgatgcggtgatgctggaaggggtgtcgcgttttcctaatgtgcgctgcttgttttcccgcgagctggaggccttcagccagcaaaatgacgaagtgaccttgcacctgaaaacggcagaagggcagcgggaaatagtcaaagcccagtggctggtggcctgtgatggtggggcaagttttgttcgtcgcaccctgaatgtgccgtttgaaggtaaaactgcgccaaatcagtggattgtggtggatatcgccaacgatccgttaagtacgccgcatatctatttatgttgcgatccggtgcgcccgtatgtttctgccgcgctgcctcatgcggtacgtcgctttgaatttatggtgatgccgggagaaaccgaagaacagctgcgtgagccgcaaaatatgcgcaagctgttaagcaaagtgctgcctaatccggacaatgttgaattgattcgccagcgtgtctacacccacaacgcgcgactggcgcaacgtttccgtattgatcgcgtactgctggcgggcgatgccgcgcacatcatgccggtatggcaggggcagggctataacagtggtatgcgcgacgcctttaacctcgcatggaaactggcgttggttatccaggggaaagcccgcgatgcgctgctcgatacctatcaacaagaacgtcgcgatcacgccaaagcgatgattgacctgtccgtgacgacgggcaacgtgctggctccgccgaaacgctggcagggtacgttacgtgacggcgtttcctggctactgaattatctgccgccagtaaaacgctacttcctcgaaatgcgcttcaagccgatgccgcaatattacggcggtgcgctggtacgtgagggcgaagcgaagcactctccggtcggcaagatgtttattcagccgaaagtcacgctggaaaacggcgacgtgacgctgctcgataacgcgattggcgcgaacttcgcggtaattggctggggatgcaatccactgtgggggatgagcgacgagcaaatccagcagtggcgcgcgttgggcacacgcttcattcaggtggtgccggaagtgcaaattcataccgcacaggataaccacgacggcgtgctacgcgtgggcgatacgcaaggtcgtctgcgtagctggttcgcgcaacacaatgcttcgctggtggtgatgcgcccggatcgctttgttgccgccaccgccattccgcaaaccctgggcaatacgctgaataaactggcgtcggtgatgacgctgacccgccctgatgccgacgtttctgtcgaaaaggtagcctgatatgcacgcttatcttcactgtctttcccactcgccgttggtggggtatgtcgacccggcgcaagaggtactcgatgaggtcaatggcgtgattgccagcgcccgcgagcgtattgcggctttctcccctgaactggtggtgctgtttgcgccagatcactacaacggctttttctatgacgtgatgccaccgttctgtttaggcgttggagcgacggcaattggtgatttcggcagtgcggcaggagagctgcccgtgcctgtggagctggcggaggcctgtgcgcatgctgtcatgaagagcgggatcgatcttgccgtttcttactgtatgcaggtggaccacgggttcgcccagccgctggagttcctgctcggtgggctggataaggtgccagttctgcctgtgttcatcaacggtgtcgccacgccgctgcccggtttccagcgtacccgcatgttgggtgaagccattggacgtttcaccagcactctcaataaacgcgtgctgttcctgggttccggtgggctttcccatcagccgccggtgcccgaactggcgaaagccgatgcccatatgcgcgaccgtctgttggggagcgggaaagatttacccgccagtgagcgcgaattgcgtcagcaacgggtgattagcgccgctgagaagtttgttgaggatcagagaactctgcatccgctcaacccgatttgggataaccagttcatgactttgctggagcagggacgcatacaggaactggatgccgtcagtaacgaagagctttccgccattgccggaaagtcgacacatgaaatcaaaacctgggtcgccgcttttgccgctatttctacatttggcaactggcgtagcgaagggcgttattaccgcccaatcccggagtggattgccggatttggctcgttaagcgccagaacagagaactgaatatgcaggagaagatgatgagttatcagccacaaaccgaagccgccaccagccgttttctgaatgtagaagaagcgggtaaaacgctgcgcatccattttaatgactgcggacaaggcgacgaaaccgttgtcctgctgcatggttccggcccgggtgctactggctgggcgaacttcagccgcaatatcgatccgctggtagaggcgggctatcgggtaatcctgctggattgtccgggttggggcaaaagcgattcgatcgttaatagtggttcacgatcggatcttaatgcacgaatcctgaaaagcgtggtggatcaactggatatcgccaaaatccacctgctgggcaactcgatggggggccatagttctgtggcgttcacccttaaatggccggagcgcgtcggcaaactggtgctgatgggcggcggtacgggcggcatgagtttgtttacgccgatgccaaccgaaggtattaagcgactgaatcagctttatcgtcagccgactatcgaaaacctgaagctgatgatggatatcttcgtttttgataccagcgatttgaccgacgccctgtttgaagcgcgcctgaataatatgctgtcgcgccgcgatcacctggaaaacttcgttaagagcctggaagctaatccgaaacagttcccggattttggcccacgtctggcggaaatcaaagcgcaaaccctgattgtctgggggcgcaacgaccgctttgtgccgatggatgcgggtctgcgtctgctgtccggcattgccggttctgaactgcatatcttccgcgactgtggtcactgggcgcagtgggaacatgccgacgctttcaatcaattggtgctgaatttcctcgcacgcccttaaggaatggtcatgacgaagcatactcttgagcaactggcggcggatttacgccgcgccgcagagcagggcgaagcgattgcgccgctgcgcgatctgattggtatcgataacgctgaagcggcctacgccattcagcacataaatgtgcaatatgacgttgtgcaggggcgtcgcgtggtagggcgtaaagtgggcctgacgcatccgaaagtgcaacaacaactgggcgttgatcaaccggattttgggacgttatttgccgacatgtgttatggcgataacgaaatcattcctttttcccgtgttctgcaaccccgcattgaagcggagatcgcactggtgttgaaccgcgatttacccgcaactgatatcaccttcgacgaactgtataacgccattgaatgggtacttccggcgctggaagtggtggggagccgcattcgcgactggtcgattcagtttgtcgataccgtggcagataacgcttcctgcggggtgtatgtcatcggcggtccggcgcaacgtccggcggggttagacctgaaaaactgcgccatgaagatgacgcgtaataacgaagaggtttccagcgggcgcggcagcgaatgcctgggacatccgcttaatgccgccgtctggctggcacgcaaaatggccagtctgggtgaaccgctgcgcgccggagatatcattcttaccggggcattaggcccgatggtggcggtgaatgcgggcgatcgttttgaagcccatattgaaggcataggttcagttgctgcgacattttcaagcgcagccccaaaaggaagtctgtcatgagtaagcgtaaagtcgccattatcggttctggcaacattggcaccgatctgatgattaaaattttgcgtcacggtcagcatctggagatggcggtgatggtcggcattgatcctaagtccgacggtctggcgcgtgccagacgtatgggcgtcgccaccacccatgaaggggtgatcgggctgatgaacatgcctgaatttgctgatatcgacattgtatttgatgcgaccagcgcgggcgcgcatgtgaaaaacgatgccgctttacgcgaagcgaaaccggatattcgcttaattgacctgacgcctgctgccatcggcccttactgcgtgccggtggttaacctcgaggcgaacgtcgatcaactgaacgtcaacatggtcacctgcggcggccaggccaccattccaatggtggcggcagtttcacgcgtggcgcgtgttcattacgccgaaattatcgcttctatcgccagtaaatctgccggacctggcacgcgtgccaatatcgatgaatttacggaaaccacttcccgagccattgaagtggtgggcggcgcggcaaaagggaaggcgattattgtgcttaacccagcagagccaccgttgatgatgcgtgacacggtgtatgtattgagcgacgaagcttcacaagatgatatcgaagcctcaatcaatgaaatggctgaggcggtgcaggcttacgtaccgggttatcgcctgaaacagcgcgtgcagtttgaagttatcccgcaggataaaccggtcaatttaccgggcgtggggcaattctccggactgaaaacagcggtctggctggaagtcgaaggcgcagcgcattatctgcctgcctatgcgggcaacctcgacattatgacttccagtgcgctggcgacagcggaaaaaatggcccagtcactggcgcgcaaggcaggagaagcggcatgaacggtaaaaaactttatatctcggacgtcacgttgcgtgacggtatgcacgccattcgtcatcagtattcgctggaaaacgttcgccagattgccaaagcactggacgatgcccgcgtggattcgattgaagtggcccatggcgacggtttgcagggttccagctttaactatggtttcggcgcacatagcgaccttgaatggattgaagcagcggcggatatggtgaagcacgccaaaatcgcgacgttgttgctgccaggaatcggcactattcacgatctgaaaaatgcctggcaggctggcgcgcgggtggttcgtgtggcaacgcactgtaccgaagctgatgtttccgcccagcatattcagtatgcccgcgagctcggaatggacaccgttggttttctgatgatgagccatatgaccacgccggagaatctcgccaagcaggcaaagctgatggaaggctacggtgcgacctgtatttatgtggtggattctggcggtgcgatgaacatgagcgatatccgtgaccgtttccgcgccctgaaagcagagctgaaaccagaaacgcaaactggcatgcacgctcaccataacctgagtcttggcgtggcgaactctatcgcggcggtggaagagggctgcgaccgaatcgacgccagcctcgcgggaatgggcgcgggcgcaggtaacgcaccgctggaagtgtttattgccgccgcggataaactgggctggcagcatgggaccgatctctatgcgttaatggatgccgccgacgacctggtgcgtccgttgcaggatcgaccggtacgagtcgatcgcgaaacgctggcgctgggatacgctggtgtttactcgagcttcctgcgtcactgtgaaacggcggcggcgcgttatggcttaagtgcggtggatattctcgttgagctgggcaaacgccggatggttggcggccaggaggatatgatcgtcgacgtggcgctggatctgcgcaacaacaaataatgatgactgccgataacgtgcattttgtatgcccatcccagcacgacagccggatgcggcgtgaacgccttatccggcctacatttcgcccgtaggcagtcattaaatagttctgattacgcggctggcaatgtatcagtcgcgattcacctgcactcgcaatgaggttcatcttatgtcgactcgtaccccttcatcatcttcatcccgcctgatgctgaccatcgggctttgttttttggtcgctctgatggaagggctggatcttcaggcggctggcattgcggcgggtggcatcgcccaggctttcgcactcgataaaatgcaaatgggctggatatttagcgccggaatactcggtttgctacccggcgcgttggttggcgggatgctggcagaccgttatggtcgtaagcgtattttgattggctcagttgcgctgtttggtttgttctcactggcaacggcgattgcctgggatttcccctcactggtctttgcgcggctgatgaccggtgtcgggctgggggcggcgttgccgaatcttatcgctctgacgtctgaagccgcgggtccacgttttcgtgggacggcagtgagcctgatgtattgcggtgttcccattggcgcggcgctggcggcgacactgggtttcgcgggggcaaacttagcatggcaaacggtgttttgggtaggtggtgtggtgccgttgattctggtgccgctattaatgcgctggctgccggagtcagcggttttcgctggcgaaaaacaggctgcgccaccactgcgtgccttatttgcgccagaaacggcaaccgcgacgctgctgctgtggttgtgttatttcttcactctgctggtggtttatatgttgatcaactggctaccgctacttttggtggagcaaggattccagccatcgcaggcggcaggggtgatgtttgccctgcaaatgggggcggcaagcgggacgttaatgttgggcgcattgatggataagctgcgtccagtaaccatgtcgctactgatttatagcggcatgttagcttcgctgctggcgcttggaacggtgtcgtcatttaacggtatgttgctggcgggatttgtcgcggggttgtttgcgacaggtgggcaaagcgttttgtatgccctggcaccgttgttttacagttcgcagatccgcgcaacaggtgtgggaacagccgtggcggtagggcgtctgggggctatgagcggtccgttactggccgggaaaatgctggcattaggcactggcacggtcggcgtaatggccgcttctgcaccgggtattcttgttgctgggttggcggtgtttattttgatgagtcggagatcaagaatgcagccgtgtgccgatgcctgacgcgccttatttagcaggggcgaaagggacttgcccccaatacacccacggcgtttacaggtatactcgctaaaaattattcagcgggtttggaaacaaagatggcaaaacttaccttacaagagcagttgctcaaagcaggattagtcaccagcaaaaaagcggcgaaggtggagagaacggcgaaaaaatcgcgcgttcaggcgcgtgaagctcgggcggcggtagaagaaaataaaaaggcacagcttgagcgtgataaacagcttagcgagcaacaaaaacaagctgcgttggcgaaagaatataaagctcaggtgaagcagctcattgaaatgaaccgaatcaccattgccaatggcgatattggttttaacttcactgacggcaatctgattaagaagatttttgtcgataagctcacacaggcgcagttgattaatggtcgtctggcgattgctcgcttgttggtcgataacaatagcgaaggtgaatacgccattattcccgccagcgttgccgataaaatagctcagcgtgatgccagcagtatagtgttgcacagcgcgctcagtgccgaagagcaggatgaagacgatcnnnnnnnnnntttcaaagtgcctgatgatttgatgtggtaaacatagataagtcgtgcgcagatgcctgatgcgacgctatgcgcgtcttatcatgcctacggcctgcgggcgaaatgtaggcggataaggcgttcacgccgcatccggcagtcgtgcactattatcaacgcatattcagtttattggcgtggtaggcaatatgctcgccaataaaactggagacaaaataatagctgtggtcgtaaccctcgtgataacggattaacgtcttgatattcatctcctggcagatcttttcaagatttggagtccgcagctgttccgcgtaaaaatcatcactcaacccctgatcaaccatgatttccgcaacgcgttgaccttgtgaaataagactcaccggatcgtaatccaaccaggcatctttattttcaccaagatatgcggcaaaggcttgctgtccccacggtacttgcgatggggagacaatgggcgaaaacgccgagacgctgacatattcatctgggttacgtaacgccagcaccagcgcgcccagcccgcccatagaatgaccagagatagactttctggtcgttgccggaaaatgttgcatcactaaatccggcagctcgttgcggatatagtcatacattttgtaatgttcattccacggcgcttgcgttgcgttcaggtaaaacccggcaccttgcccgagatcgtaacggtcggcatctgcgacatgactgcctcgcggactggtgtccggcgcaacaacaataatgttgtgctcagccgcgtaacgctgcatccccgatttagtaatgaaattctgctcgttgcaggtcaggcccgaaagccagtacagcaccggcaatttttcattcgcggcttttggtgggagatagacgccgacattcatttcacatttcagtgattgggaataatgccgatacacattttgccagccgccaaagctggcatgtttttcaatgagttccatcagtcattatctcacggttaatcccccggacggctgcccggggagagtattaagaaccccgtctgaagtggacggggtatacctgcgggaaatcagtaacgaattacggttcgaatggatttgccttcatgcatcaggtcgaaggcgtcattaatttcatcaaggctcatggtatgcgtgacaaacggttccagatcgatatcacctttcatcgcatcttcaaccatacccggtaactgggaacgacctttcacgccgccaaacgcggaacctttccatacgcgaccagtgaccaactggaatggacgggtggagatttcctgaccagaacctgccaccccgatgatcaccgactgaccccagccgcggtgcgcactttccagcgccgcacgcatcacgttgacgttaccgatgcattcaaaggtatggtcgataccccatttgttgatatccagcaggacatctttaatcggtttgtcgtagtcattcgggttaatgcagtcggtagcaccgaagcgacgcgccagatcgaatttcttcgggttggtatcgatagcgataatccgtcccgctttcgcctgacgcgcgccctgaaccactgccagaccaatcgcgccaagaccaaacacggcaacagaatcacctggctggactttagctgtgttgtgcaccgcgccaataccggtggtcacgccacagcccagcagacagacgtgttcatggtttgcttctggattaattttggccagagacacttccgcgaccacggtgtattcactgaatgtagagcaccccatgtagtgataaagcggctgcccgttgtaagaaaaacgggtggtgccgtctggcatcaagcctttaccctgggtttcgcgaaccgcaacacagaggttagttttgccagaacgacagaactcacactcgccgcactccgcggtgtaaagcgggatcacatggtcgccaggtttgacgctggttacgccttcaccgacttcaaccacaacgccggccccttcgtgaccgagaaccaccgggaatacaccttccgggtcatccccggagagggtaaatgcgtcggtatggcaaacgccggtatgggtgactttaatcagcacttcaccttttttcggtggtgcaacgtcaatttcaacgatttccagcggtttaccgggagcaaatgcaacggcagcacgtgatttcatctctcgctcttcctcaatatggtaatagattcagctatttaagataggctcgaaccagttcaatagtgtcgtcaacggattggctgacttcgcggctgtagcagtcatttcggtcaaacgtttcccggatatggctttcaagcacttctgccatcagcccgttagccgcgccccgaacggcagcgatctgttggagtatggcacggcattcggcatcaccctccagcgaccgttccagagcatcaatctgccctcgaatacgacgaactcgagtaaggacctttttcttctcttccggagtactgggcatttcgcacctcatcatctgcacgcaatatactataggggggtatgctatatgtcaatgcatacccccctatagtatataacactggagaataaaatttatccggtgaatgtggtcggaaaacaaagaggaaagggggggctaatcggcagggaaggccgccccggatagcgggcggcagaaggaatcagaatttccaggtcagatgggctgcaagttgcagaccgttataatcatcggttggggtgtcgtaccacactttacctgccgtcagcccgagattaagttgctcagtcagcggttgaatacgttgcaaactgacgctcttcatgctgccgtagcgtgtttctggcgtccagtcataggtgtaagcgcctgttccgcggcttagccatagttgcgtataaccagtgccgcgcgggtcattcagacgcacggaaatcatattgctataactaccacctgcatcgctggagtcataatgggtatagcggtagctggtgatcaccgggccagtatagagtgatacgccgccttgccaggcatcgacttcgacatcatcgtaatatttagtgtagcgataaccggtcgtgaaaagcgtttttggcaacagggccaggttaatatcctgacgaaaatcctggcgggcaaagaccggcgtattatccgcaaaggcaatacccgttcgggttgtcagccagttattccatttataccagaccgcaccctgaccgcgagtggcattgaaatgttcagtttcataatcacgacgcccctgggaaagattaaaaagcagcgttgcgttttcaactttcgccaccagttcagcatacgctaaattacggttgccatgatcgccagaataatcggtaaaatcgtagcccgcggtaatggaagttaacccggcataagcgggcaatgcgctaaaaatggccgccgctaataacgtccgttttatcattttaatctcctgtacggataagttcttgtcggagtgaataagttccggcaggtaaattacgttctacaatcacgcgcgggccaagttgcgtgttcggggaaataattcgcccaggcaaaattataacttgtacgccaaggcgtgaacgctgcccgatataacaacctaatttatcgcatccggtagcgataattccctctggagttcgaacagacacaggctgttcatccagacgatgattactggtacgtacttgtgcgcccaaatatgcctggtttgcaactaccgagtcggcaataaaacattgcggaccaatcgttgcttccgcttcaataaccgcatttttaatttcggtggcaaaaccaatttttacaccattgctgattattgtgccaggacgaataaacgcataattacctatcaggcagtttgcgccaatcactaccggaccctgaataacggcaccatgacaaatacgggtattcgcgccgataacaacttcacctgcagtttcatcaataattacctggtctgcaatctgaatatttttctctttaacattaagcttcagatagtttttcagttcctgtgacagaaggttgggaataagcggttgacgcttccaccagtgcggaatagcgggtgggtttgtcgcgctgaggttcgcgtccagtaaaaaaggcaataagtccataaataatccagatggcataagctaataatacatacacaacggaaagcggcgctaaaggcaccaacaaccagcaacgatgaaaccaggcgctaaaagcaccaataacacaaactacgccgatccagataagcggaaacattgccaacaccacaccatgcggcccggtggtgatgaattcattaaaccaggtagtgagataaatcccaacgccataaatcacaaccaacagcataggaaatatactgaagataccgaagcggctaaataaaagtcttttatgcaggcgcatacagaccgcgtatcccacaatccaacgccgccagcgacgccactcctcacgcgggctgttgcattcctgtgagtatacgatgcagcgattcgcctgccgaatacggtagccgtttgccactaatgtccaggtgagatcaaggtcttcgactttagtacgatctgagaaaccgaacttacgcaatacatcagtgcggaacattccgcaggcaccgctgataataaacggtgcgccgcccaggagctgctgtagcgtgcgcttcataacaatcatcggcaactttacggtcgcgcggatgtgcggtaacagccccgcgcctttcaacgcagtagagggaatgccgcctacggcatcagcaccgcgctcaatttctgccagcatatagcccattccgtcttgatcgggcggaacataggtgtcggcatcacttaaaaaaacctggtcgcaggtggcataattgaggccattcatcagcgcaccacctttaccggtatttttttgcgtgacggcaacaaagcggtcgccccatttgcgtttgacttccgccatgaccgcttcggtattgtccgtggagccgtcgttaacgcaaattacccggcaaaaataagggttacgcagtagattatccagtgactgcgccagacacgggccttcgttatacgcaggtataatggcgtcaatacagcctttcttttgactgggtttacgtcttagcgtacttaaaaaccatagcaacattgctatggacatacagataaatatccaggttttcatgcaatttgctcaaagaatcattttatgaattacaaagccttcacccagatcgctattgacctgttgcccgcgaaattgtgcaactgcacgcaggcgatcatgacgcatataatcgcgtcgttcctggcttttatgttgttttaatgcagcaagtttgactgtgaaatattcttctttaacggattcaaaaacctgaggcataaatgaaagccaggtacttggggtttcgtagccgagaatttgtggaatagtgcggcaggcaaccattgaagcttgataaacagcgagatgatcctgatggcggtcggcatcatgcatggtatatacccgcatgatttcaacatcagaaggaatttgatttttaatgatgtcttccagggcggaaatcatatcattgagctgtaaatgagcgcgggtgtcagcaaaattaagatgaatagtttggtggcaccctaatatctttagggcgttgcgcgattcttcatggcgatcgattattccatctgtgccagagttgccggtagtcatcaccacggctgcgatataaattcctttttgcgcaagacgagcaagcgatgcgccacagcctaattctatatcgtcaggatgtgcgccaatagcaaggataccctttcttttatttgccgaagaaaggagggctgaatctaaaaccttatccacttaatgacactccattttatttattatactacaagcacaacgatgcactcagagacgtaatctctggcgcagccagatgttaatttataaatgttaaatgttgctaataactgaaaagcaagggctttcagacccggaggttcgactgggtaatgtttctatgcaattcatatgttaagtgtttgtatgtttggtatgtatag

SEQ ID NO: 193 - DNA, 37256 bp, Escherichia coli
  source 1..37256: mol_type = genomic DNA
acggtgatatcctgattatcgaaaaggctggcgcgaaatgtatcgaccatactttgctggctgtgcgtacatcccgcaagaaatagtgcgaaaatcgatagaataagagggcgcacctttaatccttgaaaggttaattaaaaaaatgcaaatctctaaagcccggtacgaatatcgcaaccgggtatcatttaactttaatttcgacgcgttaaagcagtattagcgtgtagtggacgtggtggttgaggtgttatgagaaccgccatcgccactgtcatttgctgcaacaactgccaacgtcgccacaccaacagccgttgccacaccgacaaccgtcgccgtgccgacagcgccagcagccacgccaccagtggtagccgcagtcgtggttgcaccggtagtggtcgttgtggtgccagtagtacccgtcgttgcctcggtcccgtttgctgcttcaggggcagcaaatgcagctggcgtcgtcaacatgaaggccataaggattgcagaaagcttgtgtttcataacttttcctttattcatcgcatggacaatacgtacgcttgagatcaggattgtctactttgagtataacatccttgtgaaatctccctttcctcataccgcttgcactatatactgcgggtaggaaaggcgcgcagagggaaatataagattgttaactatccccctctggaaatacgacttgtgagcataagataaatcttagcaaaatacaaattaaagataaggaaattgttacgaaagctattaattattgttggtaatatagtttcaagtggtactataactggctgttaaatggcatttataactattaggtgcagagatattcgcttaaatggattagtttctttgtggaaaagtaactgatgttataatgtatgatgttgactattgcactattccaataaaaccagtcagctttaaacaagcagcgtcatattaagagagataaacatttgccgctgttggtcctcgcaggccatttacgcggcaaaattccacgcgtaatcctggtataagcacttctgcgtcgcggggagtgaatgcggaaatatggacctggacttctttacgaccgtcggaggggataatgaatcctttgccgcttttgcgatcaaaggttttgacaattcctgtcattttacgggacaaacaaattccttactgaaaatactgtgccgcactatacggggttaataaaataaagccagcgatatttaagaccgccggacggctaaaataaaatttgcttaatctcaattatcatgcgttaatagctgcgtcggtttgaaagacagacagcatacaaagtagtttactaaagcagttctcattatcaggcattatccctttcttttgagtctctctcctgaacactaagtagtttctgtattaaagccctgtttgccgaaaggcccaaaatgaaggaagtaaaatatgtctaataaaatgactggtttagtaaaatggtttaacgcagataaaggttttggctttatcactcctgatgatggcagcaaagacgttttcgtccatttcaccgccattcagagcaatgaattccgcacgctgaacgaaaatcagaaagttgaattttctattgagcaggggcaacgtggccccgcggcagcgaacgttgttacgctctaaggttgccgttattactcaacatctccatttccgctgtccatgttgtcatggttcacagtaccgtacatcggcattcgatgtgacggagcgaaaccctttgggcgctaagtgtattttttgtaaatcgacgatgatcacctttgataacgtcgcgctgcaaatacgcacggaccatgcgccgctggatttcacaaaataatatcaggctccctcgtggagccttttttatatctgccttatttttcttcaacgctgtatgtatagtaagcgataacctgttgattattgaatctttcggggagatggcttataacatttcttacctgaccagggtaccgggaaccaacaccttactggcgtgttgctgtctttcaagaccagacgaggttaacagtgaatattgaagagttaaaaaaacaagccgaaacggaaatcgctgactttatcgcgcaaaaaatcgccgagctgaacaagaatacagggaaagaagtctctgaaattcgcttcaccgcacgagaaaaaatgaccgggcttgaaagttatgatgtcaaaatcaaaataatgtgattttgtgaacatcaccccgtgcgaggtgatgttccgcttgttgctaatttagtgaccaatcattggcgcttgtggaattaagcgtcggtacaattcctccggcaccgggctttgccatactcccgcatacattgcgtaaccaatcaccgcaaacataatccccagaaccagtagcgtcattaaccagccagacaacgcaaaagcttttttatttgccgcaggtttttgcagtgaaaaggtcaatgttgaggctaccggacatgactctacgcaagtcatacagccggtacattccactgttcgtacctgaattaatttatctaccgggatccgtgatgggcaattttttgcgcatttgccacagtcgatacaactttcggcattgcgacgaatcttaaacggcgacaatagcgaaaccacgcccatcagcgcgccatatgggcaaagataacgacaccaggcatggcgaataaacaggctggcaatcagcaaaacggtcacgctgattaatgtcgcggtccccatatgacgaaagaaatcgagcatttttacgtccatcaccacgctgtagggcgacaacataaaatagtgaatcgcctgagcgggcatcaataacgcgatatagagaaaaaaactcaacagcaaatacttcacgccgcgcagaggaatatccagccagcggggaaggacacattgccgaccaaacagtttgttaccgagatcgccgattaattcagaaagcgtaccaaccgggcataaccatgagcaaaaggcctttttgagtaatagactgatgacgataaaagcgaccaataacagcatcgcggcgacgtggacggacggtaactgacctgttgtaaggctatatttcagattcatcagaccggcaatcggtagccagccttcgatacctcccggtctggcgacaaatgtcgtgctacttgccgtttcgtaatagcgcacccaataccagaacgtgatggcaatataaatattcattgccaacagtaataattgcgtcgctttacgccaggtcgtggcattacgccagtcattccacggtaatttgccgcccgtcgtgcctggccgccgctgccagcgggttcttttattctctgccatgattttgccagtccgttaagttgtataccaaatgccactattctagttgttcttaactggctgatattgattcaaatcgcgttcaggtctttcttatgcaaccatgcttccagagcggcaacactgcgtgtaatttcttcgtgtggaaggggggcagataatggctgctgctccagttgtgcgcatagctggctggcgatacgcattcccagactcgagcaactgctttttagctgatgcgcggcacgctttattttctcgctatcctgactggcgcgggcaatgtcgatttcatcgagaagcggcagggcatgttgtgtaaataataccagccattcgtggatcttctccgtccccattaactgagcatcttcattgagttgcgatacatccagcgattgatcattattgacttgcagttggagatagtgcgccagtaactgaccgagcacttcacgcggcaccggtttagggataatcccgcggaataatgaactggtacgctggcgcagcgtttcgtcaatgacatgggcgctaaagccaatcaaaaccagcgacggatattgctgtgccagttgtcgggcaagcgtaatgccgtcgatatccggcagatcaaaatccaccagtgcggcagcaaacggttcgctattttgcagtgtctctaaagcctgcgcggcattgccaacagcaacaatctgcgcaccactggttttcagcatctcaatggtaattcgctgggttagcgggttatcttcaattaacagcaaacgtaaaccgtcaagacgcaccgcctgattgactgtttttggcacgggtgccgtggcaacacgtaacggcaagcgtaaacaaaaacagcttccaacctccggcgtgctggtggcgctcagttcgccgcccatcgcctgggccagacggctactgatagtcagtcccagcccggtgccgccgcgtttgccgcttacctgcacaaatggctggaagatttctgccagtttcgcgggatcaataccgcagccgctgtcttccacttcgaccagccattgctcgccttcagtgcgactacgcaggataatgtacccttcgtcagtaaaacgcagggcgttgctcaacaggttggttataacctgacgaatacgtcgtggatcgcccattaacgcgcacggcatatcatcggcaattgccgttgccaggcgaatcgggcgacctttcacccgtccgctcattaattgcagggtactttccagcagcgggcgcggttcaaagggctcatcgctgaccgaaacattcttgccacctgcttcgatagcggaataatcgagaatatcgttgaggatggtcagcaacgattcaccagagtcagtaattgcccgcaaatcatcacgctgggcgttaagtgcggggttatctgccagtagctgtgcggtgccgagaataccgtacagcggtgtgcggatctcatggctcatcgccgccagaaacgccgattttgcctggctggctttttctgcttccgcccgtgcctgtcggtgttctatcaccagttcctgcaattcagctgtacgcgctttgacctgcgccgccagctgttcgcggtggcgattcagtgcatgaacattgctgcgaaacgcatccatcagccgcccgatggtatccagctcccgtacgccagcggtttccgggaaaggggagtcaatatcaccgtccagcagccgttgcagcgcctgcgtttgttcggcaagtggacgcgtgactgagcgataaaccacgcgccagaggatcagaatcagtgcgcaaagtgaaaccatccccagcaataacaggctgtattgcccgcgtgcactggctttttccagatgtgccagtccatgctgattgcgcagctcaatggtgtcgaccagctgactgacttcgctactaaactgcgcgaactgggcgatattattttgggcgagagtttgcaggtgattgctgatttcactgtcctgctggaacagcgccaacagatcgctatattggctaacggtagttaacgttgttgcgacctgcgcacgaacacccggatcttcaatgcgtatttgccgacgttgcagaattttcaccgcattattgagctgcttttccagcgttggcgcatttttctggatctgctccagccccagattcatcaccatttgctgcacccgcagggcgctaaggcgcagttcattcatctggttaacatactcaagatcgatatcaatcagccgatcgagtgcactttctgcggcctgacgctgatcttgttcgatcaaatcgtaaatcccggcctgggtcgctccggcggaggttgccgcattattcgcctgaccttgcgccaggcgtgcgatctcatcggcggcagcgactatctgctgactgagttgctgttgttgctggcgcagttgcaaacgctgccccaccagttccccttgctgacgtaacgaacgggagatctcctgctcctgttgttcaatagcggtggtatcaaaaccttgttcccgtaacgcttgcagcaacgcattaatcttcaggctttgtgcggtgagcattcgcccctgcgcctgccacatcttttcgttatcggcactggtcaggttctgcgcggcgaaaagttcccaggcgctggcttcgctcaactggcgcgccatattcatggtaggaatcaatgcctgagtattgtctttttccacctggctgataaagcgcaggttgtaccatcccaccagggtactggtcagggttaacagcgccatcagggcaaagcccatccagagtcttcgggtcagggttaaattcacggtcggtgcactttaggtgaaaaaggttgagtcgcaaagcggaatgcatctagcataaagccttattattgatgaggctatcatgcgcgtactgctatttttacttctttcccttttcatgttgccggcattttcggctgataacctgttgcgctggcatgatgcgcagcatttcacggtgcaagcctctacgccgcttaaagccaaacgcgcatggaaactgtgcgcgctttatcccagcctgaaagattcatattggttatcgttgaactatggtatgcaggaggctgctcgccgctacggtgtggatttaaaagtgctggaggcaggcggctacagccagttggctacccagcaagcacaaatcgaccagtgtaaacagtggggcgcagaggccattttgctcggtagtagcacgacctcatttcccgacctgcaaaagcaggtagcaagtctgccggtgatcgaactggtaaatgctattgatgctccccaggtgaaaagccgcgttggtgtgccctggtttcagatgggctatcaaccggggcgatatctggtgcaatgggcgcacggtaaaccactgaatgtgctgttgatgcccggacccgataacgccgggggcagtaaggagatggtcgagggttttcgcgcagccattgccggaagcccggtgcgtattgttgatattgcgcttggtgataacgatattgaaatccagcgtaacctgttgcaggagatgctggaacgccatccagaaatcgacgtcgttgccggaacggccattgcggcagaggcggcaatgggggaagggcgtaacctgaaaacgccgcttaccgtggtgtcgttttatctttcacatcaggtgtatcgcgggctgaagcggggaagagtgattatggctgccagcgatcaaatggtctggcagggggaactggcagttgagcaggccatcaggcaattacaggggcaatcggtgtctgataatgtcagcccaccgattttagttctgacgccgaaaaatgccgaccgagaacatatccgccgctcgctgtcaccggggggatttcgtccggtctatttttatcagcacacatcagcggctaagaaataaccttcaccatgttgcgtcaccagtaaatccgcgctgagtttatgacgtaaacgacgaattaacacatcgacggtgcgcaggtcagggttttccacccgacgcgcagaaagcatacgtagcagacgttcacggctgagaatttcgcccggattcgtcacaaatgccaccaacatttcatactctgcgcgggtcagtttaatcggctcgccatcccgctccagcgtatggcgcgacacattcaggcaataaccggcaaagcgatagcagttgtcctgagtgtgcggttgagcttgtcgcgcgaggtcgattcgccagagcagatttttcacccgtactaccagttcgcgcagttccagcggtttggtgacgtaatcgtctgcgcccatttccagcccaacaatacggtcaatccgatcgctgcgtccggtaaccagaataatccccaccgttgagcgttctcgcagggcgcgggttaacatcaggccattttcatcgggtaagttgatatccagcagaattaaatctaccggctgattctgcataatttcccgcagcccggcaccgctcgctgtaacggaaacggtatacccctcctgagtgaagtaagattgtaatcgcgcctgggtaaccggctcatcttcaacaataacaatgtgatgtggcatcagagggttttactcattctgttcatatctgttcatattctgccgtaagccgttcatcctgaccagtgccgctgttcatatttgctcattaagatcgcttcactaaaccataattttacaggggctattatgcggaaactctggaacgcgctacgccgacccagtgctcgttggtcggtactggcgctggtcgcaattgggattgtgattggcattgcgctgattgtattgccacacgttgggatcaaagtcaccagcacaaccgaattttgtgtcagttgccacagtatgcaaccggtgtatgaagaatataaacagtcggtgcatttccagaacgcctccggcgtgcgagctgaatgccatgactgtcatatcccgccggatatgccaggcatggtgaagcgtaaactggaagcgagcaatgatatctaccagacctttattgctcactccattgatacacctgaaaaattcgaagccaaacgcgcggaacttgccgagcgtgaatgggcgcgaatgaaagaaaacaactcggcaacctgccgctcctgccataactacgatgcgatggatcatgcgaagcagcatcctgaagcggcacgtcagatgaaggtggcagcgaaagataatcaatcctgcatcgactgtcataaaggtattgcccaccagttaccggatatgagtagcggcttccgtaagcagttcgatgagctgcgcgccagtgctaatgacagtggtgacacgctgtactctattgatattaagccaatttatgcggcgaaaggcgataaagaagcctctggttctctgctgcctgcttcggaagtgaaagtccttaaacgtgacggcgactggctgcaaattgaaattaccggctggacggaaagcgccggacgtcagcgtgtactcacccaattcccaggtaaacgcatctttgttgcctcgattcgtggtgatgtgcagcagcaggtaaaaacgctggagaaaaccaccgttgccgacaccaataccgagtggagcaagttgcaggccactgcgtggatgaagaaaggcgacatggtgaacgatatcaaaccgatctgggcttatgcggattcgttgtacaacggcacctgtaaccagtgccacggcgcaccggaaatcgcccactttgacgctaacggttggatcggcacgctcaacggcatgattggctttaccagtctcgataaacgtgaagaacgcaccttgttgaaatatctgcaaatgaatgcgtctgacaccgcaggtaaggctcacggcgataagaaggaagaaaaataatgaacaataacgatctctttcaggcatcacgtcggcgttttctggcacaactcggcggcttaaccgtcgccgggatgctggggccgtcattgttaacgccgcgccgtgcgactgcggcgcaagcggcgactgacgctgtcatctcgaaagagggcattcttaccgggtcgcactggggggctatccgcgcgacggtgaaggatggtcgctttgtggcggcaaaaccgttcgaactggataaatatccgtcgaaaatgattgccggattgccggatcacgtacacaacgcggcgcgtattcgttatccgatggtacgcgtggactggctgcgtaagcgccatctcagcgatacctcccagcgcggtgataaccgttttgtgcgcgtgagctgggatgaagccctcgacatgttctatgaagaactggaacgcgtgcagaaaactcacgggccgagtgccttgctgaccgccagtggttggcaatcgacggggatgttccataacgcttcggggatgctggcgaaagctattgccttgcatggtaatagcgttggtacgggcggagattactctaccggtgctgcgcaggtgatcctgccgcgcgtggttggctcaatggaagtgtatgaacagcaaacctcctggccgctggtattgcagaacagcaaaaccattgtgctgtggggctctgatttgctgaaaaaccagcaagcgaactggtggtgcccggatcacgatgtttatgaatattacgcgcagctaaaagcgaaagtcgccgccggtgaaattgaggtcatcagcatcgatccggttgtcacatccacccatgagtatctggggcgcgagcatgtgaagcacattgcggttaacccgcaaactgatgtgccgctgcaactggcgctggcgtatacgctgtacagtgaaaacctgtacgacaaaaacttcctcgctaactactgtgtgggttttgagcagttcctgccgtacctgctgggtgagaaagacggtcagccgaaagatgccgcatgggctgaaaaactgaccggcattgatgccgaaaccattcgtgggctggcgcggcagatggcggcgaacagaacgcaaattattgctggctggtgcgtgcagcgtatgcagcacggtgaacagtgggcgtggatgattgtggttctggcggcgatgctggggcaaattggcctgccaggtggtggctttggttttggctggcactataacggcgcaggcacgccggggcgtaaaggcgttattcttagtggtttctccggctctacgtcgattccgcctgttcacgacaacagtgattacaaaggctacagcagcaccattccgattgcccgttttatcgatgcgatcctcgaaccggggaaagtgatcaactggaacggtaaatcggtaaaactgccgccgctgaaaatgtgtatttttgccggaactaacccattccatcgccatcagcagatcaaccgcattattgaaggctggcgcaagctggaaacggttatcgccatagataaccagtggacctcaacctgccgctttgccgatatcgtgctgcctgcgaccacgcagtttgagcgtaacgatctcgaccagtacggcaaccactccaaccgtggcattatcgccatgaaacaggtggtgccgccgcagttcgaggcgcgcaacgactttgatattttccgcgagctgtgccgtcgctttaatcgcgaagaagcctttaccgaagggctggacgaaatgggctggctgaaacgcatctggcaggaaggtgtacaacaaggcaaaggacgcggcgttcatctgccagcgtttgatgacttctggaataacaaagagtacgtcgagtttgaccatccgcagatgtttgttcgccaccaggcattccgcgaagatccggatctcgaaccgctgggcacgccgagtggcctgattgagatctactcgaaaaccatcgccgatatgaactacgacgattgtcaggggcatccgatgtggtttgagaaaatcgaacgctcccacggtgggcccggctcgcagaagtatccgttgcatctgcaatctgtgcatccggatttccgacttcactcgcagttatgtgagtcggaaactctgcgtcagcaatatacggtagcgggtaaagagccagtgttcattaacccgcaggatgccagcgcgcgcggtattcgtaacggtgatgtggtacgcgtctttaacgctcgcggtcaggtgttggcaggggcagtagtttctgaccgctatgcacccggcgtggcacgaattcacgaaggggcatggtacgatccagataaaggcggcgagcctggtgcactgtgcaaatacggtaaccccaacgtgctgaccatcgacatcggtacttcgcagctggcgcaggcgaccagtgcgcacactacgctggtggaaattgagaagtacaatggagcagtggagcaggtgacggcgtttaacggccctgtggagatggtggcgcagtgcgaatatgttcccgcgtcgcaggtgaaatcatgaccacgctgacagcacaacagattgcctgtgtttacgcctggctggcgcagttgttctcccgtgaactggacgatgaacaactgacgcaaatcgccagtgcgcagatggctgaatggttttcgttgctgaaaagcgaaccgccgctggctgcggcggtgaatgagctggaaaactgtattgccacgctgacagtacgtgacgatgcccgtctggaactggccgctgacttttgcggcctgtttctgatgaccgacaaacaagcggcgctgccgtatgcatcggcctacaaacaggacgagcaagagattaaacgcttgttagttgaggcagggatggaaaccagcggcaatttcaacgaaccggcagatcatctggcgatctatctcgaattgctcagccatctgcatttttcgctgggagaggggaccgttcctgcgcgaagaatcgacagtttgcggcaaaaaacactgacggcgctgtggcaatggttaccagagtttgttgtgcgttgtcgtcagtatgacagctttggtttttacgcggcactaagccagttattgctggtgttagtggagagcgaccaccaaaacagataacgtcgtttgtgcgcctgaaaagacgcgtttagcgtcgcatcaggcattatggggcagttgccggatgcgtcatcacatccggcaaacacacatcacggatgagctacaaaccgggaaagtcgctggcgcagcaggcggttttcctgcttcaggtgcgcaatatcatccattaacgtcagcgccaccgcgatcccaggccagtccagagccagttcatgacgcaggcgtactgcgcgttgcaccacgatggcggcatggtcgtcaaatacccaggttgtttcctggatctcacgcggttcaaccacccccaaaccgacaatttcattcaactcctcttcagagatgccggtatgcaggcaaaattcggtaatagtaaaagtcaccgtaacattagccattatgctttcccccaatctttacgtggatcaaaagacgactgggcgtctgccagttgctgccacagcgcggcagtgttttcatccggtttcggcggcatcacgattttcagtaccgcatacagatcgccggtctgttttttgctcaccagacctttgcctttaacgcgcaatcgttgcccggcctggctgcctggcgggatagtcagcaaaatgctttctttcagtgttggaacggtgactttagcacccagcgccgcttcccacgggctaaccggcactacaatttccagatcatggccgacaatatcgaacagcggatgtggcgcaatatgaatcaccagccacaaatcgccatttggaccgccgttttcgcccggcgtcccctggcctttcagacggatgcgttgaccattgccgacgcccgccgggatcttgacattcagcgttttcggaatttcctgttcgatcatgccaaaggcgttataaaccggcaggttatagctgatggtacgcttatgctcagtaagcgtttcttcgaggaataccgccacttcgatttcaatatcgtggccgcgtgtggcggggcgttgacggctctggcgggcatgctgaccgaaaattgacgagaagatatcgtcaaaatcttcggcgttaaaactctgaccgtcgctatgatggaactgacggttaaattgcggatcgttgcgatgttgccacatctgatcatactcagcgcgacgttgttcatcacttaacacttcccaggcttcagcgacctctttgaagcgggcttcggcatccggttctttgctgacatcaggatggtatttgcgggccagtcgacgataggcggtcttgattgtcttgagatcgtccgtcggtttcacgcccatgatggcgtaataatcctttaattccatagcgttatctcgcgtaaatcaacacaaattgaaggaacccctgtaaggtaactcctataagtgtagggtaatcctcaaaatttcatatgccaacacagaatatgttattgaaatcatcgcggagaggaggtcgcctcaaggtggggtgctgaacatattttaaacaggtgaaaaagggtgagcgatttttgatagtggaaccaggcactttaagtttaactggggcgtcattatttattaaattttataggcgctatatatgagtagtaatatacatggaattagttgcactgcaaataattatttgaaacaagcctggaacaatataaaaaatgagcacgaaaaaaatcaaaaatattcaatcacgctttttgaaaacacactggtgtgttttatgcggttgtataaagaaatcagacgtcaaaaagctgaagactacattccatgcctggaatgcgattcactagaaaaagaatttgaggaaatgcagaatgataatgatttatcattatttttgagaacattgcgtactaatgatacagaaacttattcaggggtttcagaaggtattacatatactatacaatatgttcgagatattgatattgttagagtgtccttgccgggcagaggttcagagtctatcacagattttaaaggttattattggtatggctttatggaatatattgaaaacattaatgcgtgtgatgatgttttttctgagtattgtttagatgatgaaaatatgagtatccagccagaatggataaatacgccgggaatatctgatttagatactggtattgatttgtctggtatatcttttattcagagtgaaattaataaaacttatggattaaaatacgctccagtagatggcgatggctattgtctgttaagggccatactggttttaaaagaacatgagtattcatgggcgctgggcagccataagacgcaaaagcaagtatacgaagagtttattaaaattgttgataaacaaacgatcgaggctcttgttgatacggcattcaatgatctcagggaagatgtaaagacattattcggcgttaatctacaatctgacaacaaaattcaggggcagggtggttttttatcatggagttttttgtcttttaaaaaagaatttattgatagttgcttgaatgacaaaaaatgcatactgcatttacccgagtttatatttaatgataataaggcacgccttgttttagacaccgacccagagcagaaggttaatgaggtgaaaaatttcctcactgctctttcagatagcatttgctcattatttattgttaatagtaatgtggcatcaatctccttagggaatgaatccttttcaacagatgacgaccttgagtatgggtatttaataaacactggcaatcattatgacgtttacctccctctgaactttttgctcaggcttacgagttaaacaataaggaaaggaatgcgcaaattgattttttaactcgttatgcaatttactgacaaaggcatgtgctaaaaaccattgttattagcctcacttctcttattattggtactattgcctctgtattagtaacgccgctgatattctgtttagccacaggtgtaatcatcagcggcgtacgcgaggcagggagctaatcaggcatagtttgcgtcaaaccttgcctgtttttaaagatgtatatagaaaaacaggcattcaacaagccattttgcgaacctgttcccggaaaaatgtcatatttctgtcacactctttagtgattgataacaaaagaggtgccaggaatgaacaaaacgctaatcgccgcaactgtggcagggatagttttactcgcttcaaatgctcaggcacaaaccgtaccggaaggctatcagctacagcaagtgctcatgatgagccgccataacttacgtgcgccgctggcgaacaatggcagtgtgctggagcagtctacgccgaataaatggcccgaatgggacgtccccggtgggcaactcaccaccaaaggtggcgtgctcgaagtgtatatgggccattacatgcgtgaatggctggcacagcaggggatggtgaaatcgggggaatgcccgccgccggacaccgtttatgcctatgccaatagtctgcaacgtaccgttgcgaccgcacagttctttattaccggcgcattcccggggtgtgatattcctgtgcatcaccaggaaaaaatgggcactatggacccaacctttaacccggtgatcaccgatgattccgccgcattcagtgaacaggcggtggcggcaatggagaaagagctcagcaaactccagcttaccgacagctaccaactactggaaaaaatcgttaactataaagattcccctgcctgtaaagagaaacaacagtgttcgctggtggatggcaaaaatacctttagcgccaagtatcaacaagaaccaggtgtttccgggccgctgaaagtcggcaactcgctggtagatgcgtttactttgcaatattacgaaggttttccgatggatcaggtggcctggggagaaatcaaatctgaccagcagtggaaggtgttgtcgaagcttaaaaacggctaccaggacagcctgtttacctcaccggaagtggcgcgcaatgttgcgaaaccgctggtcagttatatcgacaaagctctggtcaccgatcgcaccagcgcaccgaaaattacagtgttggttgggcacgactccaacattgcctctctgttaacggcgctggatttcaaaccgtatcagttgcatgaccagaacgaacgcacgccgattggcggcaaaatcgttttccagcgttggcatgacagcaaagccaatcgcgatttgatgaaaattgaatatgtgtgtcagagtgcggaacagttacgtaatgccgatgcgttaaccctgcaggcacctgctcagcgtgtgacgctggaattaagcggttgcccgatagatgccaacggtttctgcccaatggataagtttgatagcgtgttgaatgaggcggtgaaataacagaaaactcccccgcgagaagtgggggagtcgctggttaaacgtttttacgttcgatggtctgttcgccccaaaaaagcgaatctttatcggtcttagcaaaggctttgactaacacttcatcgctaccttcttcccaaatcttttccgccattttttcgtcgtacccggcgacttcgaaaatggcctcggctatttccggcgacgtattgcgcagagatgcccattcaccgacgtgatgagctttcgcttcttgagttggcatgcgtatcctcctgttgaagattagccgttaagtttaactgccagacctgcgacatattccccttgataacgagcaatagacagttcttcctggcttggctggcgtgagccgtcaccgcctgcgatggtggttgcgccgtacggcgtaccgccgcgaacctgtgaaacgtcaaataattcctgcgctgcgtagccaatggggacaattaccatgccgtgatgcgcaagggtcgtccaggttgaagtaatagtttgttcctgaccgccgccagtaccggtggaactaaagacgctcgccagttttccgtatagtgcgccggaagcccacaggccgcccgtctggtcgaggaaggtacgcatttgaccggacatgttgccaaagcgggtaggtgtaccaaaaataatggcgtcgtaatcggccagttcttgcggggttgcaaccggtgcagtttgcgttttaccgcctgctttttcaaataattgcggcggcatggtttccggtacacgcttaacgacaacttctgcgccatcgactttgcttgcaccctcagcgactgcgcgtgccatcgtttcaatatgtccgtacatggaataataaagcaccagaactttagccatttctaaccactcctcgtgttatctctattccgtagcgattcgctaccacttatttaaagataagacgtccttttcagagtgcaaatttcacaaccacttatttgatttataacaactttcacaagcacgtaattttgtcgcaaaatgacacatttttatctcatcgcgtttttttaatcataagagcggcttatggataattatttgagatgatatctattctcgctaagaagctgttgcaggatattaccaaacgcgggtctgcccgcgtcagttcactaagcttagtcccacgtagcgaaaatatggcagccgccatacgccgcgttaattctatgcaatatgatgtctatacccagacggaggtcagtaatggcaaaccatcgaggcggttccggcaattttgcagaagaccgcgaaagagcatcagaagcaggtaaaaaaggtggacagcacagcgggggtaatttcaagaatgacccgcagcgcgcatctgaagcaggtaaaaaaggtggcaagagcagtcacggcaaaagcgacaactagccgggctaatcaatgacgaatgcatttttttcttaggctcgtcaaaaagtcatcaccgccggtaatcccggcggttttctgtttatggctcctgatgaacaacttctggcggtggaacgtcaaccaactttctgcttaacaacgcattgagtaaaatcgcgccaaaggttgctgtaccaatccctcccaacgtaaaaccgcccagcgtgagagcaaaatcacccgcgcccagcactaaggttactgcgaccataatcaaattaccgttctggcttaaatcgacacggttttgtacccatatccttgcgcctgcgacggcaatcagcccgaacacaacaattgatgcaccaccaatcaccgcggccggaatggtatgaatcagcgcgccaaatttcggtgaaaagcccaacagcatggcgatgacggcagcagcgacaaacaccagcgtcgagtagacttttgtcacggccattacaccgatattctcggcgtaggtggttacgccgctgccaccgacagaaccagaaagcatcgtcgccagcccatcaccgacgaatgcccgccccatatacgggtccatattgcgtccggtcatcccggcgaccgccttgagatgacctaagttttccgccaccagaatcaccgccacgggcgcaatcagcatcattgcctgactattaaaagcaggagtggaaaaatgtggcaaaccgaaccaggcagcatggctgacgagagtaaaatcgacggcttttcccagccctaaaaggttggtcatcacgccatacagcagacaggcgacaattaaacctacgagaatcaataaccgctggatcatgccacgggtaaacaccgccaccagcccaatacacagcaccgtcattaccgccatccagctatcaaaggccgaagccgatacacttttcactgcgataggcgctaagttcaggccaatcgccatcaccaccgcacccgtcaccaccggcggcattagtcgttcaatccagcgtgtaccgattttcatcaccaccaggccaatgacggtataaaccagcccacaggcgataatcccgcccagcgcaatgctgatattcgggttaatgccctgaccgttaaagcccgtcgcggcaatcaccacgccgacaaaagccgcgctggaaccgagataactggggacgcgcccgccggtaataaagaaaaacagtaacgtgccgacccccgacattaaaatggaaaggttaggatccagccccataagaatcggcattaacaccgtcgcgccaaacatcgccaccgcgtgttgaacgcccattattgccgtctgagcaaacggcaatcgttcatccggcgcgaccacgccgctctctgtagaggtcgattttaactgccagtgaggaaaaccgaacattgccatcagctgtctccttaaggaggttaacaagcagggcgcatcagcgcgtgataactgcgatcgaaccacaccagcccgtagggtgtggcgtgacgatgaatcgcttcgatggcgcaaaacagaatgtcgtgggtgccgacgctcaccacctggctgatacggcagtcaaacgaaaccagagcctcttccagttgcgggcatccggtcacacccgtctgccagcgggcggcggcaaagcggtgttccatgggcgttttgccgccaaaaaggttggaaagcggctcctgcccggcgctaagtgtatttacacacagcgttcgattttcattgaataccggccagacggacgccccacgattcaggcacaccagtaatgtgggcggcgtgtcggtcacgctgcagacggcgctggcggtgaacccggcgcgcccggctggaccgtccgtggtgatgatattgaccgccgcgcccatacaggacatcgcatcgcgaaaggtttgttgatcaactatgttcatagtttgctccttacaacagcccgcaggcttcttcaaaggacagacgtggcaggcgcgcataaagtttgctgttatcgccatagccgatgttaatcagcagattgctcttcagcgtgctgcctgcaaaaaaagcgtcgtcaacgtattgacggtcaaaacccgacatcgggccggtatccagtcccagcgcacggcaagcgacgatcagataggccgcctgcatggaactgttgcgaaacgctgtttcttcggcaagttgtgggctggaggtaaaccaactgcgggcatcaccgtggggaaacagtagtggtaaccgttcataaaattcactgtcccaggcgacgatagcggtgacgggcgcggtcagggttttttgcagattgccgctggaaagcgccgggcgcagacgttcttttccctctgcagtgcggataaacacgatacgtgccggagaacagttagctgatgtcggcccccatttcatcagggcataaagctcccgtaacgtctcatcgctgacgggtgtctcccgccagccattgtgagtgcgggcatcggtgaacagggtgctaagcgcacctgggctaacggcttcgttcatagcaattccttacagggcggcttcacggtgatgtaacaggctggcaagcccgttgagtaacagagcattaaacgtttcgggatcggtcacgttgcaggcgtgtccgccatagcgcatcaccattttctggctatcgggcagggcggcatgaagttcactggaacatgctgatggcaccagcagatcatcactggcgcagatgatttgcaccgggcagcggatgcgaaccgcatgatgactaaagtcagcgcgtttgagggcgttaagtcgacgcagtaaattatttttgccctgaaaatgcgccagtgccagcgcgtcttctgcctcaaggcgaggtgcgcgggccgccatccagtcggcgggatagaggaacaacggctgcgcttccacccatgcctgcgcgccgccgctatacagtaatcgttcgcgaacctgaaaacagcggcgcgtatgggcgtttattcgtaaccagccgttaacgcagaccagcacagttaccgacgcgggataatccagcgccagctgcatccccaccagcgcaccgagcgcatggccgaccactgcgtaatgctcaatccctgcggctaccagcgcctgatgcagttccgctgccatctgggcgatactgtaatcttctgccagcgtgtcgggattattgccggtgccgcgctggtcgtaacagactacctgatactcctgctccagcaccgccagttgcggtaaccagtaactgccgctaccgccaagacccgaaatcaacaccactacgggtgcatcagcataagggggaggtgagagtgatagtttcatcgcggcctcacttggcgatatgcgcaattgtggcgatttccaccagcgcgtcaggttttaccagtccgcactgaatgcagaatcgcgccggtttatcacccggaaaaaactcggcgtagatttcgttaatcgcggcgtaatttttccagtcggtaataaagatgctgttgaaggtcacatccgccatcgtgccacccgccgtctcgatcaccgtgcggatagtttccagaacgtggcgggtttgcgcctttgggtcatcggcaaacagcacgttattatgttgatcaaaagccagcgtaccggagacatacaccacgccatcagccagcgtgccgggaacgaagggggccagcggtgcgctgctgccagcgggaataattacggattttggcatcgttaaactccttaagcgatacgagcaaaggacgtgggagaaagcgcgtcgcagaacgtttcgacgtcgctgacccagccaaaaaaggtttcgatattgaacaacgcggctttctgtacaaattccggccccgcctggtgtgttgcgtcttccagcaccacgccgaaatactccagaaaaaagccatcgcgtagcgtcgattcgacgcagacgttggtagcgataccggtgaaaaccagatggcgtattccacggctgcgcaaaatgctgtccagcggcgtattgaagaaaccgctgtagcgcggcttcggcagcacaatatcgccaggctgcggcaccagttcatccaccagttgataatcccaggagcctttcgccagcaatttcccctgcagctgcggctgcttacgcatggttttcagggcgttcgatttatgaaaattcggtgagccgggtccgcctgcttcgacatactgttcatcccagccattttgaaaccagatgatcagcatccctgccgctcgcgctgcggtcacggcggtttgaatgttggcaatgaccgggcgagtggttgagacatcaaacccggcgagatctaagtagcctcctggcgtggcataagcgttttgcatatccaccacgatcagcgcactttgctgcggatcgaaggtaatggcttccggtcgagcggttaaggtcgtcatcatgccacctcctgagtcagcgcagggagatgggcgcggcactgcatcagtggttgaatgcgctcgccgaaggtttcgattcccgacagaaaatcatcgaaggtcaacagcacgccttcggcaccaggcacgcttgcgacttcatctaacatgcgcgcgacactggcgtaagaaccgactaacgtccccatattgatgtttaccgccgaagtgggatcggccatctgacggacgttggtgtcagtaccggagcgggtatctttctgactttgttcggttagccagcttaacgcctcttcatccgcgcccgctttgtagtgttcccatttggcgcgagcggcatcgtcggtttcatcggcaatcaccataaacaatacataagagccaacgtcgcgcccggtttgctctgcggcctgtttcatccgcgcagcggtcggggcgaaagccgtgggtgtatttacgcctttgccgaaacagaagttgaaatcggcatactgggcggagaacgccatgccagcgtcgctttgcccggcgcagatcactttcatgggtacactcggttgcggactgacgcgacaatcattcatggtgaaaaaatcgcctttaaaatcgcttttccccgagccccacaggtcgcgcagcacctgaacatattcggtgagatagtcgtaacgacgggagaaatagtcatcgccaggccagatacccatctgctcatactcgggcttttgccagccagtcacgaggttgacgccaaaacgcccgccagagatggagtcaatggttgcggccatacgggcgacgattgccggaggtaacgttaaggtggcagctgtcgcgtaaatctgaatgcgtgaggtgacggctgccagccccgccatcaaggtgaacgactcaaggttgtgatcccagaactcagttttgccgccaaagccacgcagtttgatcatcgacagggcgaaatcgaaatggtagtgctccgctttttgcacaatggctttattcagttcaaaggtcggcatgtactgcggcgcgtgggtcgaaatgagccagccgttgttgccaataggtgcgaatacgccaattttcatcatcaacctctcttcgtctcgtaaagtgaaagtcagacggggcactgcgtcctgcatatccttttcagccgcgtaatggcttgtttgcaaagtggatgccagtttttaaaaagtgaatgttattaatgtgttaatgctaagttatctaaaatatctggtaaaaagtggactaaacggtcaaaacagttgcacataaaacatgcatccgtgcgcgatgagagtgcagaaggtcgaggccggacgggggttttgctatcctgttgccaatctacaagaggggagagcgcatgacgcaaggcgcagtcaaaacaacgggtaaacgttcgcgtacagtaagcgcgaagaaaaaagcgattcttagcgcagcgctggacactttttcacaattcggttttcacggcacaaggctggagcagatcgcagagttggcgggtgtttcaaaaaccaatctgctgtattactttccgtcaaaagaggcgctgtatattgccgtgctgcggcagattctcgatatctggctggcaccgttaaaagcgtttcgtgaagatttcgccccgctggcggcgatcaaagagtacatccgtctgaagctggaagtctcacgcgattatccgcaggcttcgcgcctgttctgtatggagatgctggcaggcgcgccgttgttaatggatgaactgacgggcgatttgaaggcattaattgatgagaaatcggcgctgattgccggttgggtcaaaagcggcaaactcgcgccgattgatccgcagcatttgatttttatgatttgggcttccactcaacattacgccgatttcgcccctcaggtggaggcggtgacaggcgcgacgttgcgcgatgaggtatttttcaatcaaacggttgaaaacgtgcagcggattattattgaggggattcgaccacgttaaagatgccggaggaggttgtaacatcctccggctacctgtttaacctatagtcattaagctggcgttaccgccagcggcagcggtattcacactcagcgaacgctcgatatacagccgttccagaaggatattgctttcgccacgggcaaaaccctgcaccgaaacaattgcgccatcccgcgcggcaacggcttcacacaatgcgcgaagctgatccgaatcaccgtggaagatcaccgcatcaaacggttgagcggttatattttccgctttcgccagttgaatacgttcgctgactgccgatggcaatgccttcactagctgacgatgcagcgcgtcatccggccacagtacctggctgcccaccgccagcacggcggcgagctgagtcagcgcatcctgctcatcatcggcaatacacaacacgcgctcacgcggcagcagcgtccaggtgttgcgttcacccgtcggccccggcagcaatcgttgtgttcctgcctgcgccagctcgccatattgcgtacataacgcctgcaattctggacgatttgctgcccattcccgcagtgcatttagcggctgagtcaatgcggctttcaactgtgcatcgaccggatactctgcatcctgacgcgcgagcgtcactgccagcgcactttccgggcgattcgccagcagacggtagagatagagcggaccgcctgctttcggcccggtaccggacaacccttcgccgccgaatggctgcacacccaccactgcgcccaccatattacggttaacatacaggttaccaacatgggccgagccagtgacctgggcgatggtttcatcaatacgcgtatggacaccaagcgtcagaccatagccggaagcgttaatctgctcgatcagctctggtagctggttacggttgtaacgcaccacatgcagcaccggaccaaagacctctttttgcaattcggcaaagtcatccagttcgatcagcgtcggggcgacaaaggtgccgctttgccattcacgggcatcttcgctgttttcccgcaccgcctggaacaccggacggcctttgctacgcatggtctgaatatggcgctcaatattggctttcgcttcgctatcaatcaccggaccgatatcggtagtcaggcgacccggattacccatccggcattcggccattgcaccgcgcagcattttcaacgtgtggtcggcaatctcatcttgcaggcacagcacgcgcagtgccgaacaacgctgacccgcactgtcgaacgccgaggccagcacatccacgacgacttgttcggtcagtgctgaagaatcgacaatcatcgcgttcatgccgccggtttcagcgatgagcggaatagggcgaccctgagcgtccaggcggctggcgatattgcgctgcagtaacgtagcgacttcggttgaaccggtaaacatcaccccgcgcacgcgatcatcacccgtcagttgcgcgcccacggtttccccctgacctggcagcaattgcaccacgccagggggtacacccgcttccagcaaaatggcgatcccttgcgcggcaatcagcggcgtttgttctgccggttttgccnnnnnnnnnnctgttacctgccgccagtgcggcagcgatctgcccggtgaaaatcgccagcgggaagttccacggactgatacacaccacaggccctaatggacggtgggtttcgttagcgaaatcatcccgcacctgtccggcatagtagtggagaaaatcgaccgcttcgcgcacttcggcaatggcgttactgaaggtttttccggcttcacgcaccagaataccaatcagttgctgcatctggctttccattagcacggcagcgcgatgcaaaatcgccgcgcgttcaaccggaggagtggcaaaccagattggcgcgttattaaccgcactttccagcgcctgttctacttcacgcggcgtggcttcacgcacaaagcccacaatatctttcggttccgcagggttaataacgggcgacatctcacctgccgctaccggttgttccagcatgggcaaggcctgccatttttgcagtgcactattgagcagggcagaagagagcgaggccagccggtgttcgttagcgagatccagccctgccgagttgtcgcgcccgtgaccgtaaagatcgcgcggcaggggaattttcggatgcggtaatccagtttgcccttcctgttgcgccagtttttctacagcagtgaccggatcggcgaccagttcatccagtggcaaagaggtgtcggcaatacggttaacaaacgaggtgttagcaccgttttccagcaggcgacgcaccagatacgccagcagcgtttcatgtgtgccaaccggagcataaatacgacacggacggttaagtttgccgtcggcaactttcccggtgacctgctcatacagtggctcgcccataccatgcaggcactggaactcgtactgacccggatagtagttttgacctgccagttgataaatcgctgccagcgtatgggcgttgtgcgtcgcgaactgcgggtagattagattcggcaccgccagcagctttttcgcacaggcgagatatgaaacgtcggtatacaccttgcgggtataaaccggataaccttcaaggccgtccatctgcgcacgcttgatttcactatcccagtacgcgcctttcaccaggcgaatcatcagacggcgacggctgcgggtggcgagatcaatcaggtaatcgatcaccaacgggcagcgtttttgataagcctgaataacaaaaccgatgccgttccagcctgccagttccggctcgaaacagagttttccagcagatcgagggagatctccagacgatcggcctcttcggcatcgatgttaataccaatatcgtactgacgcgccagcagggtgagtgatttcagacgcgggtaaagctcttccattacccggtcatactgggcgcggctataacgcggatgcagcgccgacagtttgattgaaatgcccggcccttcatagatgccacgaccattggacgctttaccaatggcgtgaatcgcctgctgataggaaaccatatacgcctgtgcatctgcggcagtcagtgcagcttcgccaagcatatcgtaagagtaacggaaacctttctcttccagcttgcgggcattggctaacgcttctgcaatggtttcacccgtgacgaactgctcgcccatcaggcgcatcgccatatccacacctttgcggatcagcggttcaccgctcttaccgataatgcggttcagcgagcgggagaggctggcttcgttatgggtggaaaccagtttgccggtaaacagcagcccccaggtagcggcattaacaaacagggacgggctacgaccaatgtgtgactgccagttaccgttgctgattttgtcgcgaattaatgcatcccgggtggctttgtcgggaatacgcaacaacgcttctgccagacacatcagcgccacaccttcctgcgatgacagcgaaaattcctgcaataacccctgaaccatgcctgcgcgaccactggcatttttttgattacgcagtttatcggccagttgatacgccagtttgtgcgcctgttcagcaactggctgcggcaggcgggcttgttccagcagcatagaaaccgcttcggtttccgggcggcgataggccgctgtgatcgcggcgcgggaaaccgactggggcaatatttgctcggcaaagtcgaggaatggctggtgtggttcctctgccggagtcggtgcttcatcgctctcattggccgcgccagaaagcagcgcaggtagctccggcagagtatcgctgttttccagttgttcaagataagaaaaaatcgcctgcttaattaaccagtgtggtgtgcgatcgatacgtgtcgcggcagacttaatacgctcacgcgtcgcgtcgtccagcttaacccccatggtggtggttcccatgccattactcctgttgttctgaaaggtgcaacttaacgttatcgtgaaatatccatgatgttgcaactttgtgcaaccatgttaaatgtgacctgcgtagcaagcttaaaaatgaatgaaatgttaataaaagaaatcgatatgacagggattaaaaaataactcagactttttctctgcggcagttaacatttttgaaaggtgcaaccgcaaaaaatgtgagagagtgcaacctgatgaaaaatagtgtcgctgagcactaaaatttaatgtaaatggtgtgttaaatcgattgtgaataaccagcgcttccggcaggatacggtcgccctggtaaaacataaactctgttaccccgttccggtggcagatataacggcaagtttcgacattgccgataataattttttggagactttagatggctattagcacaccgatgttggtgacattttgtgtctatatctttggcatgatattgattgggtttatcgcttggcgatcaacgaaaaactttgacgactatattctgggcggtcgtagtcttgggccattcgtgacggcattatcggcgggtgcgtcggatatgagcggctggctgttaatggggttgccgggcgcggtttttctttccgggatttccgaaagctggatcgccattggcctgacattaggcgcgtggatcaactggaagctggtggccgggcggttgcgtgtgcataccgaatacaacaataacgccttaacattgccggattatttcaccgggcgctttgaagataaaagccgcattttgcgcattatctctgcgctggttattttgctgttcttcaccatttattgcgcttcgggcattgtggcaggcgcgcgtctgtttgaaagtacctttggcatgagctacgaaacggctctgtgggcgggcgctgcggcgacgatcctttacacctttattggcggtttcctcgcggtgagctggactgacactgtacaggccagcctgatgatttttgccctgatcctgacgccggttatcgtcattatcagtgtcggtggctttggtgactcgctggaagtgatcaaacaaaagagcatcgaaaacgtggatatgctcaaagggctgaactttgttgccattatctcattgatgggttgggggctgggttacttcggtcagcctcatattctggcgcgttttatggcggcggattctcaccacagcattgtccatgcgcgtcgtatcagtatgacctggatgatcctctgcctggcaggggcggtggctgtcggcttctttgggattgcttactttaatgagcacccggcggtagcaggtgcggtaaaccagaacgctgaacgtgtgtttatcgaactggcgcaaattctgtttaacccgtggattgccgggattctgctgtcggcaattctggcggcggtaatgtcaacgttaagctgccagctgctggtgtgctccagtgcgattaccgaagatttatacaaagcgtttctgcgtaaacatgccagccagaaagagctggtgtgggtagggcgtgtgatggtgctggtggtggcgctggtggcgattgcgctggcggcaaacccggaaaaccgcgtgctgggcttagtgagctacgcgtgggcaggctttggcgcggcgtttggtccggtggtgctgttctcggtgatgtggtcacgcatgacgcgcaacggtgcgctggcggggatgatcatcggtgcgctgacggttatcgtctggaagcagttcggctggctgggactctacgaaattattccgggctttatcttcggcagtattgggattgtagtgtttagtttgctgggtaaagcgccgtcagcggcgatgcaaaaacgctttgccgaggccgatgcgcactatcattcggctccgccgtcacggttgcaggaaagctaagggacttagcctgcggcggttttgtttggcttcagcagcgggttgcgctcccttaatgtgcctcgccatataaattgaatggtgcagggagcgcgcagggggcggccaatcgccgccgccccctgctgtcccggccttcggggaacgcttcagcgattttgacgccaccaacacccgagctgttattatgttccgggcaaaaagttagatttgataatcgcggatggacgaaattgcttgatacacccgcttatcagttttacatggaagctctgatgcattgagtctggacagttttgtcggctggatacggcgtttacgcggcatccggcaagaacacatggttctttgcaaacaatcccatctttctaccctggaataatcgtttatatcccttggcattacctctctttgtttacattccaacatcattttataaacattccgcttgtatttttctttgccgtaatgataatcgctatcactgcgatttacttttctttgcatagattgactcagaaaaacgtttaagggtgggtggcatgtttgttccgtttctcattatgttgcgcgaaggacttgaagccgcgctgattgtcagtttgattgccagctatcttaagcgtacccagcgaggccgatggattggtgtgatgtggattggcgtgttgcttgccgctgcgttgtgcctgggcctgggtatcttcattaacgaaaccaccggcgaatttccgcaaaaagaacaggaactgtttgaaggtatcgtggcggtgatcnnnnnnnnnnggtgatccttacctggatggttttctggatgcgcaaagtgtcgcgcaacgtcaaagtgcaactggaacaggcagtcgatagcgcattgcagcgtggaaatcatcatggctgggcgctggtgatgatggtcttttttgccgttgcaagggaagggctggagtcggtctttttcctgctggcggcatttcaacaagatgtcgggatctggccgccgctgggtgcaatgctcggtcttgctactgccgtggtgctcggcttcctgctctactggggcggtattcgcctcaatcttggtgcattttttaaatggaccagcctgtttattctcttcgtcgccgcagggctggcggctggtgccattcgcgcatttcatgaagccggattgtggaaccactttcaggaaatcgccttcgatatgagcgcggtcctctcaactcactcgctgtttggcacgctgatggaagggatttttggctatcaggaagcaccgagcgtcagcgaagtcgccgtctggtttatttatctcatcccggcgctggtggcatttgccctgccaccacgcgcaggggcgacagcgtctcgctccgcgtagcaaatacgacgcaaactcttgcttagttacaacatactttaaagggatagtctcgtcatgaccattaacttccgccgtaacgcattgcagttgagcgtggctgcgctgttctcttctgcttttatggctaacgccgctaatgtgccgcaggtcaaggtgaccgtgaccgataagcagtgcgaaccgatgaccattacggttaacgccgggaaaacacagttcattattcagaaccacagccagaaggcgctggagtgggagatcctcaaaggcgtgatggtggtggaagagcgggaaaatatcgcccctggctttagccagaaaatgacggcgaatttacagcctggcgaatacgatatgacctgcggtctgctgactaacccgaaagggaagttgatcgtcaaaggtgaggcaacggcggatgcggcgcaaagtgatgcgctgttaagtcttggtggtgcaattactgcatataaagcgtatgtcatggcggaaaccacgcagctggtgaccgacacgaaagcctttactgacgctattaaagcaggcgatatcgaaaaagcgaaagcactgtatgcgccgacgcgccagcactatgagcgcatcgaaccgattgctgaactgttctccgatctggatggcagcattgacgcccgtgaagatgattacgagcaaaaagccgccgatccgaaattcaccggtttccaccgtctggaaaaagcattgtttggcgacaacaccaccaaaggcatggatcagtacgctgaccagctttataccgatgtggtcgatttgcaaaaacgcatcagtgaactggctttcccaccttcaaaagtggtcggcggtgcagccggactgattgaggaagtggcagccagcaaaatcagcggtgaagaagatcgctacagccacaccgatctgtgggatttccaggctaacgttgaaggctcgcagaaaattgtcgatctgctgcgtccacaactgcaaaaagccaacccggaactgttggcaaaagtcgatgccaactttaaaaaggtcgataccattctggcgaaataccgtactaaagacggttttgaaacctacgacaaattgaccgatgccgaccggaatgcactgaaaggaccgattactgcgctggcggaagatctggcgcaacttcgcggtgtgctgggattggattaagcattatgcagtatgaagataaaaacggcgtgaatgaaccgtcacgccgacgtttactgaaaggcattggtgcgctggcgctggcgggaagttgtccggtcgctcatgcacaaaaaacgcaaagtgcgccgggtacgctttcaccggatgcacgcaatgagaaacagccgttttatggtgagcatcaggcagggatcctgacgccacaacaggccgcaatgatgctggtggcgtttgatgtgcttgccagcgataaacccgatcttgaacggttgtttcgcttgttgactcagcgttttgcttttctgactcagggcggagcggcaccagaaacgccaaatccgcgcctgccaccactcgattccggcattcttggcggctacattgcgcccgataatctcaccatcacgttatcggtgggtcactcattgtttgatgagcgctttggccttgcgccacagatgccgaaaaagttgcagaagatgacgcgttttcccaacgactcgctggatgcggcgttatgtcatggtgatgtgttgctacaaatttgcgccaacacccaggacacggtgatccatgcgctgcgcgatatcatcaaacatacgccagatttgctcagcgtgcgctggaagcgggaagggtttatttccgatcacgcggcgcgtagtaaaggcaaagagacgccgattaatttgctgggtttcaaagacggcactgccaatcccgatagccagaatgataagttgatgcaaaaagtggtgtgggtaacggcagatcagcaggagccagcgtggacaatcggtggcagctatcaggcagtacgcttgattcagtttcgagtggaattttgggacagaactccgctgaaagaacagcagacgatttttggtcgtgataagcaaaccggtgcgccgctgggaatgcagcatgagcatgatgttcccgattacgccagcgatccggaagggaaggtgattgcgctggacagccatatccggctggcgaatccccgcacggcggagagtgagtccagcctgatgctgcgtcgtggctacagttattcactgggcgtcaccaactccgggcaactggatatggggctactgtttgtctgttaccaacacgatctggaaaaaggcttcctgactgtacaaaaaaggctcaatggcgaagcgctggaggaatacgttaaacctatcggcggcggttatttttttgcgctgccgggagtgaaggacgcgaacgattatctcggaagcgcgttattgcgggtttaatgtttatagacggataaggcgttcttgcgcagatgcctgatgcgatgcttgcgcgtcttcttatgcctacaatcggtgcgggttcggtaggcggataaggcgttcacgccgcatccggcgttcgtgcgcagatgcctgatgcgaatcctgctgaaagcacacagcttttttcatatctgtcatcactctgtcatctttccagtagaaactaatgtcactgaaatggtgttttatggttaaatataagtgaatatattgttgcaatgaatgcgagatctgttgtaattattaagtagcagcggaagttcccggcagtgatagtcagtcactatggagatcgcggatggtaacgtcctgttctggacaatgtcttgttaagctacgctccaccacttgcggagatttctcctccggtagcaacttcgtcactctgtatttttctcacttcctctctttactcgtgttaccgacgccgcaaacggtgtgcgtagccgtttttcggcattttatccaaaagcaaactatggcttacaaggaagccaaccctctgatgttcgtgcgcataatcgcgctgccaacggcgcgtgtgatgaatacaaacaactcaaggtgctctccatgggaagacaaaaagcagtgatcaaagctcgtcgtgaggcaaaacgtgtgctgagacgggattcgcgcagccataagcagcgtgaagaagaatcggtcacctcgcttgtgcagatgggcggcgtagaagccattggtatggcccgcgacagtcgcgatacttcgcccatcctcgcgcgaaatgaagcgcaattgcactatctgaaggctattgagagtaagcagctgatattcgccacgggcgaagccgggtgcggaaaaacctggatcagcgcagcaaaagcggcagaggccctgatacataaggatgtcgacaggattatcgtcacccgtccagttctgcaagccgatgaagatcttggcttcttacctggagatatcgcagaaaagtttgctccctattttcgcccggtctacgacgtgctggtccggcgcttaggggcttcctttatgcagtactgcctgcgaccggaaatagggaaggtggaaattgcgccgttcgcctatatgcgtggacgtacctttgaaaatgcagtcgtcattcttgacgaggcgcagaatgtgactgccgcgcaaatgaaaatgtttttaacccgcctcggggagaacgtgacggttatcgtcaacggtgatatcacgcaatgcgatttgcctcgcggcgtgtgctccggattaagtgacgcgctggaacgtttcgaagaagatgaaatggttgggatcgtccggttcggtaaagaggactgcgtacgttcggcactttgccaacgtacgctgcatgcctacagttaagtgtgttatcggtgcagagcccgggcgaaccgggctttgttttgggtgtttatgcccggactagcgctttttctgaaacaaccatttttatttgcccctggctggtgaagtgtacgctcatcctgtggcttttttgtagttgctgatagagctcatcaggtattgctaagctctctgcatattcttgcggcgtatattggtaggctgcatgatgctgctgtttttgaaaacgcagcttattgtacagcgcccagacaattaacacgacggcattcgccactgccagcaaaaaatagaactgaagtcggcttctggcctcgctttgccagtaataacccgtcagcagatccatggcgaataagaatatgaacaacgcaaataatgtccacaagatggttgtggcaacataatcaaccagtaaacgtactggtgattgtcgggtcgtaataattaaattgttcatattaacctctcagaatcccgcgatcgggacttacccaacgggcgcgttgctttttaggcatcaacatgactcgtgtaaatgataccaatgtcgttgccaggctcagcatccagaaaataaccgggaaccaaataatccagaaaagcgatgaagtcagattatgctcatagcgattctcgatcatcaggctgacaataaattgcagtaaacataacgtacacaataatattccggcagtatgtgtcgcagcgatatgtgtcaattcaatatttaacggtacaccggcaagttggactgcgtaaataatgaaaccgaccaggcaggtgaaggcccatattgtcgtcaggcagtattcaaaaaacagcggccacattcgaaagttttctttgcgccacaaccttgtcatatttttgaggaatacttctgcaccgccctgagcccagcgcaggcgctgtttccacagcccttttaacgtttcaggcattaatatccagcacagtgcccgtggctcgtaaaaaatcgtccactgattcaactgcagcttccagctaatatcaatatcttcggtgatcatatcgtcactccagtaacccacttctgccagggcgctgcgacgaaatgcggcaataacaccggaaacggtaaatacgtttccatagatacgctgggttcgcttgatcaaaccaataattgaggaatactcgccaacctgaattttacccaccagggtagaacgtgttcgaatacgaggattaccggttacggcacccacacgcgggttgtacaacatcggttccacaatatatgccgccgcatcgcggtctaataacgcatcgccatcaatgcacaccagatactgagagatcccctcataatttccccaaagcgtaaccatgtgtgaataaattttgagctagtagggttgcagccacgagtaagtcttcccttgttattgtg

SEQ ID NO: 194 - DNA, 37247 bp, Escherichia coli
  source 1..37247: mol_type = genomic DNA
atttatagcaaaagtggcgagccacccttaatggacgaatactatgggcaaagcagtcattgcaattcatggtggcgcaggtgcaattagccgcgcgcagatgagtctgcaacaggaattacgctacattgaggcgttgtctgccattgttgaaaccgggcagaaaatgctggaagcgggcgaaagtgcgctggatgtggtgacggaagcggtgcgtctgctggaagagtgtccactgtttaacgccggaattggcgctgtctttacgcgtgatgaaacccatgaactggacgcctgtgtgatggatggtaacaccctgaaagccggtgcggtggcgggcgttagtcatctgcgtaatccggttcttgccgcccggctggtgatggagcaaagcccgcatgtgatgatgattggcgaaggggcagaaaattttgcgtttgctcgtggcatggagcgcgtctcgccggagattttctccacgcctttgcgttatgaacaactactggcagcgcgcaaggaaggggcaaccgtcctcgaccatagcggtgcgccactggatgaaaaacagaaaatgggcaccgtgggggccgtggcgttggatttagacggcaatttggcggcagccacgtccacaggcggaatgaccaataaattacccggacgagttggcgatagtcccttagtgggtgccggatgctacgccaataacgccagtgtggcggtttcttgtaccggcacgggcgaagtcttcatccgcgcgctggcggcatatgacatcgccgcgttaatggattacggcggattaagtctcgcggaagcctgcgagcgggtagtaatggaaaaactccctgcgcttggcggtagcggtggcttaatcgctatcgaccatgaagggaatgtcgcgctaccgtttaacaccgaaggaatgtatcgcgcctggggctacgcaggcgatacgccaaccaccggtatctaccgtgaaaaaggggacaccgttgccacacagtgatgaacttgatgccggtaatgtgctggcggttgaaaatctgaatattgcctttatgcaggaccagcagaaaatagctgcggtccgcaatctctcttttagtctgcaacgcggtgagacgctggcaattgttggcgaatccggctccggtaagtcagtgactgcgttggcattgatgcgcctgttggaacaggcgggcggtttagtacagtgcgataaaatgctgttgcagcggcgcagtcgcgaagtgattgaacttagcgagcagagcgctgcacaaatgcgccatgttcgcggtgcggatatggcgatgatatttcaggagccgatgacatcgctgaacccggtatttactgtgggtgaacagattgccgaatcaattcgtctgcatcagaacgccagtcgtgaagaagcgatggtcgaggcgaagcggatgctggatcaggtacgcattcctgaggcacaaaccattctttcacgttatccgcatcaactctctggcgggatgcgccagcgagtgatgattgcgatggcgctgtcatgccgcccggcggtgctgattgccgatgagccaaccaccgcgctggatgtcactattcaggcgcagatcctgcaattaatcaaagtattgcaaaaagagatgtcgatgggcgttatctttatcactcacgatatgggcgtggtggcagagattgccgatcgggtactggtgatgtatcagggcgaggcggtggaaacgggtaccgtcgaacagatttttcatgcaccgcaacatccttacacccgtgcgctgttagctgctgttccgcaacttggtgcgatgaaagggttagattatccccgacgtttcccattgatatcgcttgaacatccagcgaaacaggccccccccatcgagcagaaaacggtggtggatggtgaacctgttttacgggtgcgtaatctggtcacccgtttccctttgcgcagcggtttgttgaatcgcgtaacgcgggaagtgcatgccgttgagaaagtcagttttgatctctggcctggcgaaacgctatcgctggtgggcgagtctggcagcggtaaatccactaccgggcgggcgttgctgcgcctggtcgaatcgcagggcggcgaaattatctttaacggtcagcgaatcgataccttgtcacccggcaaacttcaggcattgcgccgggatattcagtttatttttcaggacccttacgcttcgctggacccacgtcagaccatcggtgattcgattatcgaaccgctgcgtgtacacggtttattgccaggtaaagaagcggctgcacgcgttgcgtggttgctggagcgcgtgggcctgttacctgaacatgcctggcgttacccgcatgagttttccggcggtcagcgccagcgcatctgcattgctcgcgcgttggcattgaatccaaaagtgatcattgccgacgaagccgtttcggcgctggatgtttctattcgcgggcagattatcaacttgttgctcgatctccagcgtgatttcggcattgcgtatctgtttatctcccacgatatggctgtggtagagcggattagtcatcgtgtggcggtgatgtatctcgggcaaattgttgaaattggtccacggcgcgcggtcttcgaaaacccgcagcatccttatacgcgtaaattactggcggcagttccggtcgctgaaccgtcccgacaacgaccgcagcgtgtactgctgtcggacgatcttcccagcaatattcatctgcgtggcgaagaggtggcagccgtctcgttgcaatgcgtcgggccggggcattacgtcgcacaaccacaatcagaatacgcattcatgcgtagataacattcaggcggagaataaaatggcaagagctgtacaccgtagtgggttagtggcgctgggcattgcgacagcgttgatggcatcttgtgcattcgctgccaaagatgtggtggtggcggtaggatcgaatttcaccacgctcgatccgtatgacgcgaatgacacgttatctcaggccgtagcgaaatcgttttaccaggggctgttcggtctggataaagagatgaaactgaaaaacgtgctggcggagagttataccgtttccgatgacggcattacttacaccgtgaaattgcgggaaggcattaaattccaggatggcaccgatttcaacgccgcggcggtgaaagcgaatctggaccgggccagcgatccggcgaatcatcttaaacgctataacctgtataagaatattgccaaaacggaggcgatcgatccaacaacagtaaagattaccctcaaacagccgttctcagcgtttattaatattcttgcccatccggcgaccgcgatgatttcaccggcagcgctggaaaaatatggcaaggagattggttttcatccggtgggaaccggaccgtatgaactggatacctggaatcagaccgattttgtgaaggtgaaaaaattcgcgggttactggcagccaggattgcccaaactggacagcataacctggcgtccggtggcggataacaacacccgcgcggcaatgctgcaaaccggtgaagcgcagtttgctttccccattccctacgagcaggccacactgctggagaaaaacaaaaatatcgagttgatggccagtccgtcaattatgcagcgttatatcagtatgaacgtgacgcaaaagccgttcgataacccgaaggtccgtgaggcgctgaattacgccattaaccgtccggcgctggtgaaagttgcctttgcgggctatgcaacgccagctactggtgtggtaccgccaagtatcgcctacgcgcaaagttataaaccgtggccttacgatccagtgaaagcgcgcgaattactgaaagaggcgggatatcccaacggtttcagtaccacgctgtggtcgtcacataaccacagcaccgcgcagaaagtgctgcaatttacccagcagcagttagcgcaggtcgggattaaagtccaggtgactgcgatggatgccggacagcgggcggcagaagttgaaggtaaagggcaaaaagagagcggcgtgcggatgttctacactggctggtcggcttcaaccggcgaagcggactgggcgctatcgccactgttcgcctcgcaaaactggccaccgacgctgtttaataccgcattttacagcaataaacaggtggacgacttcctggctcaggcactgaaaactaatgttccggcggaaaagacccgcttgtataaggcggcgcaggatatcatctggcaagagtcgccgtggatcccgctggtggtagaaaaactggtgtcggcacacagtaaaaacctgaccggtttttggatcatgccagacaccggcttcagctttgaagacgcggatttgcaataagcaacgcagggagtggaatgcttaattacgttatcaaacgcttactggggttgattccgacgctgtttatcgtctcggtgctggtgtttttatttgtgcatatgctgcccggcgatccggcgcgattgattgccgggcccgaagctgatgcgcaggttatagaactggtgcgtcagcagctggggttggatcagccgctgtatcaccagttctggcactatatcagcaatgctgtgcagggggattttggcctgtcgatggtgtcgcgtcgtccggttgccgatgagattgccagccgctttatgccaacgctgtggctgaccataaccagtatggtctgggcggtgatatttggtatggcggcgggaattatcgccgccgtctggcgtaatcgttggccggatcgattgagtatgaccattgcggtgtcggggatctcgtttccggcatttgcgctggggatgcttttaattcaggtattctccgttgaactgggctggctgcctaccgtgggagcagacagttggcagcactacattttaccctccctgacgctcggcgcggcagtggcagccgtgatggcgcgctttacccgcgcgtcgtttgtcgatgttttaagcgaagattatatgcgtaccgcgagggcgaaaggggtgagcgaaacctgggttgtcctcaaacacgggctacgtaacgcgatgatcccggtagtgaccatgatgggcttacagtttggctttttgctcggtggttctatcgtggtggagaaagttttcaactggcccggacttggacgcttactcgttgactccgtagaaatgcgcgattacccggtgattcaggcggaaattctgcttttctcgctggaatttattcttatcaacttagtggtggatgtgctttacgccgccattaacccggctatcaggtacaagtaaggatgcgactatttaactggcgacgtcaggcggtgttaaacgccatgccactggtcaaacctgaccaggtgcgtacaccgtggcatgaattctggcgacgatttcgccgtcagcatatggcgatgaccgccgcattattcgttattttattgattgtggtggccatttttgcacgctggatcgctccctatgacgccgaaaattattttgattatgacaatctgaataacggaccttctttgcagcactggtttggcgtcgattcactggggcgcgacattttcagccgtgtcctggttggtgcgcaaatctcgctggcggcgggcgtgtttgccgtgtttatcggtgcggcgatagggacgttgctgggcttgctggctggatattatgaaggctggtgggatcggctgatcatgcgcatttgcgatgtgctgtttgccttcccgggtattttactggcgatcgctgttgttgcggtgttgggaagcggcattgctaacgtgattatcgcagtcgccattttttccatccccgcgtttgcccgcctggtgcgcggcaacacgctggtgttgaaacagcaaacctttattgagtcagcacgcagtattggtgccagcgatatgaccattttattgcgtcatatcttgcctgggaccgtctcgtctatcgtggtgtttttcaccatgcgcattggcacctcgattatctctgccgccagcctgtcatttctcggcctcggtgcgcagccgccgacaccagagtggggagcaatgctcaatgaggcacgagcggatatggttatcgcgccgcatgtcgctgtttttccggccctggctatttttctgaccgtactggcgttcaatttgttgggcgatggtttacgcgatgcgctggatccgaaaattaaaggatagttacgtttgaatattgcttgaaagggtaatcacctcacaggcaattattgccctaagcaagtgttgtaactttctgctgattttgtagaatcgggtaatttggttaaaaagccgcagcaagggactatttttgcagcggcacagcgttcagatagttattttgttaaatgtattaacatgctgagtttatacgaaaagataaagataaggctgataattttatttttattggcagcactgtcatttattggtctttttttcatcattaactatcaactggtatcggaacgcgcggtaaaacgtgccgatagccgctttgaacttattcagaaaaacgttggctatttctttaaagatattgaacgttcggccctgacattaaaggactcactgtatttattaaaaaatacagaggagattcaacgcgccgtgattctgaaaatggaaatgatgccatttttagactcggtgggactggtacttgatgataataaatattatctcttttcgcggagggcgaatgataaaatcgttgtttatcatcaggaacaagtaaatggaccgcttgtcgacgagtcagggcgggttatttttgccgattttaacccatcgaaacgaccgtggtcggtggcttcagatgactctaacaacagctggaatccggcatacaattgctttgatcgtccgggtaaaaaatgtatctcttttacgctacgtatcaacggcaaagatcacgatttgttagcggtagataaaattcatgtcgatttaaactggcggtatctgaacgagtatcttgatcaaatcagcgctaatgatgaagttctatttttgaaacaaggtcatgagatcattgccaagaatcaactcgctcgtgaaaaactgattatttataatagcgaaggtaattataatattattgattctgtcgatacggagtatattgcaaagacatcagcagtgccaaataatgcattgttcgaaatctatttttattatcctggcggtaatttattgaacgcatcagataaacttttttatctaccgtttgcgttcattattatcgtgttgctggtggtatatttcatgaccactcgtgtgttccgtcggcaattttctgaaatgaccgagctggttaatacgctggcgtttttgcccgactcaacggatcagatcgaggctctgaaaattcgcgaaggcgatgcgaaagagattatcagcatcaaaaattcgatcgcggaaatgaaagatgccgaaattgaacggtcaaataaattgctctcactgatctcttacgatcaggaaagcggttttattaaaaatatggcgattattgagtccaacaataatcagtatctggctgtggggatcatcaaactgtgtggtctggaagccgtggaagcggtgtttggtgttgatgaacgcaataaaatcgtcaggaaattgtgtcagcgaattgccgagaaatatgcgcaatgctgcgatatcgtgacattcaatgccgatctctatttacttctgtgtcgggaaaatgtacagacatttacccgtaaaatagcgatggtaaacgattttgacagcagctttggctaccgcaatctgcgcatccataagtctgccatttgtgaacctttgcagggggaaaacgcctggagttacgcagaaaaactgaaactggcgatttccagtatccgtgaccatatgttctccgagtttattttttgtgatgacgcgaaactcaacgaaatagaagagaatatctggattgcgcgtaatattcgccatgcaatggaaattggcgaactattcctcgtctatcaaccgatcgttgatattaacacccgcgccattctgggcgcggaggcgttgtgccgttgggtttctgcggagcgggggatcatttcaccgctgaagttcattaccattgctgaagatatcgggtttatcaatgagctgggttatcagattattaaaacggcaatgggtgaattcagacattttagtcagcgtgcgtcgctgaaggatgatttcttactgcatattaatgtttcgccctggcagttaaacgaaccgcactttcatgagcgttttaccaccatcatgaaagaaaatggcctgaaggcgaacagcctctgtgttgagatcactgaaaccgtgatcgagcgaattaatgaacatttttatctcaatattgaacaactgcgtaaacaaggggtacggatatcgattgatgactttggcaccggtttgtcaaacctgaaacgtttttatgaaattaatccagacagcataaaggtggactcgcaatttaccggcgatattttcggtactgcgggaaaaattgtgcgcattattttcgatctggcacgctataaccggatcccggtgattgcggaaggcgtagagagcgaagacgttgcgcgcgaattaattaaattaggatgtgttcaggctcaggggtatctgtaccagaaacccatgccattctccgcctgggataaaagtggaaaattagtaaaagagtagtttacgtatgtccagaatcaataagttcgtacttacagtcagtctgctgatttttatcatgatttcagcagttgcctgcgggatctacactcaaatggtaaaggaacgggtgtatagcctgaaacagtccgttattgatactgcttttgcggtggcaaatattgctgaatatcggcgtagcgtggcaattgatcttatcaacacgctaaatcccacggaggaacagctgttggttggtttgcgcacagcttacgccgactcggtttccccctcttatttgtacgatgtcggtccttatctgatttccagtgacgaatgtattcaggtaaaggagttcgagaaaaattattgtgcagatattatgcaggttgtgaagtatcgacatgtcaaaaatacagggtttatctcttttgacggtaaaaccttcgtctattacctctatccggtaactcacaatcgtagtctgatatttttgcttggtctggagcgtttttctttactgtcaaaatcgctggcgatggacagcgagaacctgatgttctctctatttaagaacggtaaaccggtgaccggtgatgaatattatgctaaaaacgccatcttcaccgtttcggaagcgatggagcacttcgcctatttgccgaccggattgtacgtatttgcgtataaaaaagatgtttatttgcgggtctgtacattgattattttctttgccgcattggtggcagtgatatcgggtaccagttgcctctatctggtacgcagagtgattaatcgtggtattgtggagaaagaagccatcattaataaccattttgaacgcgtactggatggcgggcttttcttttcggctgccgatgtcaaaaaactctacagtatgtataannnnnnnnnngacgacctgaccaaagcaatgggcagaaaatcctttgacgaagatttaaaagcgctgccggaaaaaggcggttatttgtgcctgtttgacgtcgataaattcaaaaacattaacgacaccttcggtcatttgctgggcgatgaagtgttgatgaaagtggtgaaaatccttaaatcacagatcccggtagataaaggtaaaatctaccgcttcggcggtgacgaatttgcggtgatttatacgggtggaacgctggaagagttgctatcgattctaaaagaaatcgttcatttccaggtgggaagcattaatttaagtaccagtatcggtgtagcgcattcaaatgaatgtaccaccgtcgaacgcttgaaaatgctggcggatgagcggctgtataagagtaagaaaaacggcagggctcagattagctggcagtaatcattatttgcaggccggacaaatgattttgcccggcctgaattaattaaacccggctaccccacaaatcgtactcatcggcgtgctcgactttcacacgcaggatatcacccggcttaacgttggtttcaccattgagataaaccgcgccgtcgatttccggtgcatctgccatgctgcgaccaatcgcgccttcttcgtccacttcgtcgataatcaccagaatttcacggcccactttctcttgcaggcgctcggcggaaatctgctgctgcagctgcatgaaacggttccagcgttcttctttaacttcttccggaacctggtcaggcagggcattggcgtctgcaccttcaaccgggctgtatttaaagcagccaacgcgatccagacgcgcttctttcaggaagtcgagtagcatctggaaatcttcttctgtctcgccagggaagccgacaataaaggttgagcgtagggtcagttccgggcagatttcgcgccactgtttgatgcgcgccagttggcgatctacagaacccggacgcttcatcagtttgagaatgcgcgtgctggcgtgctgcaacggaatgtccagatacggcaggattttgccttctgccatcagtgggatgacgtcgtccacatgcggataagggtaaacgtagtgcagacgtgtccagatccccagtttcgataactgttcgcacaggctgaccatgctggtttttaccggctcgccgttgtggaagccagtacgatgtttaacatcaacgccataggcggaagtatcctgcgagatcaccagaatctctttaacgcccgcatctaccagacgtttcgcttcacttaacacttcgccaatcggacggctcaccaggtcgccgcgcatagacggaataatgcagaaggtgcagcggtgattacagccttccgaaattttcagataggcataatgacgcggcgtcagtttcacaccttgttctggcaccaggctcaggaatgggttgtgtttcggttttggcacgtagtgatgaacgtgctccagaacctgctcatagctatgaggcccggtaatttccagcactttcgggtggacttcgcggatctgatcttcttttgcccccagacaaccggtcacaattaccttgccgttttcattcaacgcttcaccaatggcttccagtgattcttgtaccgcgctgtcaataaagccgcaggtgttgacgatcaccatgtccgcatcgtcatagctcggtaccacgtcataaccttcagtgcggagttcggtgagaatacgctctgaatcgacaaggtttttcggacagccaagggaaacaaagccgattttcggctggggagttactttgctcatagcttaaaaaatattcagttacaggaaaggtcagggcagggattctacagagttctggataaaatttgtatcgcaatctcattcgctggcggaggcgaaggaaatgtaaattttgttaattcggcgtgaagaattgatcctggacagcattttgctcaaaaaatagccatactatttaattgcaacaaggctggaaagaggaggatcgaagtatgttcgttgacagacagcgaatcgatctgctgatcgacgcacgcgttgacctcgctgcatacgtgcaactgaggaaggcaaaaggatacatgtccgtcagcgaaagcaatcatctacgagataacttttttaaactgaatcgcgaactgcacgataaatcgctgcggttgaatcttcatctggatcaggaagagtggagtgctcttcatcatgctgaagaagcattagcgacagccgcagtatgtttgatgagtgggcaccatgattgcccgactgttattaccgtcaacgccgataagcttgaaaattgtctgatgagcttaacgctgagtatccagagcctgcagaagcacgccatgcttgagaaggcctgaaaactaagggggagaaagcgtctcccccttcatgtttaagtttttgtaaaaatgaatttgttatctcctccactgactacgctttaagccagagtcaatccggaggcgttatgcatcgacaatcctttttccttgtgccccttatttgtctttcttccgctctctgggcggctcctgcaacggtaaatgtcgaagtactgcaagacaaactcgaccatccctgggcactggcctttttacccgataatcacggtatgttaatcactctggcggcggcgagttgcgtcactggcaagcaggaaaaggattatctgcgccgctttccggagttccggacgtttgggcgcacgggcagggcggcctgctggacgtggttttagcgcctgattttgctcagtctcgccgcatctggttaagttattccgaagttggcgatgatggcaaagccggaactgctgtgggttatggccgcttaagtgatgatctctcaaaagtgaccgacttccgcaccgtcttccgccagatgccaaaactgtctaccggcaaccattttggcgggcggctggtattcgacggtaaaggttatctttttattgctctgggcgaaaacaatcagcgcccgacggcgcaggatctggataaattacagggcaaactggtgcgtctgaccgaccagggcgaaatcccggatgataatccttttataaaggaatccggtgtgcgcgccgagatctggtcttatggcattcgtaatccgcaaggaatggcgatgaatccgtggagtaatgcactgtggctgaatgaacatggcccgcgcggtggtgatgaaattaatatcccgcaaaaaggcaaaaactacggctggccgctggcaacctggggaatcaactattcaggctttaagataccggaagcgaaaggggagatcgtcgccgggaccgagcaacctgttttttactggaaagattcgcccgctgtgagcggcatggccttctataacagcgataaattcccccagtggcagcaaaaattatttattggcgcgctgaaagataaagatgtcattgtgatgagcgtcaacggcgacaaagtgacagaagatggccgtattttaacggacagagggcagcgaattcgtgatgttcgcactggacccgacggttatttatacgttctcaccgacgagtccagtggggaattacttaaagttagcccacgcaattagctaacgggaatcatcaccactttgcgcactgcggggcgttcagtgagttgctgataccagcgttgcagatttggacgcggtgtccaggtcaggccaacgttaaacaaattgtagatgaacggtgcgatagcgatatcgcccacaccaaactcgtcgccagagaaccattttacttttgccagttccgcatcgagcagggcaaacagggcgtcgcactctttgcaactggcatcaatggcggcctgatcgcgctcttccggtggtgttctgactaatcccatcaggatcccgcgatgagcattactgagcgtctggtttgcccagtccatccatttttccgcttccgcacgacgtgccggtgagtcgatccacagacgtttttgcccgtactgtgccgccagatagcggacaatggcgtttgattcccaaagaatgagatcactttcgtcgtcacgcaacaacggcaccagcccgttagggttcatcgccagaaaatcagcatcgtgatttatcccaaactcacggcccgcgagaatttgctcataaggtagttccagttcttcgagcgtcagcaatactttttttacgttggttgaattattccgaccccacagcgtaatcatactcaccccttttccgacaggcagccacaggctgaacaggactccgatggtgaagtaaagttaacttttaagcaacagctggcaaaaaaatgacaccagaagcagcgaagcggcaggatattgcataaactttaaaaactttaccaacttacggtttctttaagtttgtgtgtgcgttattaatcaccgaacttatcatacggcgatataacgtaatggatactcgggtggcatttatgacgcaatactcctctctccttcgtggtcttgcagcgggttctgcatttttattcctttttgccccaacggcattcgcggcggaacaaaccgttgaagcgccgagcgtggatgcgcgtgcatggattttaatggattacgccagcggtaaagtgctggcagaaggcaacgcggatgagaaactggatcccgcgagcctgactaaaatcatgaccagctatgtggttgggcaggcgcttaaggccgataagattaaactcaccgatatggtgacggtcggtaaagatgcctgggcgacgggaaatccggcactgcgtggttcatcggtaatgttcctcaaaccgggcgatcaggtttcggtggcagacttgaacaaaggtgtgattatccagtccggtaatgacgcctgtattgcgctggccgattacgttgccgggagccaggagtcattcattggtttgatgaatggttatgccaaaaaactgggtctgaccaacactaccttccagacggtgcacggtctggatgcgccggggcagttcagtaccgcgcgcgatatggcattgctgggtaaagcattgatccacgatgtgccggaagagtacgccattcataaagagaaagagttcaccttcaacaaaattcgtcagcctaaccgtaaccgtctgctgtggagcagcaatctgaatgttgatggcatgaagacaggaaccacggcaggcgcgggatataatctggttgcttcggctacccagggcgatatgcgtttaatctccgtagtgctgggggcgaaaactgaccgtatccgttttaatgagtctgagaaattattgacctggggtttccgcttctttgaaaccgtgacgccaattaaacctgatgccacctttgtgactcagcgcgtctggtttggtgataagagcgaagtgaatcttggggcaggcgaagcgggctcagtgaccataccgcgtgggcagctgaaaaacctgaaggcgagctacacgttaacggaaccgcagcttaccgcaccgctgaaaaaaggtcaggttgtcgggaccattgatttccagcttaacggtaaatccattgagcagcgtccgctgatcgtgatggaaaatgtggaagagggcggattctttggtcggatgtgggatttcgtgatgatgaaattccatcagtggttcggcagctggttctcttaatcttctgataaccggatggcgcgaaacgtcatccggttatacgtcattaatacatcaacttaatgcgctgcgtctgcgcgtacttcacatactcatcttccgggcaacaatcactcaccacaatatcaaagcgtttcaggtcacccatgcgcgccggacgcaccttgccaaatttactgtggtcgacaaccagcacatgcttttgcgccatcgacatggcccagtgttttaccggcaactcttcaagattaaaacaggtagcgcctttactgacatgcacgcccgccgcagaataaaaagcgatatccgggcaaaaattattcagcgtttgctgaaaatcgatgggtttgaaaatggcgttgctggcgtgaaattcaccaccgcacagaaatgcgcggcaatggggtttctctttcagcgccagaaaggtatttagcgaataacaaacggcggtaaaagggatttcattatcaatcgcttcaataatccacggcgtggtggtgccacagtcaaaaaagagggtctgatcgggttctaccagtgtcgcagccagttttgccgcccggcgtttttcttccaccaggcgggatttttgatcgcttaacaggtaatggctggcactgcgcggttccagaacaatatagccgccgagcaaaacgacgggcgcactgtggttgttcagatcgcgacgaatcgtcatctccgaaaccccaagcagggcggcggcgtctttaagatgtaacttatcgctgcgttttaattcttgcagcagctgcccgatacgctcttcgcgacgtgtttccataatccctctgaatagttattgaagcgagccgctcaatactacactttttagcagagatcagtcacgcacccagcctttgcggatcggtaatgcaaaacagaagcgataccacgattgcagacgttgatagagtttatgccccatcgcttgccagataatctgggcactaaggcagccaatcatacctgccagcaatccaccgagcatatccagcggccagtggacgccaagataaacgcgcgaccaggcaatgacgacggccagcaccattaaaagtgagccggaccacaggcgatgccagcataaaaatgccagtgcaaaggtgaaaatcaccgtaccgtgatcgcttgggaatgagtcatccgccgcatgatgcaggaagttatagccgatattttcgacaaagggtcggtcgtgcggaaaaagatgtcccatcgtccaggacacaaacaggctgaccgccagcgcgatagcgatttttatcaccagttgccgttgtgctgtaaacccccacaaccaaagcaccgcggccagcagcggtaccacggtaatcaaatctttagcaataaaaatcgccaacgagatcatccacggagccgagtctggcgtcgcgttaataagagagaatagagagagattcaaattttccagcataacttcccgacgcaaagtgattaaaagggagccaatacaggcaagtcgttgagaataaagtgcaggttaaactgggtaaagcggcatcgtcttatttccctcaagcggcctgtttacggtgggtaattgtaacgggcataggttaaataaaacttaaagaaagcgtagctatactcgcaataatgtaagaatgtgcttaaccgtggtttcagctacaaaattcgctttctcgttagctgtgcttttattaaactctgcgcgattattattggcgaagaaattgcatgcaaaataaattagcttccggtgccaggcttggacgtcaggcgttacttttccctctctgtctggtgctttacgaattttcaacctatatcggcaacgatatgattcaacccggtatgttggccgtggtggaacaatatcaggcgggcattgattgggttcctacttcaatgaccgcatatctggcgggcgggatgtttttacaatggctcctggggccgctgtcggatcgtattggtcgccgtccggtgatgctggcgggggtggtgtggtttatcatcacctgtctggcaatattgctggcgcaaaacattgaacaattcaccctgttgcgcttcttgcagggcataagcctctgtttcattggcgctgtgggatacgccgcaattcaggaatccttcgaagaggcggtttgtatcaagatcaccgcgctgatggcgaacgtggcgctgattgctccgctacttggtccgctggtgggcgcggcgtggatccatgtgctgccctgggaggggatgtttgttttgtttgccgcattggcagcgatctcctttttcggtctgcaacgagctatgcctgaaaccgccacgcgtataggcgagaaactgtcactgaaagaactcggtcgtgactataagctggtgctgaagaacggccgctttgtggcgggggcgctggcgctgggattcgttagcctgccattgctggcgtggatcgcccagtcgccgattatcatcattaccggcgagcagttgagcagctatgaatatggcttgctgcaagtgcctattttcggggcgttaattgcgggtaacttgttgttagcgcgtttgacctcgcgccgcaccgtacgttcgctgataattatgggcggctggccgattatgattggtctgttggtcgctgctgcggcaacggttatctcatcgcacgcgtatttatggatgactgccgggttaagtatttatgctttcggtattggtctggcgaatgcgggactggtgcgattaaccctgtttgccagcgatatgagtaaaggtacggtttctgcggcgatgggaatgctgcaaatgctgatctttaccgttggtattgaaatcagcaaacatgcctggctgaacgggggcaacggacagtttaatctcttcaaccttgtcaacggaattttgtggctgtcgctgatggttatctttttaaaagataaacagatgggaaattctcacgaagggtaaaaaaatgcctgactgctttgtgcgatcaggcattctcgaattaatggtgatggtcgtcaatctggtgttcgataaccatcccttcacctacgctggcaagatggcgagcataaggatgcgggcggtaagccggagctggcgcaggagccacatagacggtttgcggcacagtcgcgacgctgaccgcttgtggaacgctgactgaatcaggaactacaaccactttgtatccactcggcacatcgacggtgacactttgcgccatcgccacaccagtaaagcccattaaaagcgcgcccaacagtagacaatttttcataatcatttcgcctgaaataatgcagcgagttaatttccgcgaattatgcagccttcattcaggtattgtgttgccgggcgtgctgccgtttttattggtcaaatggcgcttcgtgtttaagcactttatcgatcacatccagtacgccttcacggttattggagcctgcccggtattttgccgctgcgacgaccgcgctgccggcattttccattgcaaaactaaagcctgcctgacgcagcatctcaatatcgttaccgccatcgccaaagaccaccacttcgctgtcgtctattccccataatttctgcagttggcgaaggccattggctttatgtacgccggggataatcagatcgatgctgccgttgccggtgtggactggcaccataatatcgccgatggcctcatgtaatgctttttgtacttgtggaatcagttcatcggaaagattcaggccaaacttaaagaaaatatcttctaagttgtcaaagttatcgacgtattccagacggtgataatacatttccgccaccgttttcatggcatcgtcatattttttgagcgtataggcgctattttttccgcaggcaataatttccacttccgggcgcgtcagcaaatgttccacgacagtagtaaaggcatccttcgacagctcgccattaaaaacatctttgccttcactcactacccagccgccgttttcagccacaaaggcaatttcattcgcaatttcagggaagaaagagatcaactgataatattgattcccgctggcgaccacaaagcgaatgccttgtgctttcatttgctgatactgagccataaaccgctcacggttataggttttttgatcgcttaagaaagtaccatccatgtctaccgcaattaatttaatgctcatcaactattctccatcgccgtctgcgttttggtatcgggtttggcgacggctttcgcgacaatagccgcgagaataaccagcgccagtacaaccagcattgcactacgtaatccataatgttcgccgagatagcccagcagcggcggcccgacgaggaaagccagataaccggtcgttgctaccacactgacgcgggttggtgcatcggggccggtatcgctggcggcagaaatggtcagcgggaagcccagcgaggcacccagtccccaaagtacaacagacactcctgcgacccaggcgctatcgacaaaaataatcagcccaatacccaacgcccccattagtgcactggcccgaaccacggcaacgcgactgtaacggtcgatgaaccaaccaccggtgaagcgtccaacggtcatccccagggtaaaaccggcataaatcagcgagccggaagtagggctaaaaccgtgaccgtcaaccattaataagggtaaccagtcgttggcagaaccttcggcaaaggccatcgccagcactacaacaccaatcaacagcaactggatatcgcgataaaaaggaatgcctttttcgccatgctgggtgccatcggcagcatttttgcccgtaccgtcagggattgcctgaatggcgatataaataggcgcgatacctaccagcgccgccaatgaaatgtgcaccgttgccggaacgccaaaggccgtcagtgccatcccgacaccagcgcctgccagcgtgcccaggctataaaaaccgtgcatcatcggcaaaaccgttttattcatttctcgctcaacggcggcaccttcaacgtttatcgccacttccgcagaaccaaaacttgccccaaagacgccgagaccaacggcaaagagcaggggcgatgtcagccagagtgccagacttaatatcatcatcccgatcaatgcgcaggacatcgtgaccaggatgacattacgtgtcccaaagcgtttcactaaccacgccgagcagagaataccgctcatcgaaccgatcgacagaccaaagagaacaccgcccatttcagcgatcgagacagagagaatatcgcggatagcaggcgtacgggttgcccaggacgccattaacaggcctggcaaaaagaagaacataaacagcgcccaagttcggcgtttcaatgcattacgtgaagaatttacggtcatagatcacgtcaaaataagaagagggaagacaacattagcaaggttgtgtacatttgtacacaattgcagacagaggaaatgacatgcgtcgcgctaacgatccgcaacggcgagaaaaaattatccaggccacgctggaggcggtgaaactttacggaatacatgctgttacgcaccgcaaaattgctacccttgccggggtaccgttgggatcgatgacctactatttttcaggaattgatgagttgttgctggaggcgttcagcagttttactgagattatgtcccggcaatatcaggcattttttagcgatgttagtgatgctcaaggcgcatgccaggctatcaccgatatgatctacagctcacaggttgcaacgccggataacatggagctgatgtaccagctctacgcgctggctagccgaaaaccgctattaaaaacggtaatgcaaaactggatgcagcgcagtcagcaaacgctcgaacaatggtttgaacccggaaccgcccgcgcgcttgatgcgtttattgaggggatgacgctgcattttgtcaccgaccgtaagccgctatcgcgcgaggagattttgaggatggttgagagggttgcagggtagtagataaattttagataacaaaaaacccatcaaccttgaaccgaaatggcggggttgatgggctccacaaaatggggacatcaaagaaaagcagtggcactaattaagactgatgccctgcggaaaagttctgcggttgtgcaaaaaaatttcattttcagggcaacttcagttttatcctaatcctggccataccatgacgatgattgtccctgccagcgtcagcaggacgttggcgattgcgtaggtgcccgcatagcccagcgcagggatgttactgcgagctgtatcactgatgatctccattgccggcgcgcaggtgcgtgcgcccatcattgcgccgaacaacagtgcgcggttcattcgcaatacataagcaccgaacaagaaacagataaccacgggcacaagactgacaattaatccggcaatcaacatctgaccgccaatcgcgcccaggccgttattaataccgctaccggcgctcagaccaacgcctgccataaacaccatcaagccgaactctttcaccatgcttaatgcaccttgcggaatgtaaccgaaggtcgggtggttagcacgcataaagcccagcataattccggcgaataacaacccggcagcgttccccatgccgaaactgaatgtgctgaactggaaggtgatcatcccgatcatcagcccaataacaaagaaggcgcagaatgccagcaggtcagtgacctggctgtgaatcgagataaagccgatgcgatcggcgatggtttttacgcggcgggcatcgccgctgacttgtaaaacgtcacctttgttaagcacgacgttgtcatctatcggcatctcaatctggctacgaatgacgcggttaaggaagcaaccgtgatcggtcaacttcagttgtgcgagacgtttacctacagcgttatggtttttaacgaccacttcttcagtgacgatacgcatgtcgagaaggtcacgatcgaaaacttctttaccgttacggaagctgggatcgagtcgggcatgggcgtcgggatagcctaccaacgctatttcatcgcccatttgtagcacggcatcaccgtctggatttgccagaatcccgttacgtcgaatacgttcaatgtagcagccggtttgtcgataaatacccagttcacgcagatttttgccgtcggtccaggccaccagttccgggccgacgcgataggcgcggatcaccggtaaataaaccttacggttggcatcagtgtccaggccacgttcgcgggcgatttgctgggcgctggtctgtaagtcctgatgctgcaatttcggcaagtaacgcgcaccaacaatcaaactcaccagaccgattaaataggttaaggcatacccgaggctcagattatccagtgccagtgagagctgcctgctttccatgccggaatgacgcagtgtatcgccagcaccgaccagaaccggtgtcgacgtcatagagcctgctaacataccggccgtcaggccaatatcccagccaaacagcttacctaaccctaaggcgatcaccagcgcactgccaaccatcaccagtgctaacattaggtaatttttcccatcgcgaaaaaaaatggaaaaaaagttcggtccggcttcgaccccgacgcagaaaataaacagcataaagccaagattaagcgcatcggtgttaatgctgaaatgttgttggcctaataacagcgatacgactaaaacgccaatggaattacccagttggatcgaaccaagtcgtaactttccgagacatagcccaagcgcgaggaccacaaataataacagaatgtaattcccatttaacaattcggcgacgtttatattcacggaggctaacttcttgtttactagtaagctgttgaaagaaatggtaatttacgataatgttttttaccagaattcagggcgcagattcattcagcgcacctaaacgatagtaaagtaacaatatattttactagtgtaatcacattaggtatcaacggctatatgaattgcgttggcctatattagcatggaatgcgaagcggctttatcttactgaacgccacactggcgaaaaatgtgttcgatagacgcagtgtcaggaggaacgagtgaaacataaacaacgttgggcgggggcaatctgctgttttgtcctcttcattgtggtgtgcctttttctggcgacgcacatgaaaggcgcttttcgggctgccgggcatcctgaaatcggcttgctatttttcattcttcctggagcagtcgccagcttcttttcacagcgtagagaagtcctgaaacctctgtttggcgcaatgctggcggcaccctgttcgatgctcattatgcggctgtttttttcaccgacgcgctcattctggcaagagctggcatggttactaagcgcggtgttctggtgtgcgctgggggcactgtgtttcttatttatcagtagtttgtttaaaccacagcacagaaaaaatcagtaaagccctcaacgcgagggcttgtcagacgatcaggcgtccagattttctttcacccatgcagcaaaatcggtatagccgccgatatgttgctgatcgacaaaaatctgcggcacggtttctacgggtttacctgccttttgttgtagatcttctttagtgatcccttccgcacgaatatctacatactgatactgaaaatcatcgcgttcattgctcaatttctcagccagatcttttgcacgcacacagtaagggcaacccgaacgaccaaaaataacggtttgcattatttctctcctcatagatttatgcctgtaatgatcacgctaaaatgtattcgctgaaagtaggtttaacctgttgcattaattgctaaaagctataactgttaaacacaatacagtgaaaagttttagactgaaggctcactttgcagagggaagcgtatgcgcgcgatcggtaaattgcctaaaggcgtgttgatactggaatttatcggaatgatgctactggcggtggcgctgctgtcggtaagcgactccctgtcgctgcctgagccattttctcggccagaagtgcagattctgatgatttttctcggtgttttgctcatgcttcccgctgcggtggtggttattcttcaggtggcaaaacgtcttgccccacagctgatgaaccgtccaccgcaatattcacgttcagaaagagaaaaagataatgacgccaaccattgaacttatttgtggccatcgctccattcgccatttcactgatgaacccatttccgaagcgcagcgtgaggcgattattaacagcgcccgtgcgacgtccagttccagttttttgcagtgcagtagcattattcgcattaccgacaaagcgttacgtgaagaactggtgacgctgaccggcgggcaaaaacacgtagcgcaagcggcggagttctgggtgttctgtgccgactttaaccgccatttacagatctgtccggatgctcagctcggcctggcggaacaactgttgctcggtgtcgttgatacggcaatgatggcgcagaatgcattaatcgcagcggaatcgctgggattgggcggggtatatatcggcggcctgcgcaataatattgaagcggtgacgaaactgcttaaattaccgcagcatgttctgccgctgtttgggctgtgccttggctggcctgcggataatccggatcttaagccgcgtttaccggcctccattttggtgcatgaaaacagctatcaaccgctggataaaggcgcactggcgcagtatgacgagcaactggcggaatattacctcacccgtggcagcaataatcgccgggatacctggagcgatcatatccgccgaacannnnnnnnnncattaaagaaagccgcccatttattctggattatttgcacaaacagggttgggcgacgcgctaaaaccgccacgtcgatgtatgatacgcgggcttttgaccaggtctgacagagaggtgcagggtgaaaattgccatattgtcccgggatggaacgctctattcgtgtaagcggctgcgtgaagccgctatacagcgcggtcacctggttgaaattcttgatccgctttcttgctacatgaacataaatcctgcggcgtcttctattcactacaaaggccgcaagttaccccattttgacgcagtgatcccgcgtattggcaccgccattaccttttatgggacggcggcactgcgccagttcgagatgctggggagctatccgctcaatgagtcggtcgccattgcccgggcgcgtgacaaattgcgttccatgcaactgctggcgcgtcagggcatcgacctgcctgtcacgggcattgcgcattcgccggatgataccagcgatttaatcgacatggtcggtggtgcgccgctggtggtcaagttggttgaaggcacgcagggaattggcgtcgtgctggcggagacgcgtcaggcggcggaaagcgtgatagacgctttccgcggtctgaacgcgcatattctggtgcaggaatatatcaaagaggcgcaagggtgcgatatccgctgtctggttgttggcgatgaagtggtcgctgcgattgaacggcgggcgaaagagggcgattttcgttccaatttgcatcgtggcggcgcggcaagcgtcgccagtatcacaccacaggagcgtgaaatcgcgataaaagccgcgcgaacgatggcgctggacgttgctggtgtggatattctgcgtgctaatcgcgggccgttggtgatggaggtgaatgcgtcgccggggctggaaggaatagaaaaaaccaccggtatcgacatcgcgggtaaaatgatccgctggatcgaacgccacgctacgaccgaatattgcctgaaaacgggtggttagtcgcaatcacattactgatcatggttttgcctgcgctttttgcgtaagctgtgccggtctttttatcgaaagaggttgtacaaaattatgacatcgctggtcgttcctggtctggatacgctgcgtcaatggctcgatgacctggggatgagtttttttgaatgtgataactgtcaggctctgcatctgccccatatgcagaatttcgacggtgtctttgatgccaaaatcgatctgatcgataacacgatcctgttttctgccatggcggaagtccgaccttcagccgtattgccgctggcggcggatttatctgccatcaatgccagttcgctgaccgtgaaagcatttcttgatatgcaggatgataatctgccaaagctggtggtttgccagtctttatccgttatgcagggcgtaacctatgagcagtttgcatggttcgtgcgtcagagcgaagagcagatttcgatggtcattcttgaagctaatgcccatcaactgctgttaccgactgacgatgaagggcaaaacaacgttaccgaaaactatttcctccactgataactcctttcgagcacgcagtcgctggtgcagtggctgcgcgctgcaaaattatctgctgtttttaaccttttcttaaagattatttcacttctcttgtgtcgatttggctttatcacatagagcaaatacgcataaaaatttgttaaataccgttttttaatccgagctatagtctcaaaccctggctaaagttattcttgcgatgcttttatatagcgagcagtgctggccgggagagagttctcttttcttacaccccgccgataaaaaatatgcacgtttattgcatatcttttagtgtgacaacttttgttcgtttgttaacgaactttcagaaggaaagagatatgaccgccttaaataaaaaatggctttcgggtctggctgcgggtgctctgatggccgtctctgtcggcacgctcgcggctgaacaaaaaacactccacgtttataactggtctgattatatcgccccggacacggtggccaattttgaaaaagaaaccggtattaaagtcgtctacgatgttttcgactctaacgaagtactggaaggcaaattaatggcgggtagcaccggctttgacttggtggttccatctgccagctttcttgaacgccagttgactgcgggagttttccagccgctggacaaaagcaaattgccggagtggaagaatctcgacccggagctgctgaagctggtcgccaaacacgatcccgacaataaatttgctatgccctatatgtgggcgacgaccgggattggctataacgttgataaagttaaagctgtgctgggcgaaaacgcgcccgtcgatagctgggacttgatcctcaaacctgaaaatctggaaaaactgaaaagctgcggtgtctctttcctggatgcgccagaagaagtttttgctaccgtgttgaattatctcggcaaagatcccaacagcactaaagcagatgattacaccggaccggctaccgatctgctgttaaagctgcgcccgaacattcgttatttccattcatcgcaatatattaatgacctggcgaatggtgacatctgcgtagcgattggttgggcaggcgatgtctggcaggcgtcaaaccgcgcgaaggaagcgaagaatggcgtgaatgtctcgttctcgattccgaaagagggggcgatggcattctttgatgtattcgccatgcctgccgatgccaaaaataaagacgaagcctatcagttcctgaattacctgctgcgcccggatgtggtggcgcatatttccgaccatgtgttctatgccaacgccaataaagcagccacgccgctggtgagtgcggaagtccgtgagaacccgggtatttatccgcctgcggatgttcgtgcgaagctgttcactctgaaagtgcaggacccgaaaatcgaccgtgtgcgcacccgcgcgtggaccaaagtgaagagcggaaaataatccgcagccttagatgccgggcgggcgcaccacacccgccggcaattcgcaccatcatggtgcgcttgcacacattcaatgccggagagcagccgtgaatgacgctatccctcgcccgcaggcgaaaacccgtaaggcgctgacgccgctattagaaatccgcaacctcaccaaatcctacgatggtcaacatgcggtggatgatgtcagcctgaccatctacaaaggtgaaatcttcgcgctgctgggcgcatccggctgtggcaagtccacgctgctgcgtatgctggcaggtttcgaacaaccttctgccggacagataatgcttgatggcgtcgatttgtcacaggtgccgccttacctgcgccccatcaatatgatgtttcagtcttacgcgctgtttccgcatatgaccgtggaacagaacatcgcttttggcctgaaacaggacaaactaccgaaagcggaaattgccagtcgggtccatgagatgctcggcctggtgcacatgcaggagttcgccaaacgcaaaccgcatcagctttccggtggtcagcgacagcgtgtggccctggcccgaagccttgccaaacgcccgaaactattactgctcgatgagccgatgggcgcgctggataaaaagctgcgtgaccggatgcagcttgaagtggtggatattctggagcgcgtcggtgtgacttgtgtgatggtcacccacgatcaggaagaggcgatgaccatggcggggcgtatcgccattatgaatcgcgggaaatttgtccagattggcgagccggaagagatctacgagcatccaactacccgctacagcgctgaatttatcggttcggttaatgtctttgaaggtgtactcaaagagcgtcaggaagatggcctggtgcttgattcgccggggctggtgcatccactgaaagtcgatgcggatgcttcagtggtcgataacgtgccggtacacgtagcgctgcgcccggaaaaaatcatgctttgcgaagagccgcccgccaatggttgtaacttcgcggtgggggaggtgatacacattgcctatctcggcgatctttcggtgtatcacgttcgtctgaaaagtgggcagatgattagcgcccagctacaaaacgcccatcgtcatcgtaaagggttaccgacctggggcgacgaagtgcgtttgtgctgggaagtggacagctgtgtggtgctgacggtttaaggagcaaagatgaatacacttgaacctgctgcccagtcgaaaccgccgggcggatttaagctgtggttgtcgcagctgcaaatgaagcatgggcgcaaactggtcattgcgttgccatatatctggttgatcttgctgtttctgctgccatttctgattgtctttaaaataagcctgtcggagatggcgcgcgctattccaccttataccgaactgatggagtgggctgacgggcaactgtccatcactcttaatctcggtaattttctgcaactgaccgacgatccgctctatttcgatgcttatctccagtcgctacaggtggctgcgatttcgacattttgctgtttactgatcggctatccgctggcgtgggcggtggcgcacagtaagccttcgacccgtaatattttattactactggtgatcctgccgtcgtggacctcgtttctgatccgcgtttatgcctggatgggaatattaaaaaacaacggtgtgctgaataattttctgctgtggctgggggttatcgatcaaccgctgaccattcttcataccaatctggcagtttatattggcattgtttacgcctacgtgccgtttatggtactgccgatttataccgcgttgattcgtattgattattcgctggtggaagcagcgctggatctcggtgcacgaccgctgaaaacgttctttactgtgatcgtgccgctgactaaaggtgggattattgccggatcgatgctggtgtttatcccggctgtgggcgagtttgtgatcccggaactgctcggtggcccggacagcatcatgatcgggcgcgtgctatggcaagagtttttcaataaccgcgactggccggtggcctcggcggtagcgatcatcatgttgctgctgctaattgtgccgataatgtggttccacaaacaccagcaaaaaagcgtgggagaacacggatgaataatttaccggtagttcgttcaccctggcggattgtgattttgctgctgggctttacctttctctacgcgccaatgctgatgctggttatctattcgtttaacagctcgaagctggtgacggtgtgggccggctggtcaacgcgctggtatggtgagttattgcgcgatgacgcgatgatgagtgcggttggtttaagcctgacaattgctgcctgtgcggcaacggcggcggcgatcctcgggactattgcggcggtggtgctggtgcgctttggcaggtttcgcggatcaaatggctttgcctttatgatcaccgcgccgctggtaatgccagatgtcatcacgggcttgtcgctgttgttattattcgtcgcgcttgctcatgccattggctggcctgcggaccgcggtatgctcaccatctggctggcgcatgtcactttttgtacggcttatgtggcggtcgttatttcttcaagattgcgggaactggatcgctcgatagaagaagccgcgatggatctcggtgcgacgccgctgaaagtgtttttcgtcattacgctaccgatgatcatgcccgcgatcatttctggctggttactggcttttactttgtcgcttgatgatctggtgatcgccagctttgtttccgggccgggagccaccacgttaccgatgctggtcttttccagcgtgcggatgggggtgaatccggaaatcaacgcccttgcaacgttaattctcggtgcggtcggaattgtcggatttatcgcctggtatctgatggctcgcgcagaaaaacagcggatacgcgatatccagcgtgcaagacatggctgaagacactaaaatttgccaacctggctacataatgccgcgcatgccgcggcattgttttcatggaagacgaaacgttgggattttttaagaaaacatcttcatctcatgctcgcctgaatgtgcctgcgctggtgcaggtagcggcgctcgccattattatgatccgtggcctcgacgtgctgatgattttcaatacgctgggcgtgcgcggtattggcgagttcattcatcgcagcgtacaaacctggagtttaacgctggtctttttaagcagtctggtgctggttttcattgagatctggtgtgcgttttcactggtgaaagggcgtcgctgggcgcgctggctatatctgctgacacaaatcaccgccgcaagttacttgtgggcggcttcgctggggtacggttatccggggctgttcagcattcccggtgaatcaaaacgtgaaatcttccatagcctgatgctgcagaagctgccggatatgctcatcctgatgctgctgttcgttccctcgaccagtcggcggttcttccagttgcaataatgtgtataatcgtcgcccctgatgatgtgaaggtcaatgtatgcagtgcgcactttacgacgcgggtcgctgtcgttcctgtcagtggataacgcagccgattccagagcaactctccgctaaaaccgccgatcttaaaaatctgctcgccgattttccggttgaggaatggtgcgcgccggtgtcaggcccggaacaagggtttcgtaataaagccaaaatggtggtgagtggtagcgttgaaaaaccactgctcggtatgctgcatcgcgacggcacaccagaagacctttgtgactgcccgctttatcctgcctcatttgcgcccgtttttgcggcgctaaaaccgtttatcgcccgtgcggggctgacaccctacaacgtggcgcgtaagcgtggcgaactgaaatacattctgctgactgacagccagagcgatggcggcatgatgctgcgctttgtactgcgttctgaaaccaaactggcacaactgcgtaaggcgctgccgtggttacaggaacaactaccgcaactgaaagttattaccgtcaatattcagccggtacatatggcgattatggaaggggagacggagatctaccttactgaacaacaggcgctggcagagcgttttaatgacgtaccgctgtggatccgtccgcaaagtttcttccagactaatccggcggtcgccagccagctgtacgctaccgcgcgcgactgggtacggcagctgccagttaaacatatgtgggatctgttctgcggtgtgggtggctttggtttacactgcgcgacgcctgacatgcagttaaccgggatcgaaattgcatcagaggccattgcctgtgcaaagcagtcagccgctgaactgggcttaacgcgtttgcaatttcaggcgctggactccactcagtttgccaccgctcagggggaggtgccggagctggtgctggttaatccgccgcgccgcggcattggtaaaccgctatgtgattatctctcaacaatggcaccgcgttttattatctactccagctgtaacgcccaaaccatggcgaaagatatccgcgaactgccaggttaccgcatcgaacgggtacagctttttgatatgttcccgcacaccgcgcactatgaagtgctgacgctgctggtgaagcaataaaaaagccgcaggtgcggcttcagattgctgatcaggtgcgctttgttcatgccggatgcggcgtgtacgccttatccggcctacaaaatcatgctaaatcaatacattgcagagttgatgtgggccggataagcgcagcgcatcaggcaatcttacttttgtcatcagtctcaattactgcggaaaccactggtcattgattttctgatatgtaccgtcagctttaattgctgccagcgcgttattcagtttttcccgcagagctttgttatccgcacgtacagcgattcccagaccggtgccgaagtattgcggatcggtcactttttcagtagcaacgcccagttgcggattggttttcagccattcgtttaccaccgctgtgtcaccaaataccccatcaatacgaccatttttcagatcgataaaggcattctgataactgtcataggagacagttttcacttcggggtgctgatcctgaatatatttctggtgcgtggtgccgttttccatcccaatacgtttgcctttcagatcggcaaacgttttgtaggtatcttttttggcaatcacgacggctgagttttcatagtagggcgtggtaaacgatacctgcttgctacgctcgggcgtgatatccataccggagattacggcgtcatattttctgaatttcagtgacgggatcaggctgtcgaacgcgtgattagtaaaagtacattctgcctgcatttgtttgcacaaggcttttgccagatcgatatcaaagccgacaatctcattattagcacctatagattcaaagggtggataggtggctgaaacgccaaaattgattttctctgcggcagaagcaccgaaagtaaaggaagcaagtaaagcggcaagaactaactttttcatgatggaactcccgtctgtcaatcttatgatttttggccgtgtctgcggcatgggataacaatgccatcaagtgaatttatatgcaataaatatgattaaataatttaaatgaaataaaaaaagacggataccttagtgagttgtccgtcttcattataagaatttatgcactatgtaggccggataaggcgtccacgccgcatccggcacaggcaccgtgctgatgtctgatgcgacgctggcgcgtcttatcagacctacaaacccccccggcgaatgtacgcagctacattaatttcgccgttcgaatgccagtgctttgcgctcgatcagacgcatcatcagcgtcagcaggccgttgacgaccaggtaaataatccctgccgcaccgaacaccattacatcgtaggtgcgtccgtacaacaactggctgtatcccatcacttccatcagcgtaatggtgtaagccagagaggtacttttgaacaccagcaccacttcgttggaataagaagagagcgagcgtttaaaggcatacggcagcaggatcgccagcgtatcttttttgctcattcccagggcgctacaggactgccactgaccttctgggatcgcacgaattgcaccgtaaaacagctgcgtggtatacgccgcactgttcagcgataacgcaatcagcgcacataaccacggttctgacaacaaatgccacagtgccggatactcctgcaaagtcggaaactggcccggcccgtaataaatcaggaagatctgcaccagcagcggcgtaccggtaaacagcgtgatataaccccgcaccagccacaccagcaccggcgttttcagcgtcaggatgatggtaaaaatcaatgccagaatcagtgccacaatcagcgaggcaacggttagcgtcaggctggtgtgtagccctttcatcagttcgggtaaatactcaaacattagctgggcctccgctcaaaacgtgtcgcgcgcaggtcaatgcgtttgagaatgtactgactgagcagggtgatcaccaggtaaatcgccgccgccacaatgtaccaggtaaatggttcctgggtacgagtagcgatgctttttgtttgcagcattaaatcattcacactaatcaaactgaccagcgcggtatctttcagcagcaccagccactggttaccgaggccaggcagcgcatgacgccacatctgcggcatcaccagacggaaaaagatagccgatttcgacagccccagcgcctgaccagactcccactgacccaccggcaccgctttcaacgcgccccgaagcgtttgcgaggcataggcggcatacagcagtgacagagcgatgacaccacaaaggaacgggctaacgtcgaagttctcaatgtccatctgcactgggatctgcacgaacccaagattgatagtgaagccatccgaaagcgtcagcagcagctgcgaggagccaaaatagataaacagcaccaccagaatttctggcaggccacgcagaatggttaccagcgctgaacctgcccacgcgacaggacgccattttgccgactcccataccgcaaagaacatcgccagcgccagcccgacaatcaatgcacaaacggcaaggccgacggtcatcccggcggcgcttgctaaaggaaaaaattcattcatcaggaattacttctggaaccatttgttgtagatggtttcgtaagtgccatctttcttcactttttccagcgcagtgttgagtttctgctgcagctcagtgttgccctgacgtaccgcgatgccgaggccagtgccgaagtaatctttatcggtcactttgtcgcccaccgccgccagtttcgggttatctttcagccactcagtgaccactgcggtgtcaccgaagacgccgtcgatacgcccgttttgcagatccagttttgcgttctggtagctgtcatacggaacggtagtgatttccgggtgcttatccataatgaatttctggtgtgtcgtcccgttctgtacgccgacttttttgcctttcagctgatcaacactggtgtatttgccttgctgacccacaaacagggcagagttgtcatagtacggggtggtaaacagtacctgcttttcacgctccggagtgatatccatgcccgccatcactgcttctacgcgacggaatttcaggcttgggatcaggctgtcaaacgcctggttagagaaagtacaggttgcatcaatctctttacacagcgcctgtgccaggtcgacgtcaaaaccaacgatctggttgtttgcatcaatcgattcaaacggcggataggaggcttcggtagcaaaacgaatggtttcggcagctgtggcggaaagactaaaacctgcaattaacgcggcaatcagaacttttttcattgttgttatcccgaatcttagtgagagagatagtttttaaatgcttcggtttgcggctcggtaaagcagctcgcgtcgccttgttctacgatatgaccattttccatatacaccactcggctggcggttttacgcgccacttcaacttcgtgggtgacgatcacctgggtaatattcgtttctgccagctcacgaatgatgctgacgatttgtgccgtaatttccgggtccagtgcggcggtcggttcatcgaacagcagtacctgcggttccatcatcaacgcacgggcaatagcaacacgctgctgctgaccaccagaaagatgcagcgggtaacgatcgctataaggtttgagacgcagacgttccagcagtttttctgcacgggccagcgcctgatctttactcaaccccagtacacggcagggcgcttcaatcaggttttgctgcacggtcagatgcggccacaggttgtattgctgaaacaccatgccaacgttacgacgcaaatcgcgaatcgctttgtcagagggtgttttggtgaaatcgaaatggttgcctgcaatgttgagcgtaccggagcgcggcatctcaagcagattgagtacacgcagcagcgagcttttacccgcgccgctggggccaagtaacaccagcgtttcgccctgtgggcaatccagcgtgatatcgaacagcgcctgatgcgcgccgtagaagcaattaatgccgtttaattgaatactcattgacactcgtatactggcagtctgatagctattgaggtcgaagatagtacctttgacagaataattatgcaatat

SEQ ID NO: 195 - DNA, 36788 bp, Escherichia coli
  source 1..36788: mol_type = genomic DNA
accatataccgcccaggtaatcactacgcaggcgatatagaaaatcaaaaataccttcattgcgccgactggcgaacccgttaatgccagcgagctaccaaacgctttcgggataaagaagccaccaatcgcgccaatcgcagagatgaaacccagcgccgccgccgtgtcggttgccgcttcacgcatcgcacgttcgtcagaacccccttctgctttcacgcgatccattgtcagtttacggaagatcactgaaatcatctggaaagtggaaccactacccagcccagctgtcaggaacagcgccaggaagaccgcgaagaacgccatgaagcttccgccctgcccgtcagtcggtaaggtcaggaacagcaggccgctgaaaatcgccatcagaataaagttcaccagcgtgacacgagttccgcccagacggtcagataatgcaccacctgcagaacgcgccagcgcaccaataaacggcccgaagaaagcgtattgcagaatctgaacatccgggaactgcgtttttgacagcatcgcaaagcccgcggagaagccgataaaggagccgaaggttgccagatacagcaggctcataatccacagatgaccccgtttgagtaccggcaactgctccttgatggaggctttcgaggtagcaagatcgttcatgccaaaccacgccgcaatggtgaagatggcaaggaacggcacccatatccaggacgcattcgccagatacagctcagtcccatccggctgtttgacgccctggctaccaaatactgcgaaaatcgacagtgataccaccagcggagcaaccaactgcatgacgctgacgcccatgttgcccagaccaccattcagacccagcgcgccaccctgcttctgtttcggaaagaagaagctgatgtttgccatactggaagcgaagttcgcgccagcaaagccgcacagcagagagatgatgatgaagacgctataaggcgtggaggtatcctgcacggcaaaacccagccagacacaaggaataatcagaataccggtgctgaacgccgtccagcgacggccaccgaagataggaaccataaaggagtatggaacacgtaataacgcgccagaaaccgaaggcagcgcagtcaacataaatagctgatcggtcgtaaaattaaaaccgactttcggtaagttcaccgcaacagcgctgaacaacatccatacgcaaaacgccagcagcagacagggaacggaaatccacaggttgcggctggcaatacgttgaccgcgttgttgccagaacgcaggatcttccggtcgccaatctgtaatgacagctccagtagccctttcgggggcggatgagtgactcatagacacctctgatactcgtttcgatgtctgccaccttagtgtctgtagctaaaggcaatttgatgtaaatcaaacgataagataactttatctatcattgatatttatcattacccatagtgagtacagtgatttcataaaaattatgagatttttcacggtgctgtagaatccctacccttaccgatgtaaagcgactaaccacacggcaaataaggagtaactctttccgggtatgggtatacttcagccaatagccgagaatactgccattccagattgtatcgtcacattcattaaggttattgctcatttaaagcctgaaggaagaggtttacatgcttaaacgttgtctctctccgctcaccctggttaatcaggttgcgcttattgtgttgctttctactgctattggactggcagggatggcggtttctggctggctggtgcaaggcgttcagggcagcgcccatgcgatcaacaaagcgggagcgctgcgcatgcaaagttaccgtctgttggcggcagtgccattaagcgagaaagacaagcccttaattaaagagatggaacaaacggcatttagcgccgagttgactcgagcagcagaacgagacggacaactggcgcaattacagggtttacaagattactggcgtaatgaactgatccctgcgctgatgcgtgcacaaaaccgagaaacggtgtcagcggatgtcagccagtttgttgccgggcttgatcagctggtatctggttttgaccgcaccacggaaatgcgcattgagacagtggtactggtccatcgggtaatggcggtatttatggcacttttactggtgttcactattatctggttgcgggcgcgactgctacaaccgtggcggcaactgctggcaatggcgagtgccgtcagccatcgcgattttacccaacgcgcaaacatcagcgggcgcaacgaaatggcgatgcttggaactgcgttgaacaatatgtctgcagaactggccgaaagttatgccgtacttgagcagcgggttcaggagaaaaccgccgggctggagcataaaaatcagatcctctcttttttatggcaggctaaccgccgtttgcattcccgcgccccgctgtgtgaacgcctgtcacctgtactcaacggcttacagaatttaaccctgctacgtgatatcgaactgcgggtgtatgacactgatgatgaagagaatcatcaggagtttacctgccagccagatatgacttgtgatgataaaggctgccagctctgcccgcgcggcgtattacccgttggtgatcgcggcacgaccctgaagtggcggctggctgactctcatacgcagtacggtattttgctggcgaccctgccgcaggggcgtcatcttagccatgatcaacaacaactggtggataccctggttgaacaactcaccgccacgctggcgctggatcggcatcaggaacgtcagcaacagttgatcgtgatggaagagcgtgccaccattgcgcgcgaactgcatgattctattgcccaatctctctcttgcatgaagatgcaggtgagttgtttacagatgcagggcgatgcgctgccagaaagcagccgcgaactgttaagtcagatccgtaacgaactgaatgcatcctgggcgcagttgcgtgaattgctcaccacattccgcttgcagctcaccgagcctggattacgtccggcgctggaggcgagttgcgaagagtacagcgccaaatttggcttcccggtgaagctggattatcaattgccgcctcgtctggtgccttcgcatcaggcaatccacttgttgcaaattgcccgtgaggcattaagtaacgccctcaaacattcgcaagcgagtgaggtcgtggtgacggtggcgcaaaacgataatcaggtcaaactgaccgtccaggataacggctgcggcgtgcctgaaaatgccatccgcagcaatcactacggcatgataataatgcgcgaccgtgcgcaaagtttacgaggcgattgccgcgttcgccgtcgtgaatcaggtggcaccgaagtggttgtcacctttattcccgaaaaaactttcacagacgtccaaggagatacccatgagtaatcaggaaccggctactatcctgctgatcgacgatcatccgatgctgcgaactggcgtgaaacagcttatcagtatggcaccagatatcaccgtagttggcgaagcgagtaatggcgaacagggtattgaactggcggaatctcttgatcccgatctgatcctgttagatctcaatatgcccggcatgaacggtctggaaacgctggataaactgcgcgaaaagtccctctcagggcgcattgtggtattcagcgtctctaaccatgaagaagatgtggtcaccgcactgaaacgcggcgcggatggctatctattaaaagatatggaaccggaagatctgctgaaagcattgcatcaggcagctgctggcgaaatggtattaagcgaggcattaacgcctgttctggcagccagcttgcgcgctaaccgtgccactactgaacgcgatgttaaccagttaaccccacgcgagcgcgatattctcaagctgattgcccagggtttgccgaacaagatgattgcccgccgcctggacatcaccgaaagcacagtaaaagtgcacgtcaagcacatgctgaagaaaatgaagctcaagtctcgcgtggaagcagcggtatgggtgcatcaggagcgcattttctgattacggttcccagcgcagttcgtcgtttgacaatgcgtcgaacggttcgacaagcgttagcgtgatctcattggaggagacacgctgcccctggttatcttccaccaccaccgacaatcgccagtgattgctcgccccttccccgttctgccagtcaggcatgatcagcgtccagccctccgcgctgttggcttgtgcgcctggcgtcaaacttaatatctgcgtatcgccctgccaaatcagttgccgaataccataacgactgcggatttgtaatttcagcggcactgtttcgccaggttttagatcccacggcggtgtcgccagaaacaccgttaacgtttttcgctgtcggtactcaagagtcggtagattatttcgctgcggattatcatagcgactaccacgtaacgactgactttcggcaacctcgcccgcagaaagttgttttttgagcggtacaccaaagcggtaattaagattcagcccgaggttattttgattctcgccactttcaccctgtttatgctgggccgtcacagtgactaatggcacaggggtgtaatttaatcccagactcaacgcgacgggattgtgataacccgtaccagagttaaacaaatcaacacgctcaccaaaatactgttctacgctgacactggtattgaggtgttgatagaacggcatgcgcatccgggctgtcaggtcatannnnnnnnnngccatccgttgttcctgcgtggctgtctgttcatgccatgcagcaaacggctgataaaagtttgccgatagtcgcaaatattcgccccacgcttcggcaccaaagcccgctcgctgaagattttcgtccagcaagttgtcataaaaagtgttataacccaccagccagttgccgcgcgcccagcgttgcccaacgcccacattgctcaccaacccatcatcctgctgagtaagaccaagctggctccaggtgagataacgatcattatcttgtaacggcacaaaccagcttccacgactgccggtgaaatgtccttcgttatccactttgacgtcaatactggcatttccccacggtgatagccaggactctacgtgctgattaacctgttgactaagcgcgtcgcggacttttcccaatgcgaaagcttttgcctgctcgccagtatccagcccgttatcattcatactggtttcgccgaaatctttcacaatttcagcaaagtgtttttccccatcatgattttcgggagccatgcctaaatccggcagaccatcattgttattatcaaagggatttgccgctttttgctcgaaggtagattgtgcgttagctgtaccgcctgctacaagcaagagtaaataaaacgggataatgcgaggaacgaaacggctcaaaacgtcggtaacttccggtaataatgaaaaaccatagccttaaagaataacgattactggcaacttttgtcgtattttctcgcgctttcaggaaaatccttaaaaatgtgaccgattggtcagacgctgcagaagcagtaagatagaagatgaatgtctaattccctgaatacaggagtaaataatgcaaaaaatcgtgatcgttgccaatggcgcaccttacgggagcgaatccttgtttaacagcttgcggctggccattgcgttacgagagcaggagagcaatctggatctgcgtctgttcctgatgtctgatgcggtcacagccgggttgcgcgggcaaaaaccaggggaaggctacaacattcagcaaatgctggagatccttaccgctcagaatgtaccggtgaaattgtgcaaaacctgtaccgacgggcgcgggattagcacacttcctcttattgatggggtggaaatcggtactcttgtggaactggcgcaatggacgctgtcagccgataaagtgctcacattttaatgtttgagggggcgtctgacgccccactatgagggaagtttactcaggcgaatcccggccgtaacacaccatccggataattctccgccagcagtttttttaccgataccagcaaatcattcagcccatcgtcctgcattcccagtttgataagctcctgttccagtgaaaacaggtattgtgcgttggttcccagcggaccgctcgccgccgcaatcaacggcgcgatgacctgagcgcgagtgtcagattcatattctggatgtcgcgggtccataataaacacaatggcgtttactgtgcatccatcatcaagatcaagctgacaccaggttggcagataacagccggtaatcatctcgcgcttccacaacagggttagttcctgctccagcgtctcttctggcagtcgataggcgacgcctgtagtgcgtccgccctctttcagtgcaagcatccgtcccggctggtgcgcagtcccgcgcccggcggtcaggcgcaggcaaaacgcgcgatgccatccaaccagtgtaccggtgcacgactcggtaaactccagtgccggattccacatcaacgatccataaccgaagatccacaccggtccctcatcaggtcgacaagccagcgtcgccgccagcgaagccgcccgttgctctgctgaccataagagtgattcttcaatggcaccaaatgccgttttacaatcggcattcatcaagaaatcacgcgttatcaccttacacctccgccactgcatacttccctgcgacaactttttggtgtcttccggacatttttactgctcattttgaaaccactaacgggacaatatgcaatccacggaccacttgcaaggcaacaccgcacgaatagctttaactaagctaccggttttacgattttttatgccatttatcatcatcccctttggcatattcatgcttcacagcagcccaggccactttatgcgcggtttcttcgcgactggcgtcatcacgccgatcgtctttatctttatattgatcccatgcgctgttgaacgcttctttatagatatcctgggcatgagacggtagaacgtgctttacgctttccggcagatcgcttttcgttttatacggcatcgttgactccttttacaaagttgaacattaagtgtggtcaacaatatctactcttgccaaaacataagaattttcatgtcagactgttcttaagaaacgctaaaacaaacattgtctaaacgtaatacttatttttatgtcccaatgagtaaaaaatcgacagtggggtaaaaattcgtaaaatgttaccgatatccagacactttctgttatttttcctacctattttttacattttcgataaattcatctgcaaagggataaccataatgtcaaatgctcaagaggcggtaaaaacccgccacaaggagacttcgcttattttcccggttctggcgctggtagtgctgttcctgtggggaagcagccagacactaccagtggtcattgccatcaatcttcttgcgcttattggtattttaagtagcgcctttagtgttgtccgtcatgcggacgtattagcccatcgcctgggagaaccttacggttcgcttattcttagcctttcagtggttattcttgaagtcagtttgatttcagctttaatggcaaccggcgacgccgcgccaacgctaatgcgtgatacgctctattcaatcattatgattgttaccggtgggctggttggcttttcattattgttgggcggtcgtaagtttgccacccaatatatgaatctgtttggtatcaagcagtatttaattgcgctgttccccctggcgataatcgtactggtatttccaatggctctgcctgcggcgaatttttcaaccggtcaggcgttactggtagcattaatttctgcggcaatgtatggcgtatttttgctgatccagaccaaaacgcatcaaagtttgtttgtctacgagcacgaagatgacagtgatgacgatgacccgcatcacggtaaaccgtctgcccatagcagcgtgtggcatgctatctggttgattatccatctgattgccgttattgcggtgaccaaaatgaaggcacgctcgctggacatattgctcgcaagcatgaannnnnnnnnncccctgtcgcctttactggcttcctggtggctctgttgattctgtcgccggaaggtttaggtgcgttaaaagcagtgttgaacaaccaggtccagcgcgcgatgaatctgttctttggttcagtgttagcaaccatttcgcttaccgtacctgtcgtcacgctaattgcctttatgacgggtaacgaattacagtttgcacttggtgcgccagaaatggtggtgatggtggcctctttagtgctgtgccatatctccttctccaccggacgtactaacgtgctcaatggcgcagcgcatctggcactgtttgccgcctatttgatgacgatatttgcctgacagttatatctcctccgatgacggaaatcgggggagataatataaattcctgcttattgtatttcttcatactacctggacaggtcgttaatcagaattgcgagcctgtaccacaacctgcacgaaaccactgcaacagctgttgaaaagccggaatgtactctttattgcaaacatttcagggatgaagtgaagatgaattgagtcgtagtatccacaccaagccggcgttatccggtgaggcgcaatgttgcgggggctttatccctggtggcattggttgctggaaagagaaaacccccgcacgttgagaggtaaaacctgacaacaaaacgggggctaatcttgaaaccagacacttcaagaatagccgcaaaatgttgtcattacaacaaggcggctatatgacgctcgcgcagtttgccatgactttctggcacgacctggcggcaccgatcctggcgggaattattaccgcagcgattgtcggctggtggcgtaaccggaagtaaggtgaaaacgggcgtcaggctgccgtgatggcaatatgcgcccgaaaccggccgcaggggtaacagcctgcggccatttttgtctttatcacttccacaagtaaatattggcaacccgagctggaagcatcatccagagcactcatgaaacgactgtaacagctgttgaaaaaccggaatgcactcttcattgcaaacatttcagggatgaagtgaagatgaattgagtcgtagtatccacaccaagccggcgttatccggtgaggcgcaatgttgcgggggctttatccctggtggcattggttgctggaaagagaaaacccccgcacgttgagaggtaaaacctgacaacagaacgggggctaatcttgaaccatcaacaattcaagaatagccgcaaaatgttgtcattacaacaaggcggctatatgacgctcgcgcagtttgccatgattttctggcacgacctggcagcaccgatcctggcgggaattattaccgcagcgattgtcggctggtggcgtaaccggaagtaaggcgaaaacgggcgtcaggctgccgtgatggcaatatgcgcccgaaaccggccgcaggggtaacagcctgcggccttttttgtatccggcacccataaaaaaagtcttaacgcagaacgctaagactttatttttcaaacaaaaagattacttgctggtatccagttcttcgaaacctttcaccagatcatcaatcgctttcatctgcttgaggaacggttccagtttagccagcggcagcgcggatggaccatcacatttcgcatgttccggatccggatgcgcttcaataaacagccccgccagacctaccgccataccggctcgtgccagctcagccacctgagcacgacgaccgccggaagctgcgccaaaaggatcgcggcattgcagtgcgtgggtcacgtcgaaaatcaccggcgagttaccagacactttcttcataatgctgaagcccagcatatcgacaaccaggttgtcatagccgaagttagcaccgcgatcgcaaagaatcactttttcgttgccgccttctttgaatttatcaacgatattacccatctgtcccgggctgacaaactgtggtttcttgacgttaattaccgcaccggttttcgccatggcttcaaccaggtcagtctggcgagcaagaaacgccggcaactgaatcacatccacgacatcagcaacgggctgtgcctgacttggttcgtgaacgtcggtgataattttcacgccaaaagtctgcttcaattcctggaagattttcatcccttcttccaggcccggtccacgataagagtggatggaggagcggttggctttgtcaaaagaggctttgaacacgtaagggatacccagtttctgggtcacggttacgtagtgctcgcaaatgcgcatcgccagatcgcgagattccagcacgttcataccaccaaacagtacgaacggcaggtcatttgctacgttgatgtcgccaatgctaaccactttttgtttcataggatcgccttaatcttgagtaaaatgtcgattaattaatgcagcacaatatgtttatgcgcgatgttatttatttgcgcacggatcatttcgctgatcgggtcttccggacactgttcaacgaaataacttaaatcgttcaacgcaacgtgttcgcaatccagttgcgcataaatcaacccgcgatcgcgaatttcatagggatcttcagggttgaattgtaataaagcttcgctggtgcgtaacgccagctccatctgattttcttccatcaacgaggctttgagtgtatccagcaatttgcggattacctcaatgttatcagcttcatcaaggtcttcataaaacagttccgccgacgggctgatatttccctttaaccatacgtccagcatatgttcgcttaacgattcaccgttaaaaggattaatcagccaaatttcgccatccggacattcaatgcgcaatatcagctgcgtagggaaaatcaccggcagcagcggcaaatcgagacgattcgcgacccataataaaaccgcacctaatgataccgcactgccctgtcgattctttaacacctggtccagccataatgcatcggaaagacgataaacgccgcgtgaggctttaaatccccagtcgccgtaaaacagcgcgatcagtttttccagctgctcttctaaaggcagaagctggctgatttcttccttcgccagactaacgagacgctccagttcgtcgtaaacatcttgcgagggaaaatcgcggcggattgcttcgcaagccaggatcatgccttcgcacaatggcgctttattaaattcgaaatcagctaacgatctcatgacttaccccagtaacggtacttttgtggtggcgagtttaatgatgatgtacagcaccaccaacgccagcgggaaggcaataatgcgcgcctgctgactgtgcatacgacgataatcgagtgcaataaaacccaaaacgatataaatgataactccaaacagcttttcagtcagccactgtgcctgcccagaaaatggcaggatgtgcgctttagccatcaacgcaatgccgcttaacaataacatcgtatcgacaaccggcggcacaatgcgcgtccagcgagcaaatgcctgtggatgcttctgataacgtagccagaaacgtaaggttaatagcccaacagaaagcgcgatactaataagatgaacactaagcagtgtagaaaaacttgtcattgataatagcggccgagcgttacgcgctcgttatcaccatagtcacggcaggtttcgacgtcatgataccccgcgaggataaatgcctgccgcaccgcttcgccctgctgccagccatgttccagaagcagaaagccgccggataccagcgcgttacgcgactgttcgatgatatgcacgatgtctgccattccactgtctgccgcaaccagcgcagtgagcggctcaaagcggacatcgccttgttgaagatgagggtcctgctcgtcaatatacggcggattgctgacaatcatcgcaaactgctgcccggctagcgcgctaaaccagtcgctttgcagaatgtggatatttttgatcgccagatgctgggcattacgttgtgccagggcgacagcatcgggcatacgatctacagcggtaatttcgcagtccgggcgctcgcgagccagcgcaagcgcaatcgccccggtacccgtcccgagatcgagaatacggcaaggttgttcaggcaaccgcgccagtgcctgctccaccagacactccgtatccgggcgcggaattaaggtcgctggcgaaacaaataacggcaacgaccagaattctcgcaccccggttaaatgagcaatgggttcaccatcgcgacgacgtgtcagtagcgcatcaagttgctgacattgttcgtcagtcagctgcgtttcaccaaaggcgaggataaaagtacgccctttgccggtaacatgttccagcaggatttcagcatcacgccgcgggctttcgctcgcctgaagttggcttattgcttcacgtaaccagtgttgatattccattattcctgctcggacaacgccgccagttggtcggcctgatgttcctggataatcggttcaatcagcatatccagcttaccttccatcacttcatccaggcggtagagcgtcaggttgatgcggtgatcggtaacgcgcccctgcgggaagttgtaagtacggttacggtcgctgcgatcgccactccccagcaggttacgacggggtagacgcttcggcctgttggcgttttgccatttcagcagcgtggatnnnnnnnnnnacagaaagtgctttagctttgtttttatgttgtgaacgttcgtcctgacattcaacaacaatcccggtcggcaagtgagtaatacgaattgccgaatcggtggtgttaacgtgctgaccacccgcccctgacgagcggaaagtatcaatgcgtaaatctgctgggttgatgtccggcagttctgcgtcaggcagttctggcattaccgcaacggtacaagcagaagtatgaatacgaccctgcgattccgtagcaggaacacgttgcacgcgatgaccgccggattcaaatttcagacgaccatacacaccatcaccgctaattttggcgatgatctctttataaccaccatgttcaccctcgctggcgctcatgatttctacccgccagcggcgggcttcggcataacggctgtacatacggaacagatcgcctgcgaacagcgccgcttcgtcgccaccggttccggcacggacttcgaggaaggcgttacgttcgtcatcaggatcttttggtagtaacagaacctgtaattgctgttccagttgctcgcttttttctttagcttcgcgcagttcatcctgcgccatctcacgcatttcaggatcgtcgagcatcatctgtgcggtttcgatatcttcctgaacctgttgccagtcggtaaaacagcgcgaaacatcacttaactgcgcatattcgcgtgataatgcgcgaaaacgttcctggtcggcgatagtttgcgcgtcacccagcaacgcctgaacttcttcatggcgttcatgcagggcttccagtttggcaacgatagaaggcttcataggcgtaaatgcaccctgtaaaaaaagaaaatgatgtactgctactccagcccgaggctgtcgcgcagaatattcaggcgttcgttatccccgtcacgggcggcctgttgaagtgatttcgttggcgcatggatcaagcggttagtcagtttccatgccagatcctgcataatggcttgcgcgtcgccgccctgctcaagggccgctaacgctttggcggttaactcatcgcgaacttgctctgcctggccgcgatactcgcgaatggtttcgctggcgctttgtgctcgcagccacgccataaattcgctggtttcctgagcgacaatagtttccgcctcaaccgctgcggctttacgctgcgccaggttgtgcgaaatgatgctttgcagatcgtcaacgctataaagataagcattcgccagtttaccaacttccggctcaacatcgcgcggaacggcaatatccaccaacagcattggttggttgcgacggctttttaatgcgcgctccaccatgcctttcccgataatcggtaacgggctggcggtggaactgatgatgatatcggcttcgcgcagacgttcgtcgatatcgctcagggcaatcacttccgcgccgacttcatctgccagaatttgggcacgttcgcgagtgcggttggcgataatcatcttctgtactttatgttcgcgcagatgacgcgctaccagctcgatggtttcgcccgcgcctaccagcaacactgtgaccgtagagagcgattcaaagatctgccgcgccagcgtacaagccgcaaaagcgacagacacagcgctggcaccgatatctgtttcagtgcgaacgcgtttcgctacagagaaagatttctggaacatgcgttccagttcgctggccttcatatggcctttttgcgaatcggcaaacgcttttttaacctgaccaaggatctgcggctcccccagaaccagtgaatccaggccgctggcaacacgcattaaatggctaaccgcgtcgttatcctgatgccagtagaggcttttacgcagatcttcttcattaagattgtgataatcgcaaagccagcggattaacgcctcttgcaggttatcctgctcttcaacgctaagataaagttccgtgcgattgcacgtcgacagcaccacgccgccctgcaccatcggctgcgcaagcaggctgtcaagcgcctgatcgagcttatccggcgaaaacgatacacgttctcgcagcgatacaggtgccgttttatggttgataccgagtgctaaaagggtcatgtctgcgggaaataataccaacgttgatagggttagtctgcttgcatcatacaggatgcgtaagatcaataaaagagagcgcccccttttggagtaattgccgaaagccgttagattctggcaattaagacaacttgaacatagacgatagcggacggtaacgctagcattaagggttataactgcaacgtatctcaaggacttgtcatcactatgcccctgcccgattttcgtcttatccgcctgctaccgctggctgctcttgtgctcactgcctgttccgttaccacgcccaaaggtcctggtaaaagcccggattcgccacaatggcgtcagcatcagcaagacgtgcgcaatcttaatcagtatcaaactcgcggcgcgttcgcttatatttctgaccaacaaaaagtgtacgcccgtttcttctggcagcaaactggtcaggatcgctaccgtctgctgctgactaacccattgggcagtacggaacttgagctgaatgctcaaccgggtaacgtgcagttagtcgacaataaaggtcagcgttataccgccgatgacgccgaagagatgattggcaaattgaccggaatgccgattccgctcaacagcttgcgccagtggattttaggtttaccgggtgatgcaaccgactacaaactggacgaccagtaccgcctgaacgaaattacctacagccagaatggcaaaaactggaaagttgtttacggtggttatgacaccaaaacgcaacctgcgatgccagccaatatggaactcaccgacggtggtcaacgcatcaagttaaaaatggataactggatagtgaaataatgcggacacagtggccctctccggcaaaacttaatctgtttttatacattaccggtcagcgtgcggatggttaccacacgctgcaaacgctgtttcagtttcttgattacggcgacaccattagcattgagcttcgtgacgatggggatattcgtctgttaacgcccgttgaaggcgtggaacatgaagataacctgatcgttcgcgcagcgcggttgttgatgaaaactgcggcagacagcgggcgtcttccgacgggaagcggtgcggatatcagcattgacaagcgtttgccaatgggcggcggtctcggcggtggttcatccaatgccgcgacggtcctggtggcattaaatcatctctggcaatgcgggctaagcatggatgagctggcggaaatggggctgacgctgggcgcagatgttcctgtctttgttcgggggcatgccgcgtttgccgaaggcgttggtgaaatactaacgccggtggatccgccagagaagtggtatctggtggcgcaccctggtgtaagtattccgactccggtgatttttaaagatcctgaactcccgcgcaatacgccaaaaaggtcaatagaaacgttgctaaaatgtgaattcagcaatgattgcgaggttatcgcaagaaaacgttttcgcgaggttgatgcggtgctttcctggctgttagaatacgccccgtcgcgcctgactgggacaggggcctgtgtctttgctgaatttgatacagagtctgaagcccgccaggtgctagagcaagccccggaatggctcaatggctttgtggcgaaaggcgttaatctttccccattgcacagagccatgctttaagccgggcaagctgagtttcggtgacaacgtcaccttgttccagacgttgcatcgcgctcttaaatacaccgcctggaaaggatcatgcctggcccgcacagttttcggcagattctttccaccaatggacgcatgcctgaggttcttctcgtgcctgatatgaagctttttgctggtaacgccaccccggaactagcacaacgtattgccaaccgcctgtacacttcactcggcgacgccgctgtaggtcgctttagcgacggcgaagtcagcgtacaaattaatgaaaatgtacgcggtggtgatattttcatcatccagtccacttgtgcccctactaacgacaacctgatggaattagtcgttatggttgatgccctgcgtcgtgcttccgcaggtcgtatcaccgctgttatcccctactttggctatgcgcgccaggaccgtcgcgtccgttccgctcgtgtaccaatcactgcgaaagtggttgcagacttcctctccagcgtcggtgttgaccgtgtgctgacagtggatctgcacgctgaacagattcagggtttcttcgacgttccggttgataacgtatttggtagcccgatcctgctggaagacatgctgcagctgaatctggataacccaattgtggtttctccggacatcggcggcgttgtgcgtgcccgcgctatcgctaagctgctgaacgataccgatatggcaatcatcgacaaacgtcgtccgcgtgcgaacgtttcccaggtgatgcatatcatcggtgacgttgcaggtcgtgactgcgtactggtcgatgatatgatcgacactggcggtacgctgtgtaaagctgctgaagctctgaaagaacgtggtgctaaacgtgtatttgcgtacgcgactcacccgatcttctctggcaacgcggcgaacaacctgcgtaactctgtaattgatgaagtcgttgtctgcgataccattccgctgagcgatgaaatcaaatcactgccgaacgtgcgtactctgaccctgtcaggtatgctggccgaagcgattcgtcgtatcagcaacgaagaatcgatctctgccatgttcgaacactaatcgaacccggctcaaagacccgctgcggcgggtttttttgtctgtaatatccatttgtatgacctatgcctccttcacctgccatttagttgacagatgatgcgctcacggatgaaacattattgtgaacaaaatattttcctcacatgtgatgcctttccgcgctctgatcgacgcttgctggaaagaaaaatatactgccgcacggtttacccgtgacctgattgccgggataaccgtcgggattattgctatcccgctggcgatggcgttggctattggtagtggtgtggcaccccagtacggtttatatactgcagctgttgcggggattgtcattgctctgacgggtggatcacgctttagcgtttccggtccgactgcggcatttgtggtaattctctatcccgtgtcgcaacagtttggactggcaggactgctggttgcgaccttgctgtcggggatctttttgattctgatgggtctggcacgctttggtcgcctgattgagtatattccggtttccgtcaccttaggtttcacctcgggtatcgggatcaccatcggtaccatgcagattaaagattttctcggtctgcaaatggcccatgtcccggaacattatctacaaaaagtcggcgcattatttannnnnnnnnnccattaatgtgggtgatgctgccattggcattgtgacgcttggcattctggttttctggccgcgtctgggcattcgtttacccggtcaccttccggccttgctggctggttgcgcggtgatggggattgttaacctgctcggcggacatgttgctaccatcggttcgcaattccactacgtcctggccgatggttctcagggtaacggtattccgcaactgctgccgcaactggtgctgccgtgggatctgcctaattcagaattcacgcttacctgggattctattcgcacactgctgcctgcggcattctcaatggcaatgctcggcgcaatcgaatctctgctctgcgccgtggtgctggatggtatgaccgggacaaaacacaaggcaaacagcgaactggttggacagggactggggaatattatcgctccgttctttggtggtattaccgctacagctgccatcgcgcgttctgccgctaacgtccgtgccggggcaacttcccctatctcggcggtgatccactctattctggttattcttgccctgctggtactggcaccgctgctctcctggctgccgctttccgccatggcagccctgctgttgatggtggcgtggaacatgagtgaagcgcacaaagtggtcgacttgctgcgtcatgcgccgaaagatgacatcattgtcatgctgctgtgcatgtcgttgaccgtgctgtttgatatggttattgccatcagcgtggggatcgtgctggcatcgctgctgtttatgcgtcgtatcgcacgtatgactcgcctggcaccggtagtcgtagatgttccagacgatgtcctggttctgcgtgttattggcccgctgttttttgctgctgctgaaggcttgttcacggacctggagtcacgtcttgaaggcaaacggattgtgattctgaagtgggatgccgttccggtacttgatgctggtggtcttgatgcgttccagcgttttgtgaagcgtctgcccgagggatgtgaactgcgcgtgtgcaacgtggaattccagccactgcgcactatggctcgcgctggcattcaaccgatcccgggacgcctggcgttcttcccgaatcgtcgcgcggcgatggcggatttataagtacgagattgaccagtcagcgcaaactgactggtcagcaaactgcattatttgttagctatgacggcgattatcgctacggcggcaacgtttgtcatagtggcgaacccaccagtaacggtcgcacacctgttcatgcccgccaacacgggcacccgccagccagagaatggcaccgacgaaaatacttagcactgcaccatgtgcgaaatactggggcatattaaactgtggtaactggttgaggattgaataccccacgccgaccaccattaccaccagacccaaccccatgagcacgttaccgagtaacgaagcgtttttgcgtttcatatgtcacctccggaactttctgggttgtaacagggaatacccctcttccttatgtgtaaagtatagacaacaccctgtgggttatgtgcgggcgtgatcacaattacaacccttatttcaacaaaactttacaaataaacgcctgaacaccttgactttctaatagtccactcatgcaattattacgttatctgcatttgatacgcagctttttgtcaagcggggccgcaaccagtcaactacgcgccagttatgtacacactcaggacaaaaaaacgtgacgattaaattgattgtcggcctagcgaaccccggtgctgaatacgccgcaacgcgacataatgctggtgcctggttcgttgacttactggcagagcgtttgcgcgctccgctgcgcgaagaggctaaattctttggttatacttcgcgagtcactcttggaggcgaagatgtccgcctgttagtcccgactacatttatgaatctcagcggcaaagccgttgcggcgatggccagttttttccgcattaatccggacgaaattctggtggcccacgacgaactggatctgcctcctggcgtcgccaaatttaaattgggcggtggccatggtggtcacaatggactgaaagacatcatcagtaaattgggtaataaccctaactttcaccgtttacgcatcggaatcggtcatccgggcgataaaaataaagttgtcggttttgtgttaggcaaaccgcctgttagtgaacagaagttaattgatgaagccatcgacgaagcggcgcgttgtactgaaatgtggtttacagatggcttgaccaaagcaacgaaccgattgcacgcctttaaagcgcaataagtcgttgtctgcggcatttttgccgagtgccgtgtataataggcaaagttatttccatttctgcaatctgttagcaataacaggttgattattaagatattaaggtgatttaaatcatgggattcaaatgcggtatcgtcggtttgcccaacgtcgggaaatctaccctgttcaacgcgctgaccaaagccggtattgaagcggccaactttccattctgcaccattgagccgaacacaggcgtcgtaccaatgcctgaccctcgcctggatcaactggctgaaatcgtaaaaccgcaacgtacgcttcccacgaccatggaatttgtcgatatcgccggtctggtaaaaggcgcatcgaaaggcgaaggtctgggtaaccagttcctgaccaacatccgtgaaaccgaagcgatcggtcacgttgttcgctgctttgaaaatgacaacatcattcacgtttccggcaaagttaacccggctgacgatattgaagttatcaacaccgaactggcgctggcagacctcgacacctgcgaacgtgcgattcatcgcgtacagaagaaagccaaaggtggcgataaagacgcgaaagctgagctggcggtcctggaaaaatgcctgccccagttggaaaatgcaggtatgctgcgcgcgctggatttaagcgctgaagagaaagcggctattcgttacctgagcttcctgacgctgaaaccaacaatgtacatcgccaacgtcaacgaagacggttttgaaaacaacccatatcttgaccaggtgcgtgaaatcgcggcgaaagaaggttctgttgtggttccggtttgtgctgctgttgaagcagacattgccgaactggacgacgaagaacgtgacgagtttatgcaggagcttgggctggaagagccgggcctgaaccgtgtgatccgtgccggttataagctgctgaacctgcaaacttacttcaccgctggggtgaaagaagtgcgtgcatggaccattccggttggagcaaccgcgccgcaggcagcgggcaaaatccatactgattttgaaaaaggctttatccgtgcacaaaccatctcgtttgaagatttcatcacttacaaaggtgaacaaggcgcgaaagaagcaggcaaaatgcgtgcagaaggtaaagattacatcgttaaagatggcgatgtgatgaacttccttttcaacgtctaattaatttgttgtctcatgaggtttcgctaaatctcatgaagagcgcaaaagtatatataatccacgcaattgcgtggatttttcatttcaccgagtcctaatcattcttgtaacatcctacacttttgtgcttattgcctacagtgaaccacgagaataattaaagacatcagtgtcagatgacggatatctcattagtagtgatataacgtaagttttggtccactacacatcacccccttcacagctgatcaatattgatcacgctccaatatgctggcgagaaaaggacttacctgaagggtaatatcccgcagataaagtccccgaataacgtgattacgtgcgatcctggcaagatgaaaatgataaccagtagcacaataacaacgataggccagaaaacccattgaccaaaaatgaatatcgatgttttttgctttttcttattagtaatgcaaaaatggcgcatattgtttttgttatgcagatacatcaagcgaaattcccataactaattaggattattacaaaaaatcttcaccaaattttttaaccgctgtttgttgtaatatttttgccatatttatagtaacgaattggaataagcaacgacaacttagggaataactcgatataaactcacctttgtaagggggatgttaaatatatattaattcctgtgttcctgattttgcccggtaatagagaattattctctgagaagctcatcatgattgcaccatacaaatatcatgatgataagaggatattattcattgatttaaacaaaatgacaaaatccatagacccatagtctgggtactatataggagtggtatgggcatcaaacaacacaatgggaataccaaagcagatcgtctcgctgaattaaaaatccgttcgccctcaattcaactgataaaatttggcgctattggtttgaatgcaattatcttttcccccctgctgatagctgctgatacaggaagtcaatatggcaccaatattactattaatgaaggtgacagaattacaggagataccgccgatccatcaggaaacctctatggtgtaatgaccccagcaggaaacacgcctggcaatatcaacctgggtaatgatgtcaccgtcaatgtcaacgacgcctctggatatgcaaaaggaatcattattcagggcaaaaacagctccctgacagctaaccgactcacagtagatgttgttggtcaaacctctgccatcggcattaacttaattggtgactatacccatgctgacttaggcacaggcagcaccattaagagtaacgatgacggcatcattattgggcatagctcaacactaacagccactcaattcaccattgaaaactcgaacggtataggcctaaccatcaatgactatggcaccagtatcgatcttggaagcggaagtaaaatcacgaccgatggaagtacaggtgtttatatcggtggtctcaacggcaataacgccaatggtgctgcgcgttttacggctacagacctgacaatcgatgttcagggctacagcgccatggggataaacgtacagaaaaactctgttgtcgatctcggaacaaacagttccattaaaaccaatggcgataatgcacacggcctctggagctttggccaggttagcgcgaatgcactcactgttgatgtaactggagccgcggccaatggcgtcgaagttcgtggtggtacaaccactatcggtgcagatagccatatttcttccgcgcagggcggtggcctcgtcaccagtggttcagacgcgacaatcaatttttctggcacggcagcgcaacgaaacagcatcttttccggcggttcttatggtgcctcggcccagacggcaacggctgttgtcaacatgcaaaataccgatattacagttgatcgtaatggcagtctggcgctgggtttgtgggcgctcagcggcggtagaataaccggagacagtttggctatcaccggcgcggcaggagccaggggaatttatgccatgaccaacagccagatcgacctcacgagcgatctggtcattgatatgagtacacccgaccagatggccattgcaacgtaacatgacgatggttatgccgccagccgcatcaacgcctcgggtcgtatgcttatcaacggtagcgttctttccaaaggtgggctaatcaatctagatatgcacccagggtcggtttggacaggttcctccctcagcgataatgtcaatggcgggaaactggacgttgcaatgaataacagcgtctggaacgtaacaagtaattctaatctcgacacgctggcgctgagccattcaactgtcgattttgccagccacgggtcaactgccggcacatttgccacattaaacgtagagaacctgagcggtaacagtacctttattatgcgtgctgatgttgttggcgagggtaatggcgttaataataaaggggatttattgaatatcagcggaagtagtgctggtaatcacgtattggctatccgcaaccagggcagcgaggccactacgggaaatgaagttctgacagtggtaaaaaccactgacggtgcggcctcgttcagcgcgtcttctcaggttgagttggggggatatctgtacgatgtgcgtaaaaatggcactaactgggagctttacgcttccgggacagttccggaaccgactcctaatcctgaaccaacaccggctcccgctcagcctcccatagtcaaccccgatcctacgcctgaacccgatcctacgcctaaccccactcccacacctaaacccaccacgaccgcagatgctggcggcaattatctcaatgtcggttacttattaaactatgttgaaaaccgtacgctgatgcaacgaatgggtgacctgcgaaatcagagtaaagacggtaatatctggctgcgcagttatgggggaagcctggactccttcgccagtggcaaactgagcggctttgacatgggttacagcagtatccagtttggtggggataaacgtctctctgatgtaatgccgttgtatgtcggtctgtatattggctcaacacatgcatcgccggactatagcggaggcgacggtaccgcacgttcagactacatgggaatgtatgccagttacatggcacacaacggtttttacagcgatctcgttgtaaaagcatcgcgccagaaaaatagttttcacgtactggacagtcagaacaacggcgttaacgccaacggcactgcgaatggattgagcatctccctggaagccgggcagaggttcaacctgacccctactggttatgggttctatatagagccgcaaacccagctcacatacagccaccagaatgagatggctatgaaggcgagtaatggtctcaatatacatctgaatcactacgaatcgctgctggggcgtgccagcatgatactgggatatgacatcaccgcaggcaacagccagctgaatatgtatgtgaagactggagctatccgcgagttttcaggggatacagactatctgttgaacaactcccgggagaagtacagtttcaaaggtaatggctggaataacggcgtgggagtcagtgcacagtataacaaacagcacacattctacctcgaagcggattacacgcagagtaacctctttgatcagaagcaagtcaacggaggatatcgcttcagcttttaagtgcgggatagaccagcccttaaacgatgctgaaaaatgttagcgtgcgccggaatgaaatatagatcactctgatgtatcagaaatcgtctctgtctttcatacccggcgcttaaactgccctgcatcaatgccatgttgcttcattttccgccacagcgtagtgcggccgatcccaagtaaagccgacatttcctgaatgcgaccgcctgtgacctgggctgcgttaataattgcctctttttcaacttccgcaaatgacagactggtggaaaggcgtgtggcgctgacatcatctgttgcctgctcggtaaacagatgttccggcaaatcactgacgcgaatgcgcccattatcactactcagagcaagattctcgatgacgctgtaaagttcaaaatcgttgccaggccatgcacaggaaaccaggcgagcgagggcatcgtcatcaattttcagccgcgtagagaagcgtttttcaagactgcgtaatttgttattcaccagcgccggaatgctgccacgccgcatacgcagaggcgggatggtaatttcaaatgcatgcaacgcgtaatacagctggcgactaaaacgattttgttccaccagcattgcgaggtccgcggtcgttgtggcaatcactttgacatcaactggtattaaacgccgcgcatccagtcgcgtgataacaccctgcttgataacctgaagcaaagcagactgtaactccaccgccagatattcaatcttttcaagaaacagcgtgccgccgtgtgccagttccagccgactcagacggccattttcattgtccgtgcgatcgccaccaataaattcttccgccagcgccgcatcaccatataactcacaattgacggcgatataaggacctgcagcacgctcgctttcattatgaattgcctgacttagcagtgcctttcccacgccctcttctccacaaagcaggacaggaaagctactgcgcgccgcctggcgaccaaaatgaatcaagcggcgggtttgcggatcgtcctgtggcatatgagcgaaggtatggctgacttttcctaattgactggtcatcaactgccgcatctgttccacaggatggagcaacaaaataaagctggttccctgcgtttctattatcggtttaagggttatcaccgcatcaataaactgatgctgactttcaaaggttgcttctacgtgtttgagcggatgtgcctgttttattgcttgttgcaatacggcgggtaacgttaagagttcagtgattgcccttccctgacttgccgtcgcgtcaaggcgcaagacccgcgccgcctgggcattaataaattgcaaattaccctgctcgtcccagctaatcacgccatcatccatactttctaacagggcattaagttgatttaaatgacggttagtttcagcgagcaaactgtccgtcagcagtaaatttccgacctcgcgggcgattgccaacgtcaacggcaaatcagctgcggtagtttgctcaaccggacacgccagcgctattgttcccgtcaatcggcccttgctgtcaaacaacggcgttgcacaaaaggcccagttccagagtgcctgtttgaaatgttgatcggccatcgttttcacggcctgaccagagatagccgctaacgatagcgcacaagtaccaataattccctcggcgcaatacgtgccgtcattgaatcccagtgcacttagctgctgcaaggtttgcggatcgccattacggctgagaatgcaggcggtttcatcgaggataaacagcgcacactctcgcggtgccatatattcccaggcatcttccagcgcagcctgcccgagcgtcagcatcgctttcttacgccgataaatagaagcaaatgtcacgccctgggcctgatgtggtacgttccatgtctcccgtttcatcagcttattgcatcgctcccaggaggttgcaattaagggagatatgccccgaccatcgttgttaaaagcgccactcatatcccgcatcccttatgacaaaaggtgttccggctcgcaattttaagtattaatacacgtaaaagtttcaatatggaacattcattaaagcatatgtttcactatgaaacataatttgggctaattttcttttcccttgcctgatgcacaatggattcatcggcagtcagtggtagccgtgtcgttgaacatcatccatgccctaccgtaattgctggagcaaaataatgaaaaaattgatcaatgatgtgcaagacgtactggacgaacaactggcaggactggcgaaagcgcatccatcgctgacactgcatcaggatccggtgtatgtcacccgagctgatgcccctgttgcaggaaaagtcgccctgctgtcgggtggcggcagcggacacgagccgatgcactgtggttatatcggtcaggggatgctttcgggggcctgtccgggcgaaattttcacctcaccgacgcccgataaaatctttgaatgctccatgcaaattgatggcggcgaaggtgtactgttgattatcaaaaattacaccggcgatattcttaactttgaaacagcgaccgagttactgcacgatagcggcgtaaaagtgaccactgtggtcattgatgacgacgttgcggtaaaagacagcctttataccgccgggcgacgcggcgttgccaacaccgtattaattgaaaaactcgtaggcgcagcggcggagcgtggcgactcactggacgcctgtgcggaactggggcgtaagttgaataatcaaggccactcaataggtatcgctctcggtgcctgtaccgttcctgccgcgggcaaaccttcttttaccctggcggataatgagatggagtttggcgtcggcattcatggtgagccgggtattgaccgccgctccttctcttcccttgatcaaaccgtcgatgaaatgttcgacaccctgctggaaaatggctcataccatcgcactttgcgtttctgggattatcaacaaggcagttggcaggaagaacaacaaaccaaacaaccgctccagtctggcgatcgggtgattgcgctggttaacaatcttggcgcaactccgctttctgagctgtacggcgtctataaccgcctgaccacacgttgccagcaagcgggattgactatcgaacgtaatttaattggcgcgtactgcacctcactggatatgaccggtttctcaatcaccttactgaaagttgatgacgaaacgctggcactctgggacgccccggtccacaccccggcccttaactggggtaaataaggagaaagcaatgtcactgagcagaactcaaattgttaactggctcactcgttgtggcgatattttcagcaccgagagcgagtatcttaccggactggatcgcgaaattggcgacgctgaccacgggctaaatatgaaccgaggctttagcaaagtggtggaaaaactccctgctatcgcagataaagatatcggtttcattctcaagaataccggtatgacgctgctttccagcgtcggtggtgccagtggtccgctgttcggtaccttctttatccgcgccgcacaggcgacccaggcacggcaaagcctgacactggaagagctttatcagatgttccgcgatggcgtggacggcgtaatcagtcgcgggaaagccgaacctggcgataaaaccatgtgtgatgtgtgggtgccggtggtggaatcgttacgtcagtccagcgagcaaaatctctctgttccggtggcgctcgaagctgccagtagaatcgccgaatccgctgcacaaagtacgattacgatgcaagcccgcaaaggccgcgccagttatctcggtgaacgcagtattggtcaccaggatcccggcgcgacctcggtgatgtttatgatgcaaatgttggcgttagccgcaaaagagtaaggaattggtgatggtaaacctggtcatagtttcacatagcagccgactgggagaaggtgtcggtgaattagcccgtcagatgttaatgagtgatagttgtaaaatcgccattgccgcgggaattgacgatccacaaaatcctattggtaccgatgccgtcaaagtgatggaggccatcgaatctgttgctgatgccgaccatgtgctggtcatgatggatatgggtagcgcattattgagtgctgaaactgcgctggaattgctggctcccaagatcgccgcaaaagtacgtttgtgtgctgcgccgttggtcgaaggtacactggcagcaacggtcagcgcggcctcgggagcggatatcgacaaagttatctttgacgctatgcatgcgctggaagccaaacgtgaacaactgggtttaccgtcctccgacactaaaatctctgacacatgtcctgcgtacgatgaagaagcccgttctctggcggtggtcataaaaaaccgtaacggcctgcatgtacgtccggcctcccggctggtttataccttatcgacatttaatgccgatatgttgagggaaaaacacggcaaatgcgtcacaccagagagtattaaccagattgcgttactacaagttcgctataacgatacgctgcgcctgattgcgaaagggccagaagctgaagaggcactgatcgctttccgtcagctggctgaagataactttggtgaaacggaggaagtcgctccacctactctgcgtcccgttccgcctgtttcgggtaaagccttttattatcaaccagttttatgtacggtacaggcaaaatcaaccctgaccgtggaagaagaacaagatcgattacgccaggctattgacttcacgttattagatctgatgacgttaacagcaaaagcagaagccagcgggcttgacgatattgccgcaatcttttctggtcaccatacactgttagatgatccggaactgctggcggcggcaagcgaactccttcagcatgaacattgcacggcagaatatgcctggcagcaagttcttaaagaacttagccagcaataccagcaactggatgatgaatatctacaagctcgctatattgatgtggacgatcttctgcatcgcaccctggtccacctgacccaaacgaaagaagaactcccgcagtttaactcgccaactattctactggcggagaacatttatccttccacagtactgcaactggatccggcggttgtaaaaggtatctgccttagcgccggaagtccggtatcccacagcgccctaatcgcccgtgaactggggattggctggatttgccagcagggtgagaaactgtatgcgatacaaccagaagaaacgctaacgctggacgttaaaaggcaacgtttcaaccgtcagggttaagccactgttcggatggcatcgttctgatgtcatccggcaatttactcagcactaatggtttttaactacctgttatatttttcaccaatttatgatgatttttcttcgctaatcacgaacccaacgccgctggctggctaataaacagacgttatttgatcactctatttcgccgttatttatccctttaattcccttttctaaaatgcctgacagttcgcagaatgagatttcgatcatgcagctagtgcgatcctgaactaaggttttctgatacttgaataccgttttattcggtttcgccaaaggagaatgattgatgaaatcccccgcaccttctcgcccgcaaaaaatggcgttaattccagcctgtatctttttgtgtttcgctgcgctatcggtgcaggcagaagaaacaccggtaacaccacagccgcctgatattttattagggccgctgtttaatgatgtgcaaaacgccaaactttttccggaccaaaaaacctttgccgatgccgtgccgaacagcgatccgctgatgatccttgctgattatcggatgcagcaaaaccagagcggatttgatctgcgccatttcgttaacgtcaatttcaccctgccgaaagaaggcgagaaatatgttccgccagaggggcagtcactgcgcgaacatattgacggactttggccggtattaacgcgttctaccgaaaacaccgaaaaatgggattctctgttaccgctgccggaaccttatgtcgtgccgggcggacgttttcgcgaggtatattactgggacagttacttcaccatgttaggacttgccgaaagcggtcactgggataaagtcgcggatatggtggccaattttgctcatgaaatagacacttacggtcatattcccaacggcaaccgcagttactatttaagccgctcgcaaccgcccttctttgccctgatggtagagttactggcgcagcatgaaggcgatgccgcgttgaagcaatacctgccgcaaatgcaaaaagaatatgcttactggatggacggtgttgaaaacctgcaagccggacaacaggaaaaacgcgttgtaaaacttcaggatggtacccttctcaaccgctactgggacgatcgcgatacgccacgaccagagtcatgggtggaagatattgccaccgccaaaagcaatccgaatcgacctgccactgaaatttaccgcgacctgcgctctgccgctgcgtctggctgggatttcagctcgcgctggatggacaacccgcatcaactaaataccttacgcaccaccagcatcgtaccggtcgatctgaacagcctgatgtttaaaatggaaaaaatcctcgcccgcgccagcaaagctgccggagataacgcgatggcaaaccagtacgaaacgctggcaaatgcccgtcaaaaagggatcgaaaaatacatgtggaacgatcaacaaggctggtatgccgattacgacctgaaaagtcataaagtgcgcaatcagttaaccgcggccgccctgttcccgctgtacgtcaatgcggcagcgaaagatcgcgccaacaaaatggcgacggcgacgaaaacacatctgctgcaacccggcggcctgaacaccacgtcggtgaaaagtgggcaacaatgggatgcgccaaatggctgggcaccgttacagtgggtcgcgacagaaggattacaaaactacgggcaaaaagaggtggcgatggacattagctggcacttcctgaccaatgttcagcacacctatgaccgggagaaaaagctggtggaaaaatatgatgtcagcaccaccggaacggggggcggcggtggcgaatatccattacaggatggctttggctggaccaatggcgtgacgctgaaaatgctggatttgatctgcccgaaagagcaaccgtgtgacaatgttccggcgacgcgtccgaccgttaagtcagcaacgacgcaaccctcaaccaaagaggcacaacccacaccttaaccagcgcttactccgacaacgtcattcggcttctccggatggcgttgtcggcagataacaccatagctatggttttttctacacagacggtttttcaagtcctggcgggaagtattgcgcaaatgtttgccatacgtggttgccgaagatagcgtcatttctacgggtaagtgtttcactttcatcacccggcgatttacgccgacgttggctatataaagcatcaattgctacctgaatattgttacggtgttcactcatcaacgtttttttgctttctggagttaaattaataatcacataatccagacactccagagaatttagcaaccaaaaaaagaattcagaccattcctcttcgcgtaactgaagcattgccgaacgggtattttggcttaatctgccagaaggattgatcaattctaaatgttcaataagcgcagccaaaaccgcctcactatccgccccatttttaacgcctgactggctactgtctaaaatatttattttctgaatcacaccaaaaacaacgaaacaataattaaaaaaggattctgttgttgttaccgggaaccgactttatcggatatcgaagtgctatattgatttttttcacccgtaaagcaggtgtcgagtatacgttctgatgtgaaagcggatagcggcatctgtatcgctatccgccttatgaaaatcttattctcttcgcaggaggcggaatatgcccagaacgagaatagctcccaccaccgccaccaggaagctgtgcagattaaaaccactgatggagccgccaatgccaaacatggtcgccagccagccgccgaccaccgcaccgactatcccgagaatacaggtcaggaaaaatccaccaccatcacgccccggcatgattagcttggcgataatgccggctatcaggccaaaaataatccaggcaataattcccatgttcaggccctcgtttcgatgaatcggacgcaagaaatgcttacatcaacgctctaagtataggcaagggcgggatcgatgctgggcgtatgtcggctgatttaagaacaacatgtaaaaaatattcacgcatttgtattaagttttgttaactgtgaccgataaaccaaagacagtttgtcagtcaggagtttttccgcgtgagtcattaccatgagcagttcctgaaacaaaatccgttagccgtcctgggcgtgttacgcgatttgcacaaagccgcaattcctttgcgtctcagttggaatggcgggcagctgatcagcaaaatactggcaataaccccggataaactggtgctggatttcggcagnnnnnnnnnnaacatcgccgtgctaaaggcacagcacattaccattaccgccgaaactcagggtgcgaaagtcgagtttactgttgaacaactacagcagagtgaatacttgcagcttccggcatttatcaccgtaccgcctcccaccttatggtttgtacaacgacgccgatatttccgcatctccgccccactccatccgccttatttttgccagaccaaactggcggataacagtacgttacgtttccgcctgtatgatttgtcgttaggcggcatgggcgcattactggaaacagcaaagcctgccgaattacaagaaggcatgcgcttcgctcagattgaagtcaacatggggcaatggggtgtttttcactttgacgcccagttaatctccatcagcgagcgcaaagtgattgatggcaagaatgaaaccatcaccactccccgtctgagcttccgttttcttaacgtcagcccgacggtggagcggcaattacagcggattattttctctctcgagcgagaagcccgagaaaaagcggacaaagtgcgcgactgatttacatcgcgtccagtgcctgctcaagtttgtagatatagcgcggagcctgcggcgcaggatgatttcgcgctacgtgatcgaggaactcgtcagcatccaaatcgttgattttgctgatcgcctttttccgatctgacgagaaagtccgtagcagcgcacctgccccgttagcgtatgacaccaccagcgcatattgcagtaccttcggatcttcaatgcctgccagcgggccggtttccagaatattcaggtaagccgcccccattgaaatattacgctctggatttttcagctcgctggtcgtcggctcaccactccagcccatacggcgataaacatcacgtccggaggttgaagcttttaactgcatcaaaccaatggcattcgatttactcaccgcgttcggattaccacccgattcgatagcgataatcgccgtgatcaattgtggatcgacgccccaggctgcaccggctttctggcttattggcatccactgcatcgcacgttgcaccggaactttcgcgttccacggcgggttcgtatagtcatgctttgatgaacaacccgctaataacacaatcaaaaaggcaaaccatctcaatttcacttcttctatccttatagcctggaatcgccgttgaggtgacaacggcacacctaagcggcatgatatacatttcgtttctgttgtcagcaaggaattgccatgtctctgtttcacttaattgccccatcgggttactgcattaaacagcacgccgcgctgcgtggtatccatcgccttaccgacgaggggcatcaggtcaataacgtcgaggttattgcccgtcgttgtgagcgttttgcgggtacggaaacggagcgcctggaagatctcaattcccttgccagactgactacccccaacaccatcgtgctggctgtacgcggcggttacggtgccagtcgtttactggcagatattgactggcaggcactggttgctcgccaacaacatgacccgttactcatttgcggacatagcgattttaccgccattcagtgcggtcttctggcgcaaggcaatgtcatcacctttagcggccccatgctggtagcaaactttggtgcggatgaactgaacgcctttaccgagcaccatttctggctggcgttacgcaataaaaccttcaccattgaatggcaaggggaaggcccgacatgtcagaccgaaggcacgttgtggggaggcaatcttgcgatgctgatttcactgattggtacaccgtggatgccaaaaattgagaacggtattctggtgctggaagatattaacgagcaccctttccgcgtcgaacgtatgctgttgcagctctatcatgcgggaattttgccacgtcagaaggcgattattctcggtagctttagcggcagcacgcccaatgattatgacgcaggttacaacctggagtcagtgtacgcgtttttgcgttcccgcctgtcgattccactcattaccggcctcgattttggtcatgaacaacgcacggttacgctgccgttgggcgcacatgccattctgaataacacccgggaaggcactcagttgacgattagcggtcatcctgttcttaaaatgtaaaaaaatcacgcttcagggctaagtaaaacgctgtctctgccgctaatatggtagggtttatat

SEQ ID NO: 196 - DNA, 36711 bp, Escherichia coli
  source 1..36711: mol_type = genomic DNA
atctgaaattgctgatgaagcaggcatgtcctccgccgttacagtacacttcgatgaatcagtgtatttaaacagcttttcttttggtatcagattcagtaacagcataaaaatcaaaccggagttcgcaaaatacctttttcgaacccatttcatgcgctctgaaatagcaaaaacagctagtggtgtaacacgctttaatatttcaaaatcaagatttaaaaaaatactagttcctatcatttgtcctaatgatccagaaaaatcccttgccatccagtctgaaatcgtgcggattctggataaatttactgcacttaccgctgagcttaccgctgagcttaccgctgagcttaacatgcgtaaaaaacagtacaactactatcgcgaccaattgctgacttttaaagaaggtgaggttgagtggaaagctttgggggaaattggtgaagttcgtatgtgtaaacgaatcctaaaatcacaaacatcttctgagggagagattccattttataaaattgggacatttggtaaggaacccgattcctatatatctagaaaactatttaatgaatttaaagaaaaatatagttatcctaaagttggtgaagtattgatttctgccagtggaaccatcggcaggactgttatatttgacggtagtgaatcatatttccaagatagcaatattgtctggattgaaaataatgaaaaaatagttttaaataaatatttattctatttctataaaatagcaaaatggggaatatctgaaggtggaactattaaaagactttataatgataacttaagaaaacttatgataccagtaccatttcctgattctcctgaaagatcgctagttgaacaacaaaaaatagtgaaattactggataaatttgatgctttgaccaactccatcaccgaaggtcttccgcgtgaaatcgagttgcgccagaaacaatacgagtactatcgtgacttactgttcagtttcccgaaacctgaaactgtcagtaattaattgaccattgctaccgaccggaccaccttaacatccggtctgtatatagactattttttacgtgccggaagtcacccttaactcccttccggcccttgccagacggcacaaaggatgcgctatgactcatcagacacacactattgctgaatccaataactttatcgtccttgataagtacatcaaagctgagccaacaggcgacagctaccagagcgaatcggacctggaacgtgaactgattcaggacctgcggaatcagggctatgaatttatatccgtaaaatctcagtcggctatgctgtccaatgttcgggaacagcttcagagcctcaatggtgtggtgtttaatgacagcgagtggcggcgtttcacggagcagtatctggacaacccgagcgatggcattctggataagacccgtaaaatccatatcgactatatttgcgactttatttttgacgacgggcgtcttgagaacatctatctgatagataaaaagaatctcatgcgcaacaaagtgcagattatccagcagtttgaacaggcaggttctcacgctaaccgttatgacgtaactatcctagttaatggcttgcctctggtgcaaatcgaactgaaaaagcgcggcgtggcgattcgtgaggctttcaaccagatacatcgttacagtaaagagagttttaacagcgaaaattccctgtttaagtatctgcaactgtttgtcatttctaacggcaccgatacccgttactttgccaacaccacaaagcgcgataaaaatagttttgacttcaccatgaactgggcgaaatcagacaacacgctgattaaagacctcaaagattttaccgctacctttttccagaaacatactctgctgaatgttctggtgaactacagcgtttttgacagtagtcagacgctactggtgatgcgaccgtaccagattgccgccaccgagcgcattctgtggaaaattaagagctcctttacagcgaagaactggtcaaaaccggaaagcggtgggtatatctggcacaccacgggttccggtaaaaccctgaccagctttaaagccgcgcgtctggcaacagaactggactttattgataaagttttctttgtggtcgacaggaaagacctcgattaccagaccatgaaggaatatcagcgtttttcgccagacagcgtcaacggctcggaaaataccgcaggtcttaaacgaaatctggataaggacgataacaaaattatcgtcaccactattcagaaacttaataacctgatgaaagcagaaagcgacctgcctgtatacaatcagcaagtggtgtttatatttgatgaatgtcaccgcagccagtttggagaagcacagaaaaacctgaagaagaaattcaaacgctattatcagtttggttttaccggcacacctattttcccggaaaacgccttaggctcagaaacgaccgccagcgtatttggccgtgaattgcattcatatgttattaccgatgcgattcgtgatgaaaaagtgcttaaattcaaggtggactacaacgatgtgcggccacagtttaagtctttagagacagaaactgacgagaaaaaactgagtgcggctgaaaatcagcaggcgttccttcatcccatgcgtattcaggaaattacgcaatatatcctgaataacttccgccagaaaacccaccgtactttccctggctccaaaggttttaatgccatgctggcagtgagcagcgtggatgccgcgaaagcctattacgcgacgtttaaacggttacaagaggaagccgcttataaatctgctacctataaaccactacgtgttgcgacaatcttctcctttgccgctaatgaagaacaaaatgccattggtgaaatttccgatgaaacttttgataccagcgcaatggacagcagtgctaaagagtttctcgacgctgcaattcgtgaatataacagctattttaaaactaacttcagtaccgacagtaacggttttcagaactactatcgtgatttagcccaacgggttaaaaatcaggatatcgatctgttaattgtcgttgggatgtttttaaccggcttcgacgctccaacattgaacacgctattcgtcgataaaaacttgcgttttcacggcctgatgcaggcattctcccgcaccaaccgcatttatgacgcgactaaaaccttcggtaatatcgtcacgttccgggatctggaacgctcaaccattgatgccataacgctgtttggtgacaaaaataccaaaaatgtggttttagaaaagagttatgcagagtatatggaaggctttactgatgctgccactggtgaagctaaacgcggcttcatgacagtagtttcagaactggaacaacggttccctgaccctaccagtattgaaagtgaaaaagagaagaaagacttcgttaaactgtttggcgaatacctgcgtgccgagaacatcctgcaaaactatgatgaatttgccacgctaaaagccctgcaacaaatcgatcttagcgatcctgttgcggtagaaaaattcaaagcagaacattatgtggatgatgaaaagttcgctgaattgcaaacaattcgtctccctgctgatcgcaagattcaggattatcgttctgcctataacgatattcgcgactggcagcgccgtgagaaagaagctgagaaaaaagagaaatcaaccactgactgggacgatgtagtttttgaggtcgatttgctgaagtctcaggaaataaacctggattatatccttggactgattttcgaacacaacagacaaaataaaggcaagggcgaaatgatcgaagaggtcaaacgcttaattcgttcaagcctgggaaaccgggcgaaagagggcctggtggtcgattttattcagcaaacgaacctggatgatttaccagacaaagccagtatcattgaggcattctttacgtttgctcaacgcgaacagcaacgtgaagcagaagcattgataaaagaagaaaacctcaatgaagaagcagcaaaacgctatattcgcacgtctttaaaacgcgaatacgccaccgaaaatggcacagaattaaacgaaacattaccaaaacttagtccgttgaatccgcaatataaaacgaaaaaacaggcagttttccagaaaatcgtctcgtttattgagaagtttaaaggcgtaggcggaaaaatatagcccaattcgtgtttttcttgcgggttcttaattaaacccgcaagagaccgtggggttccaaatggctaatatactccccttacccatgcgcaacgatgccgccaaaaatgatagagaacagccagaaatagatcgcggccataatgattttgaatgccgtgttcatattttcagctcctgtgattgattggatacatgccgcgccttgcggcatgtttttattttcactttctctgttttaaaaatcaatatttattagagcaattattattgatgaagaagcgcattttcatactccctgaccattaacgtaagtacgccgtgactcctgaaaacacgcgctacttcaatcttatcttccagcgcgaacgcaattttacttagaccaattttcttaaggagaacaatctttgctgggccgtcatttctgtcatcggtggcagggcgcatagatagcaaaggctcagccccgtttgttacgtacttccgcagccaagctcgtgttttatcccttgcgatctcacagcgcccggttacaaaccagaccgtgtaaacgttaaataactggcgcacaatatcaataactggagttatgggagtatcagtgtcacaggcgagattaaactcgttccagtcctttgttaatgcacctttacctggtggcggaagcaaatgcagtctgtcttccgttgcctccgatattgttccatcaatatcgactatgacgatatacggacgttcctggtgtgcgtgtttattgaaaatactcaaatgccctcctcattggacgaaaaaaatgctggtgggacgcactccaccagcattaaaagtgacactgtaactatcagcgaacgtaaatagtgccgccgttctctttttcccatgcatcgctacgtgcatagcaaacatcgagaagtcttcttgccgcagtttcctctaaactcaattcgacaaccaactgctcatgacggcgggtaaccacatcaaacagggtatgcagccctttagttgccagatcatcaatgaattccggttcgaacggcagctctgcatctgccaacataacctcttgcgcccactcaactcgacggaccagttccgggcggcggctttccatctctttacagatcaattcatggaagaactctacccaaccttccggctggaactcgcggaaaatggccaacggctggaagtttggcatcaaccattcgttgatccggatatcaatggcatagcccatgtcgcagcagaactgataagcaaagtccagcttagaaacgatataaggacgctcgttattgaactctttaggcgatgagatcccataagccaggaggcgcgggaagaaggagatttgccctaacgtcggatgaagtttgcttgcagggaaacggcgctcagtaatgccatacatttccttcttgagcgtcgcaaatttggcattctcattaaccagcgcggtaacctctgcttttttattagcaaatgccacgcgcgcttcgcttgcatctttaatagtttttttgagctgttggttaaggtcggcgacctgcttacgcagttcctgtcgctcgcttttagctttgttatagcgtttctcaaggttaaaaggatcaagtttcatgatctctttatattgagattttagcgttgaaatctgtgagttccgcagttcaaccatcgcggtcatttcattgagttttgtttccagctcaatgcttatacgttcggcattatcagcacgctggttggcgtcatgcgtcgcatcgtcgatcgcgtcctgttgctggcgtttcaaatgttcaatttgcagctgaagctcttcaatttctttacccttcagaccgagatccaactgcatattttcagctgcatctaccagggagttatggctatcagcttctgcgttataaacatcaataagctgtgcgtgaagcatctccgctgactgaaccgcattatcaaaaaaacgtgctgtgaggtcatcacaactaacgcggcgttgcgcggcccggatgttctggataatggccgggataccggcattcaggacatcagggatagatacattttcgattgattggttttgtgctgaagtgctcatttcaaagttccgtattagcttgtgcttcggtcatttttcctaagtatgaaggtggaaggactacgcaatttgtatccagtccctcacctatggcagcctgtaaaattctggctaaggtgagtctcttgttgcgatacctggtgatgacatgcctgataccgccggtcggcgtaacaaaggcgatcagccagtagtgatatttccgtcggaatggccacatagtgcaccttatggattgctctaataaaaaacgtgataagtgtacatcacgttttaaaaatatggaattattagagcaatattattctgattcttgctcaaaaaacgcgctaatgagaggaagccaatcctctgatacttcacgcggtcgcggtttgccatggaagaagattattcggcagtcttttggtaatgccccattccccctggagtagcgcgcacttgcatatttcgaaccaggttccacaacatcggccttgtaacttacaaaccatcccggatacagatcctgaaatgctggtgtatcatcgcccataaccttccgtaagaacccctgatcaccccagcattcagtagtaacacaacgagcaatccaaccttccggatcttgccagaatgcactccagatatgcgcttttacactatttggtatccacagggcaccgctgccacgatattgtggatggtaaaaatccctaagcatggtgaagctggttggtggatcctcaaggattgggcgtatatcaccggcaataaccgtgtccaaatccagatagaacagatcatcggttatatccggtcggaacaactcgattttcgcccaccagccacggcacttttgccactggttgatcaatgggacaactttgacgccaggcacatgtaaacgcttcagatctgtcaggcaaataatctcatagccttttggcagttgattaaccagccactgcacatcggaagcgttatagtcgccaccagagcgaagaactaaagcaatcttcatgctgcaccatcacctttcactttcatcaatgtcaggtttccgcaaaatacggcaccagtgtcgatataatgctgattccagaatgtcttcgggcttttcaccggagtgtgaccaaagataaaacgatctgcgcccgaaatttcgccaccaatatcatccatcgaatcactgatacgctcgcgcgcccagacaacgttgaaaagcggcacctccttaccgaattgatattcattatccggatagtcggcatgggctataacgatagtttcttgcccggtgttcaactcaatgatatagggcagtcgtcttaccaactccaccagcgccctggctaatatttcctgatcagcgtccagcatgaagaaccattgaccgccattcattagccagttattcacgttgccatcaggacttaacgcatcaatcatcagccgctcatggttgcccataaccgctctgaaccatggcatctgcaatagctccaggcatttaacattttcggtgccgcgatcgataaggtcgccgaccgatatcagtaaatcctgcgcagggtcaaaatccacacgatggagttcggacatcagtctggtgtagcaaccatgcagatcaccaacaacccagacattcctgtatttggtaccgtcgatacggtgataaattgtgggtgccatcatgtattcttcagccattctttaagagtcatctgcggaatacctcccattttcccgcatgaaacaacgtcaatccgttcacgcgcagactggaataacaaaggcaggtgacttagattttttggcgtgccgccggagtgaacgcgtggttcttgtgtagcgtcaacgcccaccagggctacatgtttgaatccgatatggaaagccaggttcagagcaccatatgcactattgccgctggcaatttcattctcatcttcgcaaagtccgaaatgtgcggaccagcgccacgcccaccactcgggagaattcgtattttttggctccatgccacgttcagccacacgacggaagcacagaacgccgtctctgacttcacgttctttaacatcgggtagtgccatgcaataacaaacaccacggcgacggcggccacgaccaacgcgccgcatattgtctggcgatggatcaagtgtgaaaaaataannnnnnnnnncagtcgatggccccattgaccgctataataggcactccgcgcggcgcaacaaagtttgcggcgcttgggccactgccgacgataataacgcgatcactgcctctaaatttattcttgggaaacattgaattgcactgctcctacttgcattcaaaatatgtaaatctgcgtgttttttgcgggtatccaggaactgctgttgccattttgaaatagacacctgcgttggattccgtagggcttgagggtgcgcgccatgccaatgaagaccgttttgcagagaacagtcatagccgactaataccactacttcagcccctgattcagcagccagactgatagcctgcgcgccgctatttaccccttccgccggtccacaatatcgcctgtactccaacgaaaatgatttcgccgccgccaggttagctgtcactttgcggaatctccctcccggtatggtggatccgtattgcttccaccatgacaaatcaccggcgtataaggcataaatgtcatcgaacatctgccaggaattgttaaccgcgatgattgaacagccagttttttctatagcagcacagtcctcacgagtgagtgacggaccgctaccgacacaaaaaacagtcctagtcgccctgggtggtatgttcattctcagctgcaaattcagcctccaggcgagcattcatttcagcgattaccgggtccactacagcatctgcttcctgttcattacgcggcatgatcgatgccagcgattcataattagccttggatgacacgattattctcccgatgttaatgtgcgctatatcaaagagcacacatgcactaattaatttattatttcacgcagcatacaaccacttgtcaccgttcaatacatgctcaatagcctcaccctttttaaggctcatgtattccaggatggcggttatcgcttgttctgcaccatacgcaagaacgacgtagtaaccttcctctctaagcctgcgcatccaggcgatctgctctttcgtcggggctttaccatttggttctttaagctcaattcgcatgccgtgataaataccgcatgctttatcgagactcatgtccggataaccttttttctgcccttcagccttcattttcccggcggttgcttttgaacgtttccctccgttaggcgttgcatgcaacagctcatagatgtcagggtgcttgcgttcgaagtaatcaaaaatgaaaacctgctcgaagtgctcgcaatttccgtcgcgcaggtctgggttctttgccagtgctgcaagtgccttcgcatgtggagaaacttcttttaccggcgcaagcgataagaatggatcctttttggtttttggcctggaccgccccttatttcggcgctcactaaaagcctgaaactcttcctcagtaaagcgcaacacaatcagtcaaatcctgccggtcgcatgccatatttacgctgttttgcggcctgctcttccctgtgccattgcgcacactcagcgtcacaatagatgcctgattcgatcggttcattgcagtaacgacacttccctgtaaatacctggctcacgacctgtgcctgctttctgatgttatcgatggccatgtctttgagagcttctaattgattcatgctcagctctgcatcatcaacacgttctgccaattttgtttcctcgtgaagaacctacttaagggcagaatgatacatttcacaatcaaaattgcactaataattttcttttattgagttaaatattcaacaaatgactagcgatagaatcaccatcatctatttctggcaggctgactatggctacatcaatcactacaacccaaagcacccggcaatatcctctgtcgcggtatgacgaccgcaacatagccgatccaatactcagggcagagctacgcaaagaggtgatgcttatgtgtgaatcgaacgacaagaatctgacgatttattacgttcttcccgatgagcaatatcgcccggatttgctggcttaccgtatgtggggcatagcagagctacgctgggttgtgacgctcgccgccgggcttgaggatgagtctcagggtatgactgttggcaaaaaattaaaactcccacctgccacctggatccgcgaaatgattcgccatttccaatatgacggccaggtgatagggacattatccattgcgtaagggaaatgaatgccaactgaatatgctcgcgacaaccttggtcgctatcagactgatggattaagtgcaaaagactttaacaaggtcttcgatcttatccgtaaacagcagcgtnnnnnnnnnngcgtcagaatcggcgaaacgcgcgacgtacactcaccccaaggattatggggatgcgtaaccgcgaacttgaggcattcctcagccttgggaaaaagaaagatggcacctactttacgcccgaagatatacgcagtttcaacacctcaaggcaggctcataaaactaaattcaagagcacggtacccggcattacctatgctcagctggtggcgcagtccaccagcattgatataaaacgcgctaacaacaaggtttctgatggcacagggatcaaagccgcgacattcctcgggctaaaacacaaccttgcattgatatctgttaatgcctcggatgagtcggtccaccagcatcaccgtgtcagaattcgatttgaggaatgggataaagccgttgaggaaattgctgaagacggtgcgaaaaaagcccgaatcgctgccgatctctgcaagggccgggtatctttcgactgtgattgtggacgccatcaatactggtatcgttatatggccacggctggtaactatgctgtcgcgccgccaaaagagtatgcattccccaaaatccgcaaccctgatctgactggtgtggcttgcaaacatgttttgcacgctatgacgcgttttcagtctcccacatggcacaaggccatcattattgccctggaaaaagcagctgaacaggtagccttcggcgatgacaagcggaagacaacaacctatttcaaaggcgaactggctaaatcgctcgcgcgcaaccggacaacaacgacggatcaggctaaagctgcgcgtgagtatgagctgtatctgaaatctcaggatgcattaggcaaaaaactacgcgcaaaagatagcgccacggacaacgttcgcctgttattaaaaaaagctcgcaccacggcaaacaggaagaatgccgaactaaaagcctcgcgggtgagggaagcccaggctcgcgctgaagccgacgctctcaaaaaagccctgcaaacgcaggcgaacaacctcataaagtttttcatgagtcagggaatggacaaggccgctgccaccgcgcaggcgcgaagcattcttgagacacaaattaacgaagcccgtaaacggaaaggataatcgatggctggtttctttgatgacatgtttgaggacacagaaccatcacaacaagtgactggtgataacctcccggacaccgaatcggatccggatattccaggcgaaggttctgaactgattgaagaggaagatattgatgctgaaatcgaaaccgatggtgttaacgttggtaatattgttgatcctgtggaggacaatcaccttcccaatctggatcacggcctgcttagtgattctggtgtgcgccaccgttatcaaggtcatgcagtttttaataaccttgtgcggatggactggctcaaagcaatcaagctagaccctgactcattcgatgcggttctataccgcgcaataccttacagagacaaaaatacacctgaaacggcatctgaaataatagaaccgaaccaacgcatatatgactatcaggatccagaactgataacggccctcgactgcccggatgagatggacgccttctacgcgctatacgacggcagtgataatacgggaattagcgacagtgctttaatccttcggttagccgccgttaatgtgccagtgggttctatgctcgaatggctggaacagctgtcagacggcacaaccattcgccgcttctggtacatccataaaatattcaattacggcactgccagggtaggcagtttgttttattgcgtgccttcacgcgcctttgaagggaatttcatcggtgattctgaataatcaggaatggctactggccatctttaagaaaaaaggtcttactccaaccggtaagctggaatttgccactattgatggcattgattcggcgctcgcacaggctttaaacgaagcattcgactcacaagttgtcagctttaatgatcgcactaaccagtcattcagggagttcctgaaacgcacaccaagagatcgcataacgctcggcacttttagtgatgtgaaggagtggttgtcgtcatttgaagccgatcgcgccgggcgcaaagatacagcctctgctggcccggtaaataagctggcaatgccgcttgtgaatctgtctcgttctcccgcgttttcaatttatgaaggtgaactgtgccgggataattacgatgaagggcatgtcaccaatgaaaatgatgagattgaagccctggtatcgactatccctttctcactggaatattcgctatggatagccagtgacgagaaggaatctcttgggatggttacaactgcattagcattctggctacgaatgtatgccagcctcgggcaggcatctttcactcacactgccaacgtcggcggttatgagataccggttacctgttacatagaagggcaaaaatcaatcgcatttcaggatctgaccaccggcaccgccgacaacaggctgttcgcggttggattgaacctcacagtagtggcggagcttcctatcctggcttatatgcagcaaaccaccggcaccataacggtaaaagcgaaaattctggaggaatgagatggccacaaagaccaccacagccccagaaactgattcaaaacgcactcagctattcctgcaatctgtttcaattgggcagaacgaaatccctcgcgaaatgatcgtaggatgtacctatgtcgaagccggggagctatctggtccccagcttatgctcatggtcagggattcaacggcttacgtggtcaataagctgggggtgaaatttggaacaatactgactgtttcacttggtgatccggaaggtcatggcggcatcctgttctcggaagagttcttcgttcttaaagcgccgcgcaaggacgataccgtactgatttacgcgtttagtaacccggtgcggttattgaaagttccgtccaccagcgcacagtattttgttgataagcccccatcagccgtagtttcctctcttgcccctggtctgaaggtaaatgctgactcattcagaaaaacatccacataccacctaaatgttggagaaaaaccgaccaaggtattgcaggagatagcccgggataccggttctatgtgctgggcatccagggggacgatcaattttaaaagtatggaaaaaatggcaaacgccgctccatcgcttacttatgagtccgccaatcccaacacatccggatttacaattagtcagttcaacatcctgaatgccgattatgaataccagcgccgccacaattacagaatggccagttatgacatgaccaaaggtgtggtttactcaggtaaccaagaagaccccattaaatttacgagcaatcccgatcctaccgcgctggcgaactacaacaaattcattctcccccgcctcgatatgctggtggaaggaaatgccgcgctaactccgggtacgacgctgaaaattgtcgtgcataacacggcaggtgacggagaactcgatgaatcaatccctgacaaaatgatagtgatgtccgtgactcatttcgaagaccgctttcgttttgtcagccgtgcacagttaggagtggtgaatgggtagtttgacagggaagtatcgggctgtagtgataagcgtcgatgaccctaaaggtctgatgcgtacacaaatacgtgttgtcggcatgatggatgggttaccagatgcctcattgccgtgggcagaagctatattgtccaatgcaaacacgttttcaccatttctgcccggcgataaagtatgggtagaatttccctacaatggggattcgcgatggccattgataatcggttatgcacaggatgcatccggtggcgctcccaatgtgccgcctgaagcgtcaggacaaggtgaaggctatgtaccgcctgaaattgaaggtgcaccagcacaaccatcaaccagcgccaaaaaagactttatttcgtcgcggaacggactaatggagatccggacggcgggcggagcctgggccgttacgcacttgaaaagtggaacaacaatcgggttcaacgaggccggggagttatatgccatttctcaaggtccggcattcatctcttccgcaggaaatctcgatataaagtcaggcgcggatgtcgccctgaaggcggggggaagtatggcgatagaggccagcgggaatctatccataaaagccgctcaagtctctgttgacaaggcttaagaaaagcccggcgatcgggcttttctgttatgacgggttcaattttttatccgttaccgcgcgacggtttctgcgtgataaacgtctcaagcatcttttccgcaattgccgaccaggtgtgacactggaccttttcagcatttttcacgcgatcaacgcgagcaataacctcatcccaatcaatccgcgacttgataaccatatggttcaccaactccaggcgatccggcggaaggcaatcgggcggagttaatatcaacgctccacacattgccgcctcaagaacagttaatccaaggctttcgggatgcgtaacgataaaaacgtcactcttacgcaattcagctgcaaattcggttgctggcaccggcgtccgcctgtatggagttaccgaaatattccccggatcaatggtaaccaatccgtcatcagtcaacgttctggcctcatacggaacggtcagacgctgaaggttcataaggatacttaaggagtgatcaaaaccactaacatcaaatgcagcgtggtctacaaaaatacgcagaatatcgtctgttttggtttccagatggaacagctcctgattcgctgcccatccaacatgtttgttaaaacgattatgacgctctaacctgccgggattatccaggtaccgccaggtatcatcgcggacagtaaaagtaatatcgactggtgccgaatccagcatagaaccgtcatatacctgggctacccatccagagaatcggcgacacagttgcatgcctatttccctgggtaccgtagtaaaatacctcaatcctggtgccaaaatggccttcgcagaacatgcggtcgcagcagtcaacacagcttcaacataatcctccgggctttcgacgccaggggaatatggacgatggtattgcaatgttacccctgcctcactaaaggcgcaggccaggttataagcccacatttccgtatatgttttcacatcactgatagcttcaaattttcgcccaatgatcaggatgttcatcggcttttcctcattccattgcattaataatcctcttgccagtcagcaccagcatagttatcaaaccgtgagtattggccgttaaaagccaatctcaccgtgccaattgggccatttcgttgctttccgataattacctcggcaatgcccttcatttcgctatccgggtgataaacttcgtcgcgatacagaaacatgatcaggtctgcgtcctgctcaattgctcctgattcacgtaaatctgaatttaccggtcgtttgtccgcacgctgttcaagcgatcgattaagttgtgacaatgccaccaccggtacttgtaattccttcgccaacgccttcagtgagcgagaaatctcggcaatttccagcgttcggttatcttgcagctcggggacgcgcataagttgcaggtagtcgatcataatcatgctcaaaccaccattttctttataaacacgacgagcgcgggaacgaagctctgtaggtgtcagggcgcttgagtcatcaataaaaatattctgcttgtccaacagaatacccattgcgccagaaacccgcgcccaatcctcgtcgttaagttgccctgtccgaatacgagtctgatcaacgcgtgcaagagaagccagtgagcgcatcatcagctggtggctcggcatctcaaggctaaaaaccaatacgggcttatcgttacgaactgcggcattttcgacgagattcatcgcaaacgtggtcttccccatagatgggcgggcggcgacaatgatgagatcggacggctgaagccctgccgtcttcttattgagatcggtaaatcccgtatcaagccccgttacaccatcatgtggtcgctgaaacaactcttctatgcgagataccgttgcatcgagaatgctggcgatatcttttggaccactaccgctcttttgtcgtttttcagctatttcaaaaacgcggcgctcggccatatctagcaattcattgctgcccctgccatcctgcgcatatccagcttcggctatttcatttgcgacggaaatcatttcacgaacaaccgcgcgttcacgaacgatatccgcataagcacaaatatttgccgcgctgggcgtgttctttgacatctccgcaaggtacgcaaaaccaccggcgcgttctaatttaccgttctgttcaagtgcttcagcaagtgttatcaaatcaatcggtttgccatgacttaataacctctccatctcactgaaaatttcacgatgagcactggtataaaaatcatcagcaactatacgatctgcaacttcatcccagcggcagttatcaagcattaagccaccaagtacagcttgttctgcactaagggaatttggcatggattcaagaggggatgcagacattagcactccacccaggcgtgctgaatgtcagatataatcggcatactcaaatcactcctaacgatatgagtcatcaccagaaaatcaggattaatgcgccggactcttcccggctgtcacaccgaatcgccaggatggtgaatccctttacccgagaaacaacaaacggtggcttgcacattccggctacctggttcgttgcctgagctaggggcaaggttccccccttttaacgtcaccagaccgctaacgacgcatgtgccagacgccgtgttacaaccaaatatggtggcccctaccggacttgaaccggtgaccgtgcgattatgagtcgccagctctaaccactgagctaaagggccggattactgccaattttgcttacgcttttatttcaccggaacaaacggaacagcggtattactggtcatatactgcggtaatgtaccgttccatttgttgatcgcttccaactccataacaccggggttctggcgcagagcttcaccacgtaaacgaatggcatcagcttcggcctgggcttttgtgcgaatagcatcagcctgtccggcagcttccgcgcgcagcatgttggcctctgcttcacgttgtttgacctcttgctcgcgttgcagggttttttggtttgccgtgactttggcgttaatactgtcaataactgttggcgggtattctggcttacctacataagagaggctcatcacctgaatgccgattggcgtcatttcttcctgaatgtctttaagggctgcatcaagcaattcagatttgccaccgtcgataaatttgtcggtggtcattttgctggctaaccggttcagagcatctgcaaccttctggcgtagatcggtatcagtaatatcatctacacctttgcgataggtctgaaataccgttgtgacttttgctggatcaaccttgtaggctacgccgatgtggtaaccaatggttgttccgtcgctcatctggaagctgaacggctcatcgtatgtcttcatttgcttaaaggtcgggaagatataaacttcagtattcaagcctgtccagtagcgaccaacgccaactacttcaccgatacctttatcatcccccagcttatttactttgatccctacgttacctggctctacccgatcgcatccggtcagacataaagaacccaaaataatcgctgcactaatcaacgtttttttcattaattaatttcctggttttttcacgaaaaaagactactgcgaaagccgggtaaatgagcgcgagaaggactcccaacaatacaagtattgtgctgttagatgagatcatatttggcaaaagccaaacatacagaaccagtgacacaatcaaacagannnnnnnnnngcataaatatataaccgcacccatagcgttcgacatttgttcggattgttctgcatcctctcactccattatttaacgaataaaaaagctgcggtgccgggtgcctcccggtgtcctttggctggttatccaccgtggacggggaaacaaggagaaatgaatggactgatataaccatttccccgcgtgcgcttagccgcattcaccgcaacggaaagagcattcttggtggacctgtagattgggatatgaacccgttacaggagaatgctcttacctgttacgtgctccgtttcgtggagctaacggcgggtgatcgggccgcaccagactggacttatttcagcgttatgctcatgccagagaatcaaactgtgatggtcggtgctgaactccgacacagggttgtagcaagccccgcaaagcgcgcactactgtagttgcggcacatcagcctgtgcattcaccacaatgttgagaacactggttgtcacgctgcaacgcaacatttattcgtagattgggatatgaccccgttacgccagtgttctcaacgttgtagtgccggttacggttccggccaggcctcttcctcaacggggtgttctccatacggactaccgtttattggtcgttcctgcggtttatgttgtgaagccagatgcttatcttctggttgcttcaaagagctgcacttcatcacaacggtaagggtacttcgtagggattcgaaccctctgccaagctcggcgatctccggcgtcgcaaaatacccttacctgttgtgctggtgccgattaacggactcgaaccgctgacatcctgcttacaaggcaggcgctctaccaactgagctaaaccggcattggcgatggtggatggatttgaaccatcgacccgttgattaacagtcaaccgctctaaccgctgagctacaccatcacttgccgggtacgtctccggcgagggcttccacctccgtatgcttttcggcgcaccgcgccctggctgcaattcggtaacaggggatgcacaaccctggcttccagcgtgattagcgccttcagcatgacgggatatacccgtaaattcgtggaactgtacccaaagtgctgttaagcaccgctgttacgctgaaaagaaaacgcaacaggaaaggacgctgaccaacagatggccccttctcgttcatctggttaatcacaccagcgcccttacctgttgtgcctccccgttccctaatacacagacggggacactctgcggtcgatttttttgacgggggacgactcataccccgtggcatctggtttcttaggccgctaccatcatcagatcatcgtttgcatttactttaatggtcagtttctaaaccgccgcaaagtcgctaaccatgacgaaaaccctgaaaaaaacgcccacccgaagatgggcaaactggaagctcgtaacgcacttcggcgttgccacttaggcgcatggtcaacctggcaactcggtggtttgtctgggaggactaggcccagccatgcttaccgccgcgcctgtcgcggctaacagctaaatcgctctataaatcacgattcattgaggcgatattacactaattaatttattagagcaatatacccaaaacgtcatgagctacacctcgagtgtcccccttacaagacacagaacgtctggcaaaaagaggttccactctgaagccactgtcatgataaagctctctgatgtttggcgcgccactgttagtaatgagaacctttgcacctcgacgatgagcatccgtcaacagagacaccaggcgtttttgctcttcaaacttaaagtcatgaccggaatagttcgtgaacccctctgtattggggagcggttcatacggcggatcgcaaaagatgacatctccttctccggcagcttcaatcaccgctgcaaaatcaccgcatacaaactcagaccgcccttccgcaccgaggaaggcttccatctcctgtaatgggaaatacggagttttatacttcccataaccgacattgaactcaccggcctggttgtaacgcgtcaatccgttaaaacaatgtcggttcaggaacaaaaacgccgctgcgcgatgtaaatcatcatagacttgtttgttaaacgcattccgtactgccaagtatccctcctgggtgttgtagtccaggaaaaaacgatgtgccagagtgataagtgaatgcgcctcgcgttgcagagtcttgtaaaagttaatcaggtcagcattcacatcatttagcagattttcctggtatccggcattcatgaagacagctccgccaccaacgaaaggttcaatcaggcgcttcccttctggcaaatagcgaaagatttgttccagaacaccaaattttccaccagcccatttgaatatggaccgttcgaattctgccgctggtttaacttttcgctcttttgtttcacttccttctttctgccgacatacggccttagtaatccgatcgccaatccagcgcattactggtattgccatactattgccgatcgctttgtaacgcggtccgtcagctgcaagcatcacggcctcttcttcgcttaaatctggatagtgattgcgaagatatgccagttcatctgaactaacttttttacgcttttccgtcgggatcaacgtatgcccatcaggaaaaccttgcagcctttcacattcgacaggggtaagacggcggacagctacttctgcgtttcttacttcatagcaaacagctgttggatttttagcctttagagatggtgaagtattcttagttgcagcatgttgtgtaccgctcatacgctcaggaaaagccaatgtaacaagatgctcatggctttcttgctcacgtgcccgcaatgtaccatgcccttctgaccaaaaagctgctcctgtgctgctaaaaacggcaaggtcagtggcatctttaaaatctcttgcctttactgtcgatgcggtttcatcgtcaatatattccccaaatgctgccatcctgaaagcgtttacggctttcgtcgatttcataccgggtggcatgtcagcatgtaggcatggatttaggctttcgccactgattgcagcgccatttgcaataatggcggaagcgatttccttcttttttcggctcggcgcaatatcccggcgcacgccttcgaactcaaaaagtaccgttgcgggatcgaggtctgttcgagcacttgcgacaacaaacacgcgtcggcgtcgttgtgccactccgaagtattgggcatcaaggattctccaggccacctttcgctgcggtccataaatacaaccacactgcggccactttggagcatggcaaccggttttgccatcccaccgccagaacgcgttactttttcctgattcaggtcgatcacctggttcaaatggcgcatcttctccagccaatccggcaaggaaacatccgaaggcgttatctgccgatgacaagactcctgggacattttcccagacgataacggctggtttgagaaatgactcagcccgtttgtcgtcaattgcatttgcaagctccacatactttaaagttagcgcgccacgctcatcatcaagcccaccacgtaatccagcgatactgaatgcctgacaaggtgttcccccgacgagcacatcaggggattcgatttccccagccaggacttttttggcaagttttgtcatgtcgccaaggttggcgacatggggccagcggtgcgcaagaacggcagatggaaaaggctcgatttcagcaaaccacgccggacgcatacccaacggttcccaggcaatactcgcggcttcaattccactgcaaacagatccatagcacagctctttcactgcttagcctctccaccaagggcatttaccagagcatcaaccaggcacgaaatttcactggtcaacaggaagaaatctgcgtccagtcgctgcgcaacatcttcactatcaatatcagcgttctgctcaagcaattcatccgcaaatttgacgctggtaaggctgaagttatggtccagtgtaaatttaatgcggttctgccagtcgagtgccaacttagtgacgagcttgccagcttccaggtgtgtggatatttcatcacttcccaagtcctgctttttcactcgggcaataccgccatcctcaagcactgccttaagttctgccgcatcccccatttgaaatccctgtggagcactaccatcacgtacccagtcggtcagcgttaattcaatgggattttcaacacttaggggaacaacaggaagagaacccagagatttacgcataagcgcgagcatatcctctgcctgccgcgcgctggcattgatatagatacgtttagttgaaccgtcgtagatcgcctggataacagagaactttgaaaaagcccgtggcagaagagaatgcagaacttcgtctttcagggagtccttctctgttttcttcagtttacgcgcttgttcttgctcgagtttttcaattttttcttgaatagctcgctggataaccggcgggggaagaatttttgtttcgcgctttgcttcaacaaggataaaaccatttccatgcatagcgataacttcggaattatcaccaaatggagatacaaaaccgaacttggccatatcctgactaccgcatggcgtgaaaaggatcattttctttttatcttccaagtcggtcagatccgcctcacgagaaagtttaaaaatagtaatgtttttccagtgcttaaacatgttgtaacccttgaatatcaaccacagaaagctcgtttttgtagaaaaaggccaggttgaggcaccccctagtttgagcgtatgagctgggaccaatttcgttcttccagacaaatggcttcaaatccgtacggcgaagcataaaaacgcgatttgttccgctctgattcccaatgaggcaaaagccttctttcaccttgatagcctgcaagttgtcgagttcaccgctggttacacggctatcgaactctttgcggcttattagctccatctgcatctgacgactccaaacaaatacccattgaagggcgatggctgaatggtaccgaaaacacgacataaaaaacaatatttattagagcaattatttaatagttaacaccatgtagaccacaagtaacctaagttaaaataacgaaaaccagagcaaataattggtgatgacgtggcaagtattgcaacaaaagacagcatttgttcggggcacggaggattcccatccaggcctcctgtagagagtgaaccactacttaaagtcaacggagtcgaagtgttagttgatggtaagcaatatgcacagcataccgatggaaacagtacgcacggtgggcaagctatatcaaccagggcatggtttaccgtcaatggtaaagggatcgtatgcgttggtgaccctgtttcatgcggatctaccgtagcgtccggagacggcctggttcaggtaagttaggagatatcatgctggaaaaagactaccagttatccgcatataaaaaattggccgccgccggtgggatgaaaacacctggtgccataacatcggcacgaaacagtgctaacacagcaaaactgcttgcagaagaattgaccggattaattctggatacaattgtctatcccgacactattaccagctatgtttcaacgatcagaacaaccacaactggcttaacgaacattggagaactggcaactaagcacgcggacctgttggctggttatgcagatctgtcaatgctgcttcaactcgatattggttgggatgtttactgccgtgctaatgagcgagaagtttcagaactgccgatctctattgccattggtgatgtgaatattactaaatcgcttgaggacgctgttaacgcgcttaatacatcaagtttagtcgctgctatgggggagattaaccagacccttaacactggctcaggaagctcgtcaggctctggttcaggcggcggcactgccactcccccaccagcactaacagaagagcaaattgaatctctgaaagtagcaactgaacagtttggggttgttttcaaccagacaacagcgcccacaactgcgttacaacagcagtatgaacgagcgaatgaaagcgccaacgtagccataactgcttataaccatgctatcggtaccgcgcttgcggaagcatcagcaaataaggtcagcacagccagcgcagttgccgctttggttcctgattctgttcttgatgaattaaacaaagcggcacagtaacaaaggacttcattgataatttttcttcaggaggaagacatgtcattcttttctacgttaaaaacagctttgtctttgaaggagaaacttgctgctactggtgttcttgttctgatttgcacacttgttggtgctgggtttgcatgggaacgtcatcagctaaagcaagccatggagaaaattggcagtcttgatcaggctgttaaggaacgtgataagtcaataatggatcttaaccagaccattgagacgatgaacaaagcagagcaacattttcacagccaggaagtgaaaaatgaatcagaacaagccaaatatgctgacaggcaaatggaacgaaaagctgaagttcagaaacaactggttgcggcgggtaatgttcgccagcnnnnnnnnnnatcagaggtaactaaaagggatttttatgtctgataaagtaacagtaaagaaaactatcaacaaagcgacttcaatctacaaaattgagcacatcactgttggcaagccaggatctgaacaataccgtcatgctttcgagcttgccgatcagcttggtttaaaacacccggattgcatcgagcatgtatttccgacctatgctgatgagcaatgtactcatgttcttaccgaagaggattttttcagcactgaaggacgagaaggcgttgatcgctgcattggtgtgatttgctcttcagtgagttatgagttattccctaatgtccatgaaaatggtggtattggataccaattcctgtacgaaggcgatgagcttaaatgttatgaacatggtcttcttatcgaaagcgtagaataatacccttccttccaaccggctatgttggccggtttttcacttatccacattatccactgggtagatccaataattaggtccatacagatcccaattagatccatatagatccctgatcgttgcaggccgcgccacgtctggcttagaagtgtatcgcgatgtgtgctggagggaaaacgatgtgtgctggagggataaaaatgtgtgctgacgggttgctaatgtgtgctggcgggatataggatgtgtgctgacgggaaagcctgggtagttatcaccacttataaaaactatccacataattcggaaaaagtaatatgaatcaatcatttatctccgatattctttacgcagacattgaaagtaaggcaaaagaactaacagttaattcaaacaacactgtgcagcctgtagcgttgatgcgcttgggggtattcgtgccgaagccatcaaagagcaaaggagaaagtaaagagattgatgccaccaaagcgttttcccagctggagatagctaaagccgagggttacgatgatattaaaatcaccggtcctcgactcgatatggatactgatttcaaaacgtggatcggtgtcatctacgcgttcagcaaatacggcttgtcttcaaacaccatccagttatcgtttcaggagttcgctaaagcctgtggtttcccctcaaaacgtctggatgcgaaactgcgtttaaccattcatgaatcacttggacgcttgcgtaacaagggtatcgcttttaagcgcggaaaagatgctaaaggcggctatcagactggtctgctgaaggtcgggcgttttgatgctgaccttgatctgatagagctggaggccgattcgaagctctgggagctgttccagcttgattatcgcgttctgttgcaacaccacgccttgcgtgcccttccgaagaaagaagctgcacaagccatttacactttcatcgaaagccttccgcagaacccgttgccgctatcgttcgcgcgaatccgtgagcgcctggctttgcagtcagctgttggcgagcaaannnnnnnnnngcgatagaacagcttaaaacaatcggctatctcgactgttcaattgagaagaaaggccgggaaagttttgtaatcgtccattctcgcaatccaaagctgaaacttcccgaataagtgtgtgctggagggcagctgcatttgaaaaatgtgcgctgccgggaatgcctgcccattttcctgtttttggtgtgcgctggagggttgcgccacgcagtttgcccagacattccctccagcacacatctaaccatccaagtttccctccagcgcacatctaatcttctatctttcccttcagcgcacatatttgataccagcgatccctccacaacacataattcaatgcgacttccctctatcgcacattctggtcctgcatcatccctccagcacacatctaatagcctcatcgccattttttacgtgcaataatttacgcacaaatcaaaataagttgcacgtagcagaatcaaacgtacaattcactcatacgaaatgataaggagatgatgatgaaacgcgattacggcggtgtcggcaccatagctcttcgtgcaagcgcattacttaaggccatgagtcaggatattgaagatcagcgcaaagagttcaatcagaccgagtattatcagacgttcactcgtaacgctgtggcaaagttgccgaagctgagccgccgcattgtggagcaggccatcaaagagatggaagataatgggtaccagttcaacaagaaacaggtcggtaacgttgaacagtacgcgctgaccatccagaacgtcattgatatctatgcccaccgtaagatcccaaaatatcgcgacattcacaaatcgccttacgttatttttgtcgtaaacctgaagggtggcgtatccaaaacggtttccacagtcacgttggcgcacgctctgcgtgtgcatcaggatttactgcgtcacgatctgcgtattctggtaattgaccttgaccctcaggcatccagcacaatgttcctcgaccatactcacagtattggttccatcctggaaaccgctgcgcaggcgatgctgaacgacctggacgcggagacgctacgcaaagaggtgattcgtccgaccatcgttcctggcgtagacgtgattccagcctctatcgacgatggctttgttgccagccaatggaaagagctggttgaagagcatcttcccggacaaaatcagtacgaaatccttcgacgcaatatcattgatcgtgttgcggatgattatgactttatctttattgataccggtccacacctggatccgttcctgctcaacggtctggcggccagcgatttgctgcttacccctaccccaccagcccaggttgacttccactcaacactgaaatatctcacccgtctgccagaaatgctggagcaactggaggaggaaggcgtagaaccgcgtttaagcgccagcattggttttatgtcgaagatgaccggcaagcgcgatcacgagacatcacacagccttgcgcgtgaggtttacgccagcaacattctggactcttctctgcctcgtctggatggatttgagcgatgcggcgagtctttcgacaccgtaatcagtgccaacccgcaatcgtatccaggcagcgcagaggcgctgaagaaggcacgaaccgaggccgagcgtttcactaaggctgtgtttgatcgaattgagtttgttaggggtgaggcggcatgaaaaaaatagtttcccgtggacgagtgctgggcaagaatagctccgagtttgctcgcatgcttgaaggcagtgaaggcaccaaaacctttaccctaaaatctggccgccaggctaaatttttgcttaccgttgtgctgagtggtgagattgagtcgcgcacgttcgttgacccggcagttaacggccgcgatcagtctctgctcacccctgagtcggtaagcgatatttcccgcaccattaaattgcaacagttcttcccggctatcggtcgtatggttggggagcgcattgaggtattggacggatcacgtcgccgcgctgcgtgtatctttaatgaaacgaaatttgagattctggtgacgaaagatgagatcagcctggcggatgcacgccagctggccattgatatccagacagcccgcgaacacaccctgcgcgaactgggtaaacgcttcgaggttatgtatggtaagagcatgaccaaagaagagatcgcccgcgctgagaacatttcaaaggctaaagttacgcgcgcgttccaggcggcagcggtgccggatgagatgattgctgtcttccctgttgccagcgatctcgccctgccagattaccagttactgctccagatctccgaggatgccaacgctaaaagcgtacctattgaagagctggttgatacggtgcgcgaacgaattgcagagactgagggcgcgaaagaggataaagcgaagatactggctatcttcaaagcggaaagcaaaagcctgaagcccgcgccggttaaatctgtggtggttgagaagctgcgagacttctctgaccgtcgtcaatacgccagaaagaagtctgatccgaaaaaacgggtagtcgcctacgagttctccagactcccgtctgaagtgcaaactgaaattgacgaagcaataaaaaaaatcattgggaaaatgtctgctggggaataatccagctggtgggaggtggttttagcctcctcctctgcctaaaatgtcccgcgccgatttcatgtataagtgcatgatatatataaatattcatgaaagatttcaggctgaaattcccacaatttaacgcctgtattactcgttctcctccccgcacaaaaaaatttaaaaaattacttttcgcgagaaagtcaacaagtgactttcaataaaatctcttccgaaaagggattcacacaagtgccttgtgtttaaggaagagtaaattgagtaacttacgcgaataccagaatcgtattgcagatatcgcaaaacgctctaaagctgtgcttggctgggcaagcactgcgcagttcggtactgataaccaattcattaaagatgatgccgcgcgtgccgcatctatccttgaagctgcacgtaaagacccaatttttgcgggtatctctgataatgccaccgctcaaatcgctacagcgtgggcaagtgcactggctgactacgccgcaacacataaatctatgccacgtccggaaattctggcctcctgccaccagacgctggaaaactgcctgattgagtccacccgcaatagcatggatgccaccaataaagcgatgctggaatcagtcgcggcagagatgatgagtgtttctgacggggttatgcgtctgcctttattcctggcgatgatcctgcctgttcagttgggggcagctaccgctgatgcgtgtacattcattccggttacgcgtgacaagtccgaaatctatgaaatctttaacgtagcgggttcttcttttggctcttatgctattggtgatgttctggacatgcaatccgttggcgtgtacagccagttgcgccgccgctatgtgctggttgcaagctccgacggcaccagcaaaactgcaaccttcaagatggaagatgtcgaaggtcagaatgtcccgattcgcaaaggtcgcacaaacatctacgttaaccgtattaagtctgttgttgataacggctccggcactctgcttcacacattcaataacaaagcaggcgaacaaatcactgttacttgctctttgaattacaacgttggtcagattgtcctgtcgttctccaaagcgccagataaaggtacagagatcgccattgaggcggagatcaatatagaagcagctcctgagctgatcccacttatcaaccacgaaatgaagagttacaccctgttcccaaaccagttcgtcatcgcggctgagcacacggtacaggcggcgtatgaagcacagcgtgaatttggtctggatcttggctccctacagttccgcaccctgaaggaatacctgtcccatgagcaagatatgcttcgtcttcgtatcatgatttggcgaactcttgcgaccgactcctttgatattgcactgccagctaaccagtcctttgatgtgtgggcaaccatcattcgaggcaaattccagacggtatatcgcggtattattgagcgtattaaatcttctggtgcgatggggatgtatgccggtgctgatgcggcatctttcttcaaacaattgccgaaggatttcttccagccagcagaagattacatccagaccccatacgtccactacattggcaatctgttcggcaacgtcaaagtgttcgaagtaccagaaggtatttgtacgaacctgaccgccgacggtatccagttcagcccaatggatgtgctgtgctacgtccgtgatgaaaatccgggcaaagcgggcttcgtaactggtgatgcagtcccggctgtcccattccagcatccgaccaccccggcactagttaaccgaaccactctgtggggttcggctatcaacgatatgcacccacgtaacggcgctgactacttcacgcgtgtaactctgactatggccaaaaatggcggaattaacttcctgaccggtaacatgattgatgccggtgactctgagtaatcacgggaagttctccgtttaacatagcgcccccgtgcggggcgcataacagggaaagttatgtctcaatattcaattcaacagtcattaggtaatgcatccggcgtcgcggttagcccgatcaatgccgatgcgacgttatctaccggtgttgcattaaatagcagcttatgggctggtattggcgtatttgcgcgtggcaagccgtttactgttcttgcggttactgaatccaattacgaagatgttctcggcgaaccgctgaagccgtctaccggctcacagttcgaaccaattcgccatgtgtacgaagctattcagcaaacgtctggttatgttgtccgtgctgttccggatgatgcgaagttcccgattattatgttcgatgaatcaggcgaaccggcttacagtgcgttgccatacggttctgaaattgaacttgatagcggcgaagcctttgctatctacgttgatgatggtgatccgtgtatttcacctacccgtgagttaaccatcgaaacggcaacagcggacagcgcgagtaatgaacgcttcatcttaaaactgacccagacgacttcgcttggtgtggtaacgaccctggagacacacactgtgtctttggcggaagaagcgaaagatgacatgggccgcttgtgttatctgcctacggctctggaagctcgttctaaatatctgcgcgcggttgttaatgaagatctgatttctacagcgaaagtaacaaacaaaaaatcgttggcgttcactggtggtaccaacggtgatcagtcgaaaatctcaaccgctgcgtacctgcgtgcggttaaggtgctgaacaatgcgccgtacatgtacaccgctgttcttggcctgggctgctatgacaatgcggctatcaccgcattaggtaaaatctgtgcagatcgcctgattgatggcttctttgatgtcaaaccgacattaaggtacgcagaagcactaacagctgttgagggcaccggtttacttggtaccgattatgtaagctgttctgtctatcacttcccgttctcctgcaaagacaaatggacccaatcccgtgtggtcttcggtctgtctggcgcggcgtatgcggcgaaagctcgtggcgtcaagaaaaactctgatgtcggcggttggcattactcaccggctggtgaagaacgtgccgtcattgctcgtgcgtcaattcaaccgctgtatccggaagataccccggacgaagaagcaatggttaagggccgcctcaataaagtatctgttggcacctctggccagatgatcatcgacgatgctttaacttgctgcacgcaggataactatctgcacttccagcacgtcccatccctgatgaatgcaatcagccgtttctttgtccagttagcccgccagatgaagcatagccctgacggtattactgccgctggtctgactaaagggatgaccaaacttttggatcgctttgtcgcctccggcgctctggtggctcctcgtgatcctgatgctgacggtacagaaccgtatgtgctgaaagttacgcaggcggaattcgataaatgggaagtagtctgggcctgctgcccgactggcgtagcccgtcgtatccagggcgtaccgctgcttattaagtaagggaatacaatgagcaaaaacttttttcaatccggggcatttttggggaatggactgtcccgtttcgctttgaactctgatcctgtgcagctgatggagtctgcccgagcaagcgccgaaccgccaacagatccggttattaataataatccggaaccggcggcacagactaacgataacgttccatctgccccggctcctgagcaaatcctggaagggaaagacggtaaagaatggaccgtcgaacaggcgcaccagatgattctggaagctgcaaatcgaagtgctatgcagaatgcgttgagtgatgcggccgacgccgttttcgcctgggctgatagcggtgatctgactttcgactcccttgatggtttcgttcaggctatcgctggtnnnnnnnnnntctgatgacgacgactccgaagttacagaagaacaggacgatgcctataacgaagcatgggcaaatgttgctgacttcctcgcagcatgcggtgtagatgatgacctgatcgaagcactggctgacgatgaagacgacgacgctgctgctgatgttggtgcctctatcgctggtttagatagcgacgaccgcgacgaactggaagcggcgtttgttgttgctggcacttctgatgaaatgctgactgaagcatttaagaaggttgttcgtaacggtgagatcaaactcatccgtaaacgcctgcgtaaaaaacgtctgactgcggctcaaaaatcggcgctgaaaaaagcgcgtcgaaaagcccagaccggcgcggcaaaacttgcccgcaaaaagtcaatgaaactgcgccgtaagcgccttggctaaaggaggaggccggagaactccggcctttaacttgaatggcacctataccttatggggtttacagccaggctgacggtgtatcgccatatctgaaagttactttaacgaactctcagtaccaggttaccggatatatcagccagggagcggcaatgaacatggcccagaattgggaagcgccgtttaccggtatgtccatgggatctgttgctggtgccttcagtggttttgcgcaggttggtactgaaacaacgtcggttgcccgttggaacagcttaatggtttgggaagggggaacaccgccgactttcacgctgccagtaactttcatcgctttgtttgacccattcacggaggtttcaggagctatcgccgcattgtcagcgatgattagcccggaacttaaagatgccagtattggtggtcgaatcccggagcgtgtgacgctaaacatcattgatgtcgctatccaggacataagtttcgatctcgatgcgcccagggacagcaatgggcatttcctgaaaaacaccgtcaacctccagttgaccggttcttcgatatataacagctccgatattgttcgggcgttccagtaaaaggattttatatggggcacaataacactaagggaaaccgtaaatttattaagggccgctatactgccaacgcggccaaaggcgaacgactggtatcttctgaattccagctcacttttgcaggccatgaagatatcagcgtactggttcgcacgtcgcaaattcctgaaatgacccgcgaggatgtggaggactatggtccgaatggtgtgaagttcaaccagcacggtccaatccgtaactccggggaaatccaggtccagtgcgtggagactatcgaaggcgatattcttcagttcattaaagatcgcattgcggcgaaggactatgttgatatcacgatggctgcgacccctgaatccaaatcttccggggttaacgctgtgacaaaagctgctacaacaattgaaatgttggactgcaaaatctacagtgatgcaatcgactttagtaccgaagatgtgactgccgctgtgcgcccgtcacttcgtatcgtttacaactggattgagtgggattaagagtcatcccttgtattttaaagctcctgcgggagctttttttgtgcttaaattatgctggtatagcgaaattttgagcatattatggaaattgatttttcatactctcctgaaacgatagaacgaagattcgaaataattggatgcaaaactatttcagaggagcattattggattctctatgatgccaatacatggttatgtgccttagcagaatgtcagtcatcgttatgtgcaggggagggaggacttcgacataaggtgctggctacacttgaagtgaacacgttacgatattggtgtgtcgaaatacttaggaataacaaagaattacatttattgttgctgaataaatgtgcacctctgcgcagaaaagcataagaaaacccaacagccatactggaattatcagaagaatatgtgcggaaagttatagctagctattgaaaagctaaagtagatcggttagatttgccttactcatctaccatgtgtagaaagagcgatcgaacccgatacatagcaatatgtgtcgggttcagcttttttatgtcccaagcgctctttttctgctttgtttgagtgttctgattttactgttataggttacaacataggctgttttaagaagccaatagtctctacgtgcggatagcacaacaacgtagttttcacactcgttccagattacccattcttcagttggtcctcgtctttcagaccaacatgatatatcggaatggttataattccttatcatatgcgcgatccagcggatccgcttacaccgttcaagatcaggtattcgttcttcttctatttttccctctgatactaaatgccaaaatccgaactctttcccatcatattccggtgaataacgtaaccgaacagggagacccttaaacgttatattagagattaaaatgtcttctctgacaacataatatacatcgtctatatactcttgccaacttccattgaagtacaataaatctggcatttgaagcatcagcgagcctcccacacgaaaatattaaatttactttctgttggaagagtgctttttagtaaatccctgtttgtatgtgattttatcctgtttatgacttggatttttcccgcgttgctattcattcctcgatgaacgtagcctaacgcaccaatgaaaagatccgttagctgcaattgttgcacttcatgagatcgtatatgttgaattctgtttatcgactcatgattgtaatcatagcgatcattgtgaagaactcctcttaatttctcaattttttcaatacctaaagtatcttttatatctaggtagatattgtatgtgttgttactttctattatgt

SEQ ID NO: 197 - DNA, 35209 bp, Escherichia coli
  source 1..35209: mol_type = genomic DNA
gtttaaatgtgaatcgaatcacaatcgttcggggagcaatattaaatgcttttttttaagattataaattacgtaagaattttaatgtttaaaaaaagggttgaggaataacaggagtgctaacaatgaagcgaagccgcatctgacagtcagaatacggcttcgtaagcgcggttacttaccaatacagaagctggagaaaatccgccccagcaggtcatcagaagtaaattccccggtgatttcgcttaagttctgctgtgccaggcgcaactcttccgccagcagttcgcccgcccaggcacctaacagttgcgctttaccttgctgcaaatgctctgccgcctgttccagcgcctgtaggtggcgacgacgcgccaggaagccgccttccatgttggtgtcaaagcccatgctctgtttgagatggttacgcagcacgtccacgccttcaccagtccttgccgagagacgaattaacgcgtgaccgttcacttcactcattcccagcgtttcgccggtgatatcggctttattgcgcaccacggtgatcggcagtttcgctggcagacgggcaataaattccggccagatctctgccggatccacggcgtctgttgtggtgccatcgaccataaacagcacgcggtcggcctgttcaatttcctgccacgcgcgctcgataccaatacgttctacttcgtcactggcttcacgtagcccggcggtatcgatgatatgcagcggcattccgtcaatgtggatatgctcacgcagcacgtcacgcgtagttccggcgatatcggttacgattgccgcttcacgccccgccagcgcgtttaacaggctcgatttaccggcgttaggacgtccggcaatcaccactttcatcccttcgcgcaacaaactaccctgacgtgcttcagcacgcactgcatcaagatcggcaataacgtcattgagctgggcttcaatttttccgtcggagaggaaatcgatctcttcatcggggaaatcaattgccgcttcgacgtaaatgcgcaagtgggtgagggcttctaccagatgattaacccgtgcggagaatgcgccttgcagcgagttaagtgccgaacgggccgcctgttccgaactggcgtcgataagatcggcaatcgcctcggcctgggctaagtcaagtttatcgttaagaaacgcgcgttcggaaaactcaccagggcgagcaatccgcaggccgggaatggtcagaatgcgttttaacagcaggtcgaggatcaccggaccgccatgaccttgcagttccagcacatcttcgccggtgaacgagttcgggccagggaaccatagcgcaatcccctgatcgagcacgctgccgtcggcgtctttaaacggaagataatcggcgtagcgcggcttaggcagtttacccagcacggtttcggcaacttcacgggctttgaggccggagatgcgcaggatgccaacaccgccacgtcccggaggcgtggcctgggctacgatagtgtcattatcgctcatgatgttcctgttgctgtgtgtggcggatgcgcggtgcttatccgccctacgaaaagaaaaaaggcggtcaactgaccgcccttattttagcgaaaactcaccgaatcaggattttttcttctcgcggctatgcaggccacgtttttccagaccacggtaaatcagctgctgctgaataatggttaccaggttgctgacgatatagtacagcaccagacctgacgggaaccacaggaagaacacggtgaagatgaccggcataaaggtcatgatcttctgctgcatcgggtcggtcactgtggtcggcgacatcttctgaatgaagaacagcgttacgcccatcaggatcggcaggatgtagtacgggtcctgtgccgacaggtcgtggatccacagtgcaaacggtgcctgacgcagttcaacggaacccatcagcatgtagtacaacgccaggaagattggcatctggatcagcagcgggaagcagccgcccagcgggttaaccttctcagctttgtacagcgccatcatttcctggctgatacgctgtttgtcatcgcccagacgctcacgcattgcctgaatcttcggctgcagcatacgcatcttcgccatggaggtgtactgcgctttggtcagcgggtacatgatgccacgaacgataaaggtgatgatgataatggagaagccccagttacccacaaagctatggatccatttcagcagtttgaacagcggctgagagatgaaccacaaccaaccgtaatcaacggtcagatccaggtgcggagcaacagctgccattttgtcctggatttccgggccaacccacagggtgctgttcatcgcgccagtctgaccaggctgaaccagtaccggctgagatttatagccgatagcggcgatgccgttacccagattagcggtatagaagttgttggtaccgtcgttatgcgggatccacgccgtcgcgaaatactgttgcagcatcgccacccaaccacctttcgaagagatgtttaggttttcgttatcggcaatggtatcgaacttgtatttctcatacttctcgtcaggcgtggagtacgccgcgccacggaaggtgtgcagtgcgaagttgctgcttccggtatcgagatgcggtggcagagtgatggattgcttcaactgaccaaaggtggagatttccagtggtttctcgccagcgttctgcacgttgtagttgacgttgacagcgtaatcaccacgtttcaggacaaacgttttggtaaacgtgttgcctgccgcgtcggtatacgtcatcggcacctgcagttcgttttgaccttcagccagcacataagcgtctttttcaacgttatacagcggacgcgggccgttagccgggttatccgggccatcacgaccggtcagaccgctctgtgcctgataaataaactgcggtgaagtttccagcagctggaacggctgggtagagttcagctctttcgggtaagccggcagcagagcttgctcaacatcaccaccacgggtgttgatggtcagatcaagcacgtcggtcttaaccgagatcagtttcccctggccactggccggtacgccctggtcggcggcgctacccgctgcggtggtcgttgtctgcgtggtctgttgggcctgaggttgcgggtttttatcctgctcccaggcttgccagatcatgaaagacacgaacagcaaagcgatgactaaaagattgcgttgcgaatccatcgttagtgttctctggtatcaaatggtccgggcgggacgggatcgtcaccaccagggtgtaaagggtggcattttaatacgcgtttcaccgtcaaccaactgccttttatcactccaaacctgcgcaatgcctcaattccgtagcttgaacaggttggagtgaaacgacaatgcggcccgagtagcggactaatcaggcgttgatagacccgaatgagggctatcaggacccgcgagccaggcgacagtggcggcgccataatttttccaacgcttccgagagagcacggttatcgaggtcggcaaccccttttttcgccaccaccacgaaatccatagccgggagttcatgttggcgcagacggaagctttcacgcgtcagacgtttaatccgattgcgttcatgggcgcgtcgaacgtttttcttggcgactgtaagaccgatacggggatgccccagcgaattcaggcggccgagaatggtaatttgcggcgtgccagcccgttgtggctgctggaagacgaatgtgaattgactgggagttaacaagcgtaactccctgggaaatgcgagcttaaccactcaggggttagctttattacttagaaacggtcagacgagcgcggcctttagcacgacgacgtgccagaacctgacgaccatttttagtagccatacgagcacggaagccgtgagaacggttgcgcttcagtacagacggttgaaaagtgcgtttcatggcgatttctacctaaacttgaataaattcaatggctttattggatatccgccgaaaaatgaaacgatggacaccgaagccatgggtgattaaagaggccggattgtaataattgtacactccggagtcaattctctttccttatttaccgcgcttttccgcaccttttcgcagggaaaatgtacgacctcacaccagtgaaaaccagcatggcgcgccgggtggaggattatacgggctgatgggtaaagcgcaaggatcgtcctggatctttattagatcgattaagccaatttttgtctatggtcattaaattttccaatatgcggcgtaaatcgtgcccgcctcgcggcaggatcgtttacacttagcgaggtctggaaagtcctgtggataaatcgggaaaatctgtgagaaacagaagatctcttgcgcagtttaggctatgatccgcggtcccgatcgttttgcaggatcttgatcgggcatataaccgcagacagcggttcgtgcgtcaccctcaagcagggtcttttcgacgtacgtcaacaatcatgaatgtttcagccttagtcattatcgacttttgttcgagtggagtccgccgtgtcactttcgctttggcagcagtgtcttgcccgattgcaggatgagttaccagccacagaattcagtatgtggatacgcccattgcaggcggaactgagcgataacacgctggccctgtacgcgccaaaccgttttgtcctcgattgggtacgggacaagtaccttaataatatcaatggactgctaaccagtttctgcggagcggatgccccacagctgcgttttgaagtcggcaccaaaccggtgacgcaaacgccacaagcggcagtgacgagcaacgtcgcggcccctgcacaggtggcgcaaacgcagccgcaacgtgctgcgccttctacgcgctcaggttgggataacgtcccggccccggcagaaccgacctatcgttctaacgtaaacgtcaaacacacgtttgataacttcgttgaaggtaaatctaaccaactggcgcgcgcggcggctcgccaggtggcggataaccctggcggtgcctataacccgttgttcctttatggcggcacgggtctgggtaaaactcacctgctgcatgcggtgggtaacggcattatggcgcgcaagccgaatgccaaagtggtttatatgcactccgagcgctttgttcaggacatggttaaagccctgcaaaacaacgcgatcgaagagtttaaacgctactaccgttccgtagatgcactgctgatcgacgatattcagttttttgctaataaagaacgatctcaggaagagtttttccacaccttcaacgccctgctggaaggtaatcaacagatcattctcacctcggatcgctatccgaaagagatcaacggcgttgaggatcgtttgaaatcccgcttcggttggggactgactgtggcgatcgaaccgccagagctggaaacccgtgtggcgatcctgatgaaaaaggccgacgaaaacgacattcgtttgccgggtgaagtggcgttctttatcgccaagcgtctacgatctaacgtacgtgagctggaaggggcgctgaaccgcgtcattgccaacgccaactttaccggaagggcgatcaccatcgacttcgtgcgtgaggcgctgcgcgacttgctggcattgcaggaaaaactggtcaccatcgacaatattcagaagacggtggcggagtactacaagatcaaagttgcggatctcctttccaagcgtcgatcccgctcggtggcgcgtccgcgccagatggcgatggcgctggcgaaagagctgactaaccacagtctgccggagattggcgatgcgtttggtggtcgtgaccacacgacggtgcttcatgcctgccgtaagatcgagcagttgcgtgaagagagccacgatatcaaagaagatttttcaaatttaatcagaacattgtcatcgtaaacctatgaaatttaccgtagaacgtgagcatttattaaaaccgctacaacaggtgagcggtccgttaggtggtcgtcctacgctaccgattctcggtaatctgctgttacaggttgctgacggtacgttgtcgctgaccggtactgatctcgagatggaaatggtggcacgtgttgcgctggttcagccacacgagccaggagcgacgaccgttccggcgcgcaaattctttgatatctgccgtggtctgcctgaaggcgcggaaattgccgtgcagctggaaggtgaacggatgctggtacgctccgggcgtagccgtttttcgctgtctaccctgccagcggcggatttcccgaacctcgatgactggcagagtgaagtcgaatttaccctgccgcaggcaacgatgaagcgtctgattgaagcgacccagttttctatggcgcatcaggacgttcgctattacttaaatggtatgctgtttgaaaccgaaggtgaagaactgcgcaccgtggcaaccgacggccaccgtctggcggtctgttcaatgccaattggtcaatctttgccaagccattcggtgatcgtaccgcgtaaaggcgtgattgaactgatgcgtatgctcgacggcggcgacaatccgctgcgcgtacagattggcagcaacaacattcgcgcccacgttggcgactttatcttcacctccaaactggtggatggtcgcttcccggattatcgccgcgttctgccgaagaacccggacaaacatctggaagctggctgcgatctgctcaagcaggcgtttgctcgcgcggcgattctctctaacgagaaattccgcggcgtacgtctttatgtcagcgaaaaccagctgaaaatcaccgccaacaacccggaacaggaagaagcggaagagatcctcgacgttacctatagtggtgcggagatggaaatcggcttcaacgtcagctacgtgctggatgttctgaacgcgctgaaatgtgaaaacgtccgcatgatgctgaccgattcggtttccagcgtgcagattgaagatgccgcatcacagtcggctgcctatgttgtcatgccaatgagactgtaatgtccctcacccgcttgttgatccgcgatttccgcaacattgaaaccgcggatctcgctttatctcccggctttaactttctggtaggtgccaacggcagtggcaaaaccagcgtgctggaagccatctatacgctcggccatggtcgggcgtttcgcagtttgcagattggtcgcgtcattcgccatgagcaggaggcgtttgttctccacgggcgattacagggcgaagagcgcgagacagcgattggcttaaccaaagacaaacagggcgacagcaaagtccgcatcgacggtacagacgggcataaggtcgcggaactggcgcacctgatgccaatgcagttgataacgccagaagggtttactttactcaacggcggccccaaatacagaagagcattcctcgactggggatgctttcacaacgaacccggatttttcaccgcctggagcaatctcaagcgattgctcaagcagcgcaatgcggcgctgcgccaggtgacacgttacgaacagctacgcccgtgggataaagaactgatcccgctggcggagcaaatcagcacctggcgcgcggagtatagcgccggtatcgcggctgatatggccgatacttgtaagcaatttctccctgagttttctctgactttctctttccagcgcggctgggagaaagagacagaatatgctgaggtgctggaacgtaattttgaacgcgatcgccagctaacctacaccgcgcatggcccgcataaagcggacttacgcattcgcgccgacggtgcgccggtggaagataccttatcgcgtgggcagcttaagctgttgatgtgcgccttacgtctggcgcaaggagagttcctcacccgtgaaagcgggcggcggtgtctctacctgatagatgattttgcctctgagcttgatgatgagcgtcgcgggctgcttgccagccgcttaaaagcgacgcaatcacaggtctttgtcagcgcgatcagtgctgaacacgttatagacatgtcggacgaaaattcgaagatgtttaccgtggaaaagggtaaaataacggattaacccaagtataaatgagcgagaaacgttgatgtcgaattcttatgactcctccagtatcaaagtcctgaaagggctggatgcggtgcgtaagcgcccgggtatgtatatcggcgacacggatgacggcaccggtctgcaccacatggtattcgaggtggtagataacgctatcgacgaagcgctcgcgggtcactgtaaagaaattatcgtcaccattcacgccgataactctgtctctgtacaggatgacgggcgcggcattccgaccggtattcacccggaagagggcgtatcggcggcggaagtgatcatgaccgttctgcacgcaggcggtaaatttgacgataactcctataaagtgtccggcggtctgcacggcgttggtgtttcggtagtaaacgccctgtcgcaaaaactggagctggttatccagcgcgagggtaaaattcaccgtcagatctacgaacacggtgtaccgcaggccccgctggcggttaccggcgagactgaaaaaaccggcaccatggtgcgtttctggcctagcctcgaaactttcaccaatgtgaccgagttcgaatatgaaattctggcgaaacgtctgcgtgagttgtcgttcctcaactccggcgtttccattcgtctgcgcgacaagcgcgacggcaaagaagaccacttccactatgaaggcggcatcaaggcgttcgttgaatatctgaacaagaacaaaacgccgatccacccgaatatcttctacttctccactgaaaaagacggtattggcgtcgaagtggcgttgcagtggaacgatggcttccaggaaaacatctactgctttaccaacaacattccgcagcgtgacggcggtactcacctggcaggcttccgtgcggcgatgacccgtaccctgaacgcctacatggacaaagaaggctacagcaaaaaagccaaagttagcgccaccggtgacgatgcgcgtgaaggcctgattgcggtcgtttccgtgaaagtgccggacccgaaattctcctcccagaccaaagacaaactggtttcttctgaggtgaaatcagcggttgaacagcagatgaacgaactgctggcagaatacctgctggaaaacccaaccgacgcgaaaatcgtggttggcaaaattatcgatgctgcccgtgcccgtgaagcggcgcgtcgcgcgcgtgaaatgacccgccgtaaaggtgcgctcgacttagcgggcctgccgggcaaactggcagactgccaggaacgcgatccggcgctttccgaactgtacctggtggaaggggactccgcgggcggctctgcgaagcaggggcgtaaccgcaagaaccaggcgattctgccgctgaagggtaaaatcctcaacgtcgagaaagcgcgcttcgataagatgctctcttctcaggaagtggcgacgcttatcaccgcgcttggctgtggtatcggtcgtgacgagtacaacccggacaaactgcgttatcacagcatcatcatcatgaccgatgcggacgtcgacggctcgcacattcgtacgctgctgttgaccttcttctatcgtcagatgccggaaatcgttgaacgcggtcacgtctacatcgctcagccgccgctgtacaaagtgaagaaaggcaagcaggaacagtacattaaagacgacgaagcgatggatcagtaccagatctctatcgcgctggatggcgcaacgctgcacaccaacgccagcgcaccggcattggctggcgaagcgttagagaaattggtgtctgagtacaacgcgacgcagaaaatgatcaaccgcatggagcgtcgttatccgaaagcaatgctgaaagagcttatctatcagccgacgctgacggaagccgacctctctgatgagcagaccgttacccgctgggtgaacgcgctggtcagcgaactgaacgacaaagaacagcacggcagccagtggaagtttgatgtccacaccaatgccgaacaaaacctgttcgagccgattgttcgcgtgcgtacccacggtgtggatactgactatccgctggatcacgagtttatcaccggtggcgaatatcgtcgtatctgcacgctgggtgagaaactgcgtggcttgctggaagaagatgcgtttatcgaacgtggcgagcgtcgtcagccggtagccagcttcgagcaggcgctggactggctggtgaaagagtcccgtcgcggcctctccatccagcgttataaaggtctgggcgagatgaacccggaacagctgtgggaaaccaccatggacccggaaagccgtcgtatgctgcgcgttaccgttaaggatgcgattgccgctgaccagttgttcaccacgctgatgggcgacgccgttgaaccgcgccgtgcgtttattgaagagaacgccctgaaagcggcgaatatcgatatttaatggcgctaaccatgcgagcgtgcctgatgcgctacgcttatcaggcctacgaaaatcttgcaatgtattgaattttcatgattttgtaggccggataaggcgttcacgccgcatccggcaagaagctataagaaaagggcggagatcatctccgccctttttatttctgcaatccgcaattatcatcccgcaaatctatactttttgggtcaacacgtaacgctttacaggtgattatcatggggctttttgatgaagttgtcggtgcctttctgaaaggcgatgcggggaaatatcaggctattttaagttgggttgaggagcagggcggcattcaggtgctgctggaaaaactgcaaagtggcggcttaggggccattctctcaacctggctgagtaatcaacagggcaatcaatcggttagtggcgagcaactggaatcggcgctcggcacaaatgcggtgtccgatcttggacaaaaacttggcgtggataccagtacagcttccagtttactggcagaacaattgccgaagattattgatgcgctctcaccgcaaggtgaagtgtctccacaagccaataacgatctgctttccgcaggcatggaactgctgaaagggaaactcttccgctaagcaaatggggagcatgcaacccgcgttgcatcccccttttccctcgggtgttgtactgatttttgagcggaatcgcgttagcatgggtcaggaactaatctacctggggaactcatggctatcaaactcattgctatcgatatggatggcacccttctgctgcccgatcacaccatttcacccgccgttaaaaatgcgattgccgcagctcgcgcccgtggcgtgaatgtcgtgctaacgacgggtcgcccgtatgcaggtgtgcacaactacctgaaagagctgcatatggaacagccgggcgactactgcattacttataacggcgcgctggtacagaaggccgctgatggtagcaccgtggcgcaaactgctctcagctatgacgactatcgtttcctggaaaaactctctcgcgaagtcggttctcatttccacgccctggaccgcaccacgctgtacaccgccaaccgtgatatcagctactacacggtgcatgaatccttcgttgccaccattccgctggtgttctgcgaagcggagaaaatggaccccaatacccagttcctgaaagtgatgatgattgatgaacccgccatcctcgaccaggctatcgcgcgtattccgcaggaagtgaaagagaaatataccgtgctgaaaagtgcgccgtacttcctcgaaatcctcgataaacgcgttaacaaaggtacgggggtgaaatcactggccgacgtgttaggtattaaaccggaagaaatcatggcgattggcgatcaggaaaacgatatcgcaatgattgaatatgcaggcgtcggtgtggcgatggataacgctattccttcggtgaaagaagtggcgaactttgtcaccaaatccaaccttgaagatggcgtggcgtttgctattgagaagtatgtgctgaattaatcagtggacgggcaaacagcataaacgcgtttgcccgcttactgattattggtttactgcatatacaaccagaaattgcagcggtgcagtaatgatgtccagcgtaacagtcactggcagtaatgctgcggaaacaccatccggaatgcctctgggtgaatagtattcataaaatcgcactttaaacggatgatagaacgccatcacctttgagtaatccatgtttttatttttctcatggattgtgccttttaggttttccagtgacctggtacagtgttgaacaccacaggcaaaaccataatgcgttgccagtgccttttcttcttcgttattccagtagtagtaaagcgatattgtgccggtaaatttctttttccccgcatttaaaacaaatcttgcgtcatcggcaacctgaatattgtgccggttaagtgctggatcattgagcatcttaacgatgtcatcggcaccatcagtgataaggtaatccagcgattcccctacaaaaacatagccttttgttccattactatcttttgcctgcgatagcccagtgatggtgtctgactgcgattgatactttcctgaactaccctttgcggtatgggaaaccagagcatacgagatacagcctgaaagcatcagcgccagtgggaataaaccggcagccttaaaaaatcccttaaaattcaacttcatgattaatcctttaaacgagtagctaagccgttgaaagcatactcttctttccctcctgtttagcgcctgatatcccttttcagatttctgcccgacgcatgtcatttttttatgcattgttctttttgtgatctaaattgtagtacaacaatataagtttgtactacattacgcacacggcaaacgcgaacgtcatcacgctggtactacaaagttgccgcgttatgcatcgatcggggtaaagtagagaagaacatacagagcacaaggactctccatgactctcaataaaaccgatcgcattgtcattacgctgggtaaacagatcgttcacggcaaatacgtacctggctcgccacttccggctgaggcggagctctgtgaagagtttgcaacctcgcgcaacatcatccgtgaggtgttccgttcgctgatggcgaagcggctgattgaaatgaaacgttatcgcggggcgtttgtggcaccgcgtaaccagtggaattacctcgacactgacgtactgcaatgggtgctggaaaacgactacgacccacggcttatcagtgccatgagcgaagtgcgaaatctggtggaaccggcgattgcccgttgggcagcagagcgcgcgacttccagcgatctggcgcagattgaatcggcgctgaacgagatgattgccaacaatcaggaccgcgaagcgtttaacgaagcggatattcgctaccacgaggcggtgctgcagtcggtacataacccggtgttacagcaacttagcattgcgatcagttcgttgcagcgggcggtttttgaacgaacctggatgggcgatgaggccaacatgccgcaaacgctccaggaacataaggcgctgttcgatgcaatacggcatcaggacggcgatgcggcagagcaggcggcgcttaccatgatcgccagctcgacacgaaggttaaaggaaatcacatgacagctcgctacatcgcaattgactggggatcgaccaatctgcgcgcctggctttatcagggcgaccactgcctggagagcaggcaatcagaagcaggcgtcacgcgcctgaacggaaaatctccggctgcggtgttagcagaagtcacgaccgactggcgtgaagaaaatacgccagtggtgatggcaggaatggtcggcagcaatgtcggctggaaagttgctccgtatttatctgttcctgcccgtttttcgtctattggcgaacaattaacgtctgttggcgacaatatctggattattcccggattatgcgtctctcatgacgataaccacaatgtgatgcgcggcgaagaaacacaattgatcggcgcgcgagctctggctccttcctctctttatgttatgcccggtacgcattgcaaatgggtgcaggccgatagccagcaaatcaacgattttcgcaccgtgatgaccggtgaattacatcatttactgttaaatcactcattgattggcgcaggtttgccgccgcaggaaaactctgccgatgccttcgcggctggccttgagcgcggccttaatgcgcccgccatattgccgcagctttttgaagttcgcgcctcgcatgtgctgggaacacttccccgcgaacaggtcagcgaatttctctctggtttgttgattggcgcagaggttgccagtatgcgcgactatgtgacccatcaacacgccatcacccttgtcgccggaacatcgctgaccgcgcgctaccagcaagcctttcaggcgatgggttgcgacgtgacggcggtggcgggcgacacggcatttcaggctggtataaggagcatcgctcatgcagtggcaaactaaacttccgctgatcgccattttgcgcggcattaagcccgacgaggcgctggcgcatgttggcgcggtgattgacgccgggttcgacgcggttgaaatcccgctgaattccccacaatgggagcaaagcattcccgccatcgttgatgcgtatggcgacaaggcgttgattggcgcaggtacggtactgaaacctgaacaggtcgatgcgctcgccaggatgggctgtcagctcatcgttacgcccaatatccatagtgaagtaatccgccgtgcggtgggctacggcatgaccgtctgccccggctgcgcgacggcgaccgaagcctttaccgcgctcgaagcgggcgcgcaggcgctgaaaatatttccgtcatcggcttttggtccgcaatacatcaaagcgttaaaagcggtattgccatcggacatcgcagtctttgccgttggcggcgtgacgccagaaaacctggcgcagtggatagacgcaggttgtgctggggcgggcttaggcagcgatctctatcgcgccgggcagtccgtagaacgcaccgcgcagcaggcagcagcatttgttaaggcgtatcgagaggcagtgcaatgaaaatcaccaaaattactacgtatcgtttacctccccgctggatgttcctgaaaattgaaaccgatgaaggcgtggtcggttggggcgagcccgtgattgaaggccgcgcccgtacggtggaagcggcagttcacgagctgggtgactatttgattggtcaggatccttcgcgcatcaatgacttatggcaagtgatgtatcgcgccggattttatcgtggcggtccaatcctgatgagcgccattgccgggatcgaccaggcgttatgggatatcaaaggcaaagtgctgaatgcgccggtctggcaactgatgggcggcctggttcgcgacaaaattaaagcctacagttgggtcggcggcgatcgtccggcggatgttatcgacggcattaaaaccctgcgcgaaatcggcttcgataccttcaaactgaacggttgtgaagaactggggctaattgataactcccgcgcggtagatgcggcagtcaacaccgtggcacaaattcgtgaagcttttggcaatcagattgagtttggtcttgatttccacggtcgcgtcagcgcgccaatggcgaaagtgctgattaaagaactggagccgtatcgcccgctgtttattgaagagccggtgctggcggaacaagccgaatactacccgaaattggcggcacaaacgcatattccactggcggcgggtgagcgcatgttctcacgtttcgattttaaacgcgtgctggaggcaggcggtatttcgattctgcaaccggatctctcccatgcaggcggtattaccgaatgctacaaaattgctggaatggcagaagcctatgatgtgacccttgcgccgcactgtccgctcggaccgattgcactggcggcttgcctgcatatcgactttgtttcctataacgcggtacttcaggaacaaagtatgggcattcattacaacaaaggcgcggagttactcgactttgtgaaaaacaaagaagacttcagtatggttggcggcttctttaaaccgttaacgaaaccgggcttaggtgtggaaatcgacgaagctaaagttattgagttcagtaaaaatgccccggactggcgtaatccgctctggcgtcatgaagataacagcgtagcagagtggtaattcctgccacgtaagcccctcatcgggcactaaaacagcaatacaaaaatataaccctctgtaaattacagggcatggtgagcggcttcgctatgcccaaaatctggagaaagctcgctatggatattcccgttaatgcagcaaagccggggcgtcggcgttatctgacgctggtgatgatctttattacggtggtcatttgttatgttgaccgcgctaacctggccgtggcttccgcccatattcaggaagagttcggcattacgaaagcggaaatgggctatgtattttcggccttcgcctggctttatacgctatgccagatccccggcggttggtttttagatcgcgtaggttctcgcgtgacttattttattgcgatatttggttggtcagtggcgactttattccagggctttgccacgggattaatgtcattaattggtctgcgtgcgataaccggtattttcgaagcgcccgctttcccgaccaataaccggatggtgaccagctggttcccggaacatgaacgcgcttccgccgttggtttttatacgtctggtcagtttgtcggtctggcgtttttgactccgctgctgatctggattcaggagatgttgagctggcactgggtgttcattgtcactggtggtatcggcattatctggtcgctgatttggtttaaggtttatcagccgccgcgcctgaccaaaggtatcagcaaagctgaactggattacattcgtgatggcggcggtctggtggatggtgatgcgccggtgaagaaagaggcgcgtcagccgttaacagccaaagactggaaactggtgttccatcgtaaactgatcggcgtttatcttgggcaatttgcggtggcttctacactgtggtttttcttaacctggttcccgaactatttaacccaggaaaaaggaatcacggcgctgaaagcaggctttatgaccacggtgccattcctcgcggcgtttgtcggcgtcctgctctctggctgggtcgcggatctgctggtacgtaagggcttttcactgggctttgcgcgtaaaacgccgattatctgcggcttgctgatctccacctgcattatgggcgctaactacaccaacgatccgatgatgattatgtgcctgatggcgctggcattcttcggcaacggttttgcttcgattacctggtcgctggtctcttctctggcaccgatgcgcctgattggtttaaccggcggcgtgtttaacttcgccggtggtctgggcggcatcaccgttccgctggtggtggggtacctggcgcagggttacggtttcgcacctgcactggtttatatctccgccgtcgcgttgattggcgcgctctcttacatcctgctggtgggcgatgtgaagcgcgttggctaatctttcaactgtggaatatgcgccataccactgcgcataatccactttcttaaagccggtgcggtcaggcatcggctttttactatcttgccgaagagttttaaacgcagtttgcgggtggcgcgccagtaagcggtattgagcttctctggctgcttcagtaacaccgaacgcagaatgtctgcgctatccagcgcatagctaatcccctccagcgaactggcgctgataaatcctgccgcttcgccaatcagaaaggcgttgtccttaccgcagacaaaatcctgccagcgtgagggaaacagcaccgtgcatttttcgcttttcaccgccttaccaaactggaactgaaaggcgctcattttctctttcagcgtcgtgaaacgcgtctgaccgtctttcattggataagcaccgccaaagataaaataaccgtctttgctgatactccatgaataacagttagttatcgaattatcaaagatgcaggagtagaacggcaccggatgtttctccgcgaaccactgctggatagcgacatatttacggatttgatgatccgggtagagatgtcgccgcaccatcgagtttgcgccatcggcaccgaccagatagcgggcggtaatatgttgctcccagccgtctgcacgaaaaatgacatgccatttatcatcctcacgccagatttttcggcacaggctatcgtgataaacctcaacgctggtggggatcagcgatttcatccacaagtcgaaagcatggcgattaatattgatatagcttcgctggtagttacgcgtgagcgatgcggcgacgtcgacagttttgacgctgaaaatctgtggattggcgatcacatcgacaggaagcgtcagtccatcgcgaataaaagatcgctgcgcgtccggtgccagcagaccgccgcaaggtttgctgaaaccttcagtaccacactggtgctttttatccagcgcgatcacctgcattttgcctgctaattttcgcgccaacgccgatcctgccgggccgaggccaataatcgccacgtcgaaatgttccatcttttcactcacattcatcacgatggcaaaagactattgtctgaaagtgaagtccttgtgaagtatgatggcgggacccgttttgtatcaggaccgcgccatgaaacagataacctttgctccccgtaatcacctgctcaccaataccaatacctggacgcccgacagccagtggctggtatttgacgtgcgtccttctggggcgtcgtttaccggcgagaccattgagcgtgtgaatatccataccggcgaggtcgaggttatctatcgcgcgtcacagggcgcacacgtcggcgtggtgaccgttcatccgaagtcagagaaatatgttttcatccatggcccggaaaatcctgatgaaacatggcattacgatttccatcatcgacgcggagtcattgctgaaggcggcaaggtgagcaatctcgatgcaatggatattaccgcgccgtatacgccaggagcgctgcgcggcggcagccatgtgcatgtctttagcccgaacggtgaaagggtgagctttacctataacgaccatgtaatgcatgaactcgatccggcgctggatttgcgaaacgtcggtgttgctgcgccgtttggcccggtcaacgtacaaaagcagcatccgcgtgaatacagcggtagccactggtgcgtgctggtgagtaaaaccacgcccacgccgcagcctggcagcgatgaaatcaatcgtgcttatgaagaaggatgggtaggaaatcacgcgctggcgtttattggcgacacactttcgccaaagggcgagaaagtgccggagctgtttatcgttgagttaccgcaagatgaagctggctggaaagcggcaggtgatgcgccgttaagtggaacggaaaccaccctgcccgcgccaccgcgcggcgtcgtgcagcgacgtttaacctttacccaccatcgggcttatccggggttagtcaacgtcccgcgccactgggtgcgctgtaatccgcagggtacgcaaatcgcgtttttaatgcgtgatgataacggcattgtgcaactgtggcttatctcgccacagggcggcgagccgcgccagttaacccataacaaaacggatattcagtctgcatttaactggcatccgtcaggagaatggttgggctttgtgctggataatcgaattgcttgtgcccatgcgcaaagcggcgaggttgagtatttaaccgaaaaccacgccaatccaccttctgcggacgccgtggtcttctcgccggatggtcaatggctggcgtggatggaaggtggccagctgtggatcaccgaaactgatcgctaaatcagttatcaggcattctggccggtggaataaccgcattggtggcttgcgcgttggcttcgcttttttcaacgcgtgagcgcaccgagctgtctttgcggaacacatcccacggcagtaaaagcgtgtccatcacagcggtaaacggcatatcgagaatcgccagcgacttagtgccccagttggtttcatcgtcgccaatcatggtggcgctggcgcgggtgccgggatacgttccttctttccctccggtatgggacatcacgctggagcatcctccgagtaatgtcattccgctgcatatcatgaacgctaacaacacatttcttatcataataaattcatctgttgatcgtgggtgttggcctgatgagttatagcgatcccttgctgaaaataacatcatcattacgtcgcactgtggcggctatcgcactttaacgtttcgtgctgccccctcagtctatgcaatagaccataaactgcaaaaaaaagtccgctgataaggcttgaaaagttcatttccagacccatttttacatcgtagccgatgaggacgcgcctgatgggtgttctggctacctgacctgtccattgtggaaggtcttacattctcgctgatttcaggagctattgattatgcgtaactttgatttatccccgctttaccgttctgctattggatttgaccgtttgtttaaccacttagaaaacaaccagagccagagtaatggcggctaccctccgtataacgttgaactggtagacgaaaaccattaccgcattgctatcgctgtggctggttttgctgagagcgaactggaaattaccgcccaggataatctgctggtggtgaaaggtgctcacgccgacgaacaaaaagagcgcacctatctgtaccagggcatcgctgaacgcaactttgaacgcaaattccagttagctgagaacattcatgttcgtggtgctaacctggtaaatggtttgctgtatatcgatctcgaacgcgtgattccggaagcgaaaaaaccgcgccgtatcgaaatcaactaattccctaaggccgcctggcgcggcctgacatctccatgctcgccgtcagggagcatatgcgaatcttcggatttgcaggtacttactcgcttcttagaaggagaaatgactatgcgtaacttcgatttatccccactgatgcgtcaatggatcggttttgacaaactggccaacgcactgcaaaacgccggtgaaagccagagcttcccgccgtacaacattgagaaaagcgacgataaccactaccgcattacccttgcgctggcaggtttccgtcaggaagatttagagattcaactggaaggtacgcgcctgagcgtaaaaggcacgccggagcagccaaaagaagagaaaaaatggctgcatcaagggcttatgaatcagccatttagcctgagctttacgctggctgaaaatatggaagtctctggcgcaaccttcgtaaacggtttactgcatattgatttaattcgtaatgagcctgaacccatcgcagcgcagcgtatcgctatcagcgaacgtcccgcgttaaatagctaactagctattctctttgccccgccattctggtggggctttttttgtcttacttactcaacaatgcgttaaatttcgactgtttaagatatttcggcacgttctttcccgtgataatgtgcgctataaggcaaatctgcttcaccgattcagccataatccgtagcaattaaaaatgttatctcaagagaaatggacgatgagtgatatagcattaacggtcagtattctggctttggtggcagtcgtcggtttgtttatcggcaatgtcaaatttcgcggcataggattaggtattggcggcgtgctgtttggtgggatcatcgtcggccattttgtttctcaggcggggatgacattaagtagcgatatgctgcatgttattcaggaatttggcctgatcctgttcgtttatactatcgggattcaggtagggccgggcttctttgcctcattgcgcgtctccggattacgcctcaacctgtttgctgttctgatcgtcatcatcggtggtctggttaccgccatcctgcataaactgtttgatattccactgccggtagtgctggggattttctccggtgcggttaccaatacgccagcgctgggggcagggcagcagattttgcgcgacttgggtacaccaatggaaatggtcgatcagatggggatgagttacgcgatggcgtatccattcggcatttgcgggattttgttcaccatgtggatgttgcgggttattttccgcgtcaatgtcgagacagaagctcagcagcacgagtcttcacgcaccaatggcggcgcgctgatcaagactatcaatattcgcgttgagaaccctaacctgcatgatttagccattaaagatgtaccgattctcaacggcgacaaaattatctgctcgcgtctgaaacgcgaagaaaccctaaaagttccttcgccagataccattatccaactgggcgatttgctgcatctggtggggctgccagcggatttacataatgcgcaactggtgattggtcaggaggtcgatacttcgctgtccacgaaaggcactgatttgcgcgtcgagcgtgtggtggtcaccaatgaaaacgtgctcggaaaacgtattcgcgacctgcactttaaagaacgctatgacgttgttatctcgcgcctgaaccgtgccggggtcgaactggtcgccagtggcgatatcagcctgcagttcggcgatatcctcaatctggtggggcgtccgtccgcaattgatgccgttgccaatgtgctggggaatgcgcagcaaaaactgcaacaggttcagatgctgccagtgtttattggcatcgggcttggcgtattgttaggttctattcccgtctttgtgcctgggttcccggccgcgttgaaactggggctggcgggcggtccgctgattatggcgttgatcctcgggcgtatcggcagtatcggcaagctgtactggtttatgccgccaagtgccaacctcgcgctgcgggagctggggatcgtgctgttcctctcggtcgttggtctgaaatctggtggagattttgtgaataccctggtcaatggcgaagggctaagctggattggttatggtgccctgatcaccgccgttccgctgattactgttggcattctggcgcggatgttagccaaaatgaattacctgaccatgtgcgggatgctggcaggttccatgaccgatcctccggcgctggcgtttgctaataatcttcatccaaccagcggtgcggcggcgctctcttacgccactgtctatccgttagtgatgttcctgcgcattatcaccccccaattactggcggtgctcttctggagtatcggttaactcttttccgggtggagtcgccgtaaatggtactccacctggtattcgctggcatttctgaacatcactgaataattcaaaaactccccgctctcgctatatgacaacgaggtgatccgcagcagtggcgtgtgttccgctaccttcatttgccgcgccagcagtctatcggcgagcactggcgtcaggctttcataattaccgccaatcaaaatcccgcactcttgttcaatatattcaaacttcgacccttccagatgttgcagcgaaagattacggaacagttttaccggcatatagctgtcttccagcatcagcggtttcccttccacaaaacgaacgcgacgggagaagtagatctgctcgttgatttgaatccgtaactggctggcaatggccggaggcgcaggcatgatttcaaaaatcagcacctggctggtgaccgtttttccctgccgttttaacacctccaccagcccggtccggctggcggtttgatgcagtacatctttgcgcaccaggtaagtgccgctgccgtggcggcggaccaccaatccccacgctaccagcaggtcaatggctttacggatggtcatccgcgataccgcaaattcttccgccaactttttttcaccgggaagaaggctatttagcgtgaaatctgcggaattaagtcgaattcttaaccgctccgcaatgcttttgtagatcatctctagatctcttttttgcctgcaagcacgggtaatgcgcccacaagttctgcttaatcgattgaaaaaacatctttgttttaaagatgtgttcgatgctgtgtacctgtgctcacagatgtctactttttcgcgaaaacgtagatctctaccgcccaacgaaaagcatgaaagcgatcacgaatcccattgggtcgtcatgttctgccgatcgcatcttcctatcctcgctccaggcctgccgcataaccaatcaggcttcctacttacagaattgagaaaagaggatgtggaaatgctcagtcaaattcaacgctttggcggcgcgatgttcacgccagtgctgctgtttcccttcgccgggattgtggtgggtcttgccatcttgctgcaaaacccgatgtttgtcggggaatcactgaccgatccgaacagtttattcgcgcaaatcgtacacattattgaagagggcggttggacggtattccgtaatatgccgctgatttttgctgtcggtttacccattggccttgctaagcaagcgcaggggcgtgcttgtctggcggtgatggtgagtttcctgacctggaactatttcatcaacgcgatgggaatgacctggggaagctacttcggcgtcgatttcactcaggacgcggtggcaggtagcggtctgacaatgatggccgggattaaaaccctcgataccagcattatcggcgcaattatcatttccggcattgtgacggcgctgcataaccgtctgttcgataaaaaactgccggtttttctcggcattttccaggggacgtcttatgtggtgattatcgccttcctggtgatgatcccctgtgcctggctgacgttgctcggctggccaaaagtacaaatggggattgaatctctgcaagcgttcctgcgttcggcgggtgcacttggggtctgggtttacaccttcctcgaacgtattctgatcccaaccggtttacaccacttcatctacggacagtttatctttggtccggcagctgttgaaggcggcattcagatgtactgggcgcagcatctgcaagagttcagtttgagcgccgagccgctgaaatcgttgttcccggaaggcggttttgccctgcacggtaactcaaaaatctttggtgccgtgggcatttctttagcgatgtacttcactgccgcaccggaaaatcgggtaaaagtggcgggcttgctgattcccacaaccttaaccgccatgctggtgggaattaccgaaccgctggaatttaccttcctgttcatttcaccgttgctgtttgcggtacacgctgtgcttgcggcctcaatgtcgaccgtgatgtatctctttggtgtggtgggcaacatgggcggaggtctgattgaccaggttttaccgcaaaactggatcccgatgttcagcaaccacgcggatatgatgctgacccaaatcgccattgggttgtgctttaccctgctgtacttcgtggttttccgcacactgattctgcagttcaacatgtgcacgccgggacgtgaagatgcggaagtgaaactctactcaaaagccgaatacaaagcctcgcgaggccaaaccaccgcggcagagccaaaaaaagagctggatcaggctgccggtatcctgcaagccctgggcggggtcggcaatatctccagcattaacaattgtgcgacgcgtctacgcattgcactgcatgacatgtcacaaacgctggatgacgaagtctttaaaaagctgggagcgcacggcgtcttccgtagtggcgatgccattcaggtgatcattggtctgcatgtatcccagctgcgtgaacagctcgatagcttaattaattctcatcaatcagcagaaaatgttgccattacggaggcagtataatgaccaaattctcagtggttgtcgcaggcggtggaagcacctttacgccaggcatcgtgttgatgctcctggcgaatcaggagcgtttcccgcttcgtgcactgaaattttatgataacgatggcgcgcggcaggaagtgattgccgaagcctgtaaagtcatccttaaagagaaagcgccggacattgcgtttagttacaccaccgatcctgaagtggcgttcagcgacgttgattttgtcatggcgcacatccgcgtcggcaaatacccgatgcgcgaactggatgaaaaaatcccactgcgccacggtgttgttggtcaggaaacttgcggacccggcggaatagcgtacggcatgcgttccattggcggcgtcctggaactggtggattatatggaaaaatattcaccaaacgcctggatgctcaactactccaacccggcagcaattgtcgcagaagccacgcgtcgtctgcgcccgaatgcgaaaatcctcaacatctgtgacatgccaatcggtattgaaagccggatggcgcaaattgttgggctgcaagatcgcaaacagatgcgcgtgcgctactacggcctgaaccactggtggtcggcgatatcccgcagtttcagaaagggttaatgagtcagcaagtggcggtggaaaaactggtcgtggacgcctgggaacagcgttcatatcagcacctgtggtaggcgattacgttgtcgaaaacggtaccgagcgcctcggtcgccaaagctattctggatgagttgctggaggccaacaaagcgtactggccagagttacgttaattgtgtggactggcatccgttgggtgctggtccgtattctttagcacggctgacggcgcataaccaaatttatgtttaaaggctttgctgaaatgaaaggagtcgaagaagttgagcgtatcagcgacttcgccaaccgagtttccttgttgctttaatagcgatagcgccagatccagacgcgcatcgaggtaatattctttcggcgtcttgccggtatagcgtaaaaacagacgacgcaaccaggcttcgctacaggggatcgtggcagccatatcagctacgctccagcgttgttgcagactggcatgtaaagtggcaattaatttttcaatttgccgccgttgtggatcttttttaccatctgcgtacataagacaaatccactgataaataattttcgtcagaaaagcgactgccagattattttttattgcttctggtgaagttattaactcagcaacttcggtgagttcctgattataaatttcgccattataaataacgctttgctgaccaacgggaatatccatcatactggtgggggtaaattccatccagtactgttcccagactaaaccttcacagtgataagagtgaatatccattggctttaagaatataatacagttgccatgcagtgttatttgttcgccattctttaaaagaattttcccacatccttgtacggtatacaccgcaacccatgagttggcgataagcggtttcttcttgtcccgcggccagatcacccggtaatgctcgtcggcgtaggtatgccagagcgagatcagagaaattccgctggagatcacattttcgttaatcaataagggaatattgtacggagtttcgttttttacatctgaactttgcaattttccattcattttaatatccctccggcgaattatgctcacaacctgaacttaacagaaaacaatccgttcagggatacgacgtttgtattttaagaatctgactgcctgacccgacgcattttacctctccctatattcatgcgtccgggacataaacataaataagggctatgagatgaattcgttacaaatcttgagttttgtcggttttacgctgctggtggcggtgatcacctggtggaaggtccgcaaaacagataccggatcgcaacaaggctattttcttgccggacgttcactaaaagcgccggttattgccgcttcgttaatgctaaccaacctttccacggaacaactggtcggcctttccgggcaggcctacaaaagcggcatgtcggtgatgggctgggaagtgacttcagcggtgacgctgatcttcctcgcgctaatctttttaccgcgctatctgaagcgcggcattgccaccatccccgattttctggaggaacgttatgataaaacgacgcgtattatcatcgacttctgcttcctcattgccaccggcgtctgctttctgccgattgttctctactccggcgcgttggcgctcaacagcctgtttcacgtcggggaatcgctacagatttctcacggtgcggctatctggctactggtaattttgcttggtctggcgggaattttgtatgcggtgatcggcggactgcgcgcaatggcagtggcggactccatcaacggtattgggctggttatcggcgggttgatggtgccggtatttggcctgatcgcgatgggcaagggcagctttatgcagggcattgagcaactcaccaccgttcacgccgagaaattaaactcaatcggtggcccgaccgatcccttgccgattggcgcggcatttaccggtttgattctggtgaacaccttttactggtgtacaaatcagggcatcgtgcaacgcacgctggcgtcaaaaagcctggcggaagggcaaaagggggcgctgttaacggcggtgctgaaaatgctcgacccgctggtactggtgctgccagggttgattgcgtttcatctgtatcaggatttaccgaaagccgacatggcctacccgacgcnnnnnnnnnnacgctggtcaataacgttctgccagtgccaatggtgggtttcttcggcgcggtgttatttggtgcggtgatcagtaccttcaacggctttctgaatagcgccagtacgttattcagtatgggtatttaccgtcgcatcattaaccagaatgccgagccgcagcagctggtcaccgtcgggcgcaaatttggtttctttatcgctatcgtttcggtgctggtcgcgccgtggatcgccaacgcgccgcaggggctgtatagctggatgaaacagctcaacggcatttacaacgtgccgctggttaccatcatcattatgggctttttcttcccgcgcatcccggcgctggcggcaaaagtggcgatggggattggcataatcagctacatcaccatcaactatctggtgaagttcgacttccatttcctctatgtgctggcctgtacgttctgcatcaacgtggtcgtgatgctggtgatcggttttatcaaaccgcgcgccacgccgttcaccttcaaagatgcgtttgcggtagacatgaaaccgtggagaaacgtcaagatcgcgtcaattggcatcctgttcgcgatgattggcgtctatgccgggctggctgaattcggcggctacggtacgcgctggttagcgatgatcagttatttcattgccgccgtagtgattgtctacctgatttttgacagctggcggcatcgtcacgacccagccgtaacctttactcccgacgcgaaggatagcctatgaaacgccccaattttctgttcatcatgaccgatacccaggccaccaatatggtcggttgctatagcggtaaaccgctgaatacgcaaaatattgatagtctggcggcggaaggtattcgctttaattccgcctacacctgttcaccggtttgtacgcctgcacgcgccggactatttaccggtatctacgctaaccagtccggcccgtggaccaacaacgtcgcgccaggcaaaaacatctccactatggggcgctactttaaggatgccggctatcacacctgttacatcggcaaatggcatctcgacggtcatgactatttcggcactggcgagtgtccgccggagtgggacgctgattactggttcgatggggcgaactaccttagcgaactgacggaaaaagagatcagcctgtggcgcaatggcctaaacagcgttgaggatttacaggcgaaccatatcgacgaaaccttcacctgggcgcaccgcatcagcaatcgggcggtagattttctgcaacagcccgcgcgcgccgaggaacccttcctgatggtggtttcgtatgatgagccgcatcacccgttcacctgtccggtggagtatttagagaaatacgctgatttttactacgatctgggcgagaaagctcaggatgacctggcgaacaaaccggaacatcaccgcttatgggcgcaggcgatgccatcgccagtcggtgatgacgggctttatcaccatccgctctattttgcctgtaatgactttgttgatgaccaaatcggacgggtcatcaatgccttaacgccagagcaacgtgaaaatacgtgggtcatttatacttccgatcacggcgaaatgatgggcgcacataagctgatcagtaaaggagcggcgatgtatgacgacatcacccgtattccgctgatcatccgttcgccgcaaggggagcggcgacaggtcgatacgccagtcagtcatatcgatttactgccgacaatgatggcgctggcagatattgaaaaaccagagattctgccgggggaaaatatccttgccgtgaaagagccacgcggtgtaatggtggaatttaaccgctacgagattgagcatgacagctttggcggttttattccggtgcgttgctgggtgacggatgactttaaactggtactcaacctcttcaccagtgatgaactttacgatcgccgtaatgacccaaatgaaatgcataacctgatcgatgatatccgttttgcagacgttcgcagcaaaatgcatgacgccttattggattacatggacaaaattcgcgatccgttccgcagttaccaatggagcctgcgtccgtggcgtaaagatgcactgccgcgctggatgggggcatttcgtccacgcccacaagatggctattcgccggtggtacgtgactatgacaccggcctaccgacgcaaggagtgaaagtggaagagaaaaaacagaagttctgacgataatgcccgctgatgaacacccggcgggcattattcaggctgcttaaaccagtgaaccgccggtcaggaaggaaaaaatcaggaatatcagcaaaatgctgcacacgatgccgataccaaaaagcaaggtatggaaagccagcgtcccgccgccaaaaaccagcgcgccgcgaatgccccagcgattttccttacgcataccgccaataaatgcgcaaagtagcgcagcaatggccagtgcgataccgctttgatcgaggattttatcgacatctacgtcctcttttttctccacggtggtaattttttcgccttttattccggcgagaagacctcttttaatttcagccgttttgtccgccacgatgctttcaaacgttggcggtggtgcggaaaaagggccgaatgaaaagtggataatccccatcattaaagcgatggcaccgaacagcatgcccaatgaactgattttattttgagctatgatacccagctgacctccttgtagcggatggcgaaagcatatcaggaaacgggcggacgaaattcttaaaaaaaaaccgctaaaggtagagcgttagtgaaattgcaaaggagcaacaatgaaaatttcccgccttggagaagcgcccgattaccgcttctcgctggctaatgagcgtacttttctggcgtggatccgtaccgcactaggatttctggcggcgggggttgggcttgatcaacttgcgccagatttcgccacgcccgtcattcgtgaactgctggcgttgttgttgtgtctgttttccggcgggttagcgatgtatggctacctgcgctggttacgcaatgaaaaagcgatgcgtctgaaagaggacctgccctacaccaacagcttattaatcattagcttaatattgatggtcgtggcggtgatcgttatgggactggtgttgtatgccggatagccgcaaagccagacgcattgccgacccaggactgcagccggagcgcacatcactggcgtggtttcgtaccatgctgggctacggcgcgttgatggcgttggctatcaaacacaactggcactaggcgggcatgttattctggatttcgattggcattctcgccatcgtggcgctgatcctctggcactacacccgtaatcgcaatttaatggatgtcacgaatagcgatttttcccaatttcacgtagtccgtgacaaatttttgatctccctcgcggtgttatctctcgcaatactgtttgctgtaacgcatatacatcaacttatcgtatttattgagagagtcgcatgacaggaagtcaggtcattgatgctgaagaggacaggcataaactggttgtagagtacaaggatgctctgcaacctgccgatttttatcacaatttcaaacagcggggcatccgctccgtacagctcattccctatcttgaatttgatgaccggggcgatctgacggccgcttcggtgacagcagagctgtgggggaaatttttaattgccctgttcgagtgttgggtgcgggcagatatcagtcgtatctcgattgagctttttgacgccaccttacaaaaatggtgtggcagcgaaaacccgcaaccgcgccgtgactgccaggcgtgcgactggcatcgcctgtgcccgcacgctcgccaggagacgccagacagcgtgctttgtgcgggctatcaggcgttttattcttactccgcaccgcatatgcgggtgatgcgtgatctgataaagcagcatcgttctcccatggagctgatgacgatgctgcggtgacgtgcgcttaaacgggctgcccctgatgcgacatccgcgtcgccagcggcagccagcacagcacgatcaacaatcccattaaggtcatcaacaaccccaggctgccctgaccggtttgcggcaacatcgcagagagcgacgccagcacgccggaaccaatgttttgcagaccgccgaccagcgcgccagccgtgcccgccaggaaggggaacggctccatcgcgccgctggtcgccagcggaaacagcatcccggcaccgaaaaagaacagcgcggcgggaacgagcagcgtccagacattcatcacgccaaaccagtcggggatccacatcagcaagccagccagcaggcagcagataaccgactgccacattaacgtggagaagcgtttattgggacgtccggcaaaccatgcgccaaaaaacgctgccggaatcggcagaataaacaaaatactgaccgtcatactgctcagccctaacaccgcgcccatcagcacgccggagcaggcttcaaaggcggcaatcccggccagaccgccaatcagcatcagcaaataacagttaaaaccgctgttaccgaaaagcgttttataactggtaagcaggcgcgtgcgcggtgcatcgaccggacgcgtttccggcatccagcgggccatactgaaggtcacaccagcacaaagaaccaacaaaaagagataacaggcgcgccagttccacatcgtatccagcagaccgccgattagcggtgcgagcaacggactgacgagaatccccatgtttaacaggctgttagcatggcgcaactgtgtccgttcatataaatctcgcggcaaagtacgcgccattacgccgccaacgccggtgcccatcccctgcatcgcgctggcggcaatcaacaccgtcaaactggaggtcgtgaccgcgaccagcgttgccagcataaaaatggacattccgacgaggatcaccggtcggcggcccacgcggtcggaaatcgggccataaaacagctgtgagacaccgtaagtcagcagataagcgcccattacgctctgcaccgccccttcacggacgttgagatcgcgcgccatatcggcaatagctggaatataaatggtttgcgccatctgaccgacggccacgagtaataccaacatcaataacaaattgacgtttctttgccttttcattatcacggatgcttttataaaaataattagaataagtcactacgcattcccataaatgcgggagaggaatctatcacattgatgaatgttagccagatatacgccaggaatggggaattgtttagcggcagaatatgtaaacaaaagcggcaataaatgttgccgggagggattacgtgcgaactgtaaccctctccccaaaggggcgagggggaaaccaccgttccctttcagaaaatgagctaaacattgcacgggacggtcccctcgcccctttggggagagggctagggtgaggggcacaggcagcgcaggtgcaaacattctgctggtagaagaagcccccaactccaacccgcacgctaaatataaaaggggagcggttacccgctcccctttggtgcgacttgaatctgaattacttcaggtatttcagaacagcatcaagcagttgcagtgctgcaacaatgagtttgaggataagaatggcgatatccaccaggctcatacgcgtctcctgtggttcaggagcactgccagctgacgtacctttccgctgcctgttgccagctgttgtgcacgcggtatcttaaggagaaacgttgtgcttgttgacataacacagtgtgctcacgcggggttaaggcgctgacggcaccacccgtttcagccaggacttagtgcgccgggtaacgatgcggcccccgcataacacattgcgtacagtgatattatagaagtttactg

SEQ ID NO: 198 - DNA, 33740 bp, Escherichia coli
  source 1..33740: mol_type = genomic DNA
cttcagtagcggagcaggaaggacatctgatggaaatggaagccacgcaagcaccttaaaatcaccatcatacactaaatcagtaagttggcagcattaccttcttcagcaacttcgttaatcaacgacggattaacgttcttgcttaacgcttccagcgcacgggcttccagactggctttgcgctcacgtaaatctttcagcttatcgtgacttaatttcacccgcgccagcagatcaacgcgagattttccggctttatcgagttcagctttagcgtcacgaatatgctgttccagcatgcgcacgccctgggtttcttcaatggattcttccgcctgggagataaacgatttccccagcgtaaataaactttttaaaattcccataaatacccgtccttgtaattagtgtgaatattcttctgtaatttcagccagatccaatgcgttatctaccagcgaggttatctcaagcaggatatcttcaagagaagatttaagcgataacgccccgaaaacaatgtaatactcttcctgttgcacgctggagattcctaccgatgacaacggcatcatcttctgatttcttaataagaaggtattaaattcatctggattgctgatactacttaccggacaaataaaggtttcgataatcatttggcgggaagtaaaaagaatattgatttgcaaatcgccataatcattcattttaataattaatgcgctctcgctatttgtcacatcaatattttgttcaggtacagtttgcagcgccgtcgccagcgccaacggattccatgtcatatattattccatatagatttagtttaaatattaataaaatgaatatttgcagtacgtaattatcttaccagctatagacaaaaaaaaaccatccaaatctggatggcttttcataattcagacgaactagctgcgctgacgaaccgcttcaaataagcaaattccggttgcaaccgaaacgttcagggaagaaacacttcctgccattgggatgctgatcaactcatcgcaatgttcacgggtcaggcgacgcataccttcaccttccgcgcccatcaccagcgccaggcgtccggtcattttgctctgatagagtgtatgatccgcctcgcctgccgtaccgacgatccagatattctcttcctgcaacatacgcatggtgcgcgcaaggttagtcacccgaatcagtggaacgctttctgccgcgccgcaggctacttttttcgccgtagcgttgagctgtgcggagcgatctttcggcacaatcaccgcgtgaacgccagcagcgtccgcgctacgcaggcacgcgccgaggttgtgcggatcggttacaccgtcgagtatcagcaggaacggttgatcgagcgaagcgatcagatccggcagatcgttttcctgatactgacgtcctggcttcacgcgggcgataatgccctgatgcacggcaccgtcgcttttctcgtcgagatattggcggtttgccaactggataaccacgccctgagactcaagggcgtgaatcagcggtaacagacgtttatcttcacggccttttaaaataaagacttcctgaaaacgttcaggggcgcgctccagcagggcctgcactgcgtggatgccgtaaatcatttcgctcattaatgtactcgttgtttacgttttgcctgatgcactacgtttatccggcctacatgatctctgcaatatattgaatttgcgtgattatgtaggccggataaggcgttcacgccgcatccggcatgaacaaagcgcattttgtcagcaatctaaccctcttcttttaaagagggtattgatcactctgccacttttttcttcgccgcacgcttcgctttggtcgctgcggctattttctgcgttttcgccgatggctttttcgcttttctcgcgtctttcttcgccgctttcggcttcgtttttttctcaccgcggaaggcgctgtctggctcaaagtttacctttttaccgacctgacgacgcttgccgccttttttgcctgcatcgccttttttcgctttctcgcgcgccgttttaccgacgttacgcggtgcgcgttcactggagatcagactaaagtcgattttgcgctcgtccatattaaccgcttcgactcgaacttccacgcgatcgcccaggcgataagtctggccgctggattcccccatcaggcgttgccctacctggtcaaagcgatagtagtcattgtccagcgaagagacatggaccagaccatcaatgaacaagtcgtccagacggacgaagaagccaaagccagtgacgctggaaattacgcctttaaagacgttacctacctggtcgagcatgaagtcacacttcagccagtcagcgacatcgcgcgttgcttcgtcggcacgacgttccgccatcgaacagtgctgacccagttgcaacatctcttccatcgaataatggtagccgccggtttcagtggtgttgccctgatgcccctgctctttcgccagcagatatttaatggcgcggtgcagcgtcaggtcaggataacgacgaatcggcgaagtaaagtgcgcataggactgcaatgccagaccgaagtgaccacggttttctggatcgtaaatcgcctgtttcatcgagcgcagcagcatggtttgcagcatttctgcatcaggacggtcggcaaccgactccagcagttccgcgtagtcacgcggttccggcttgttaccacccggcagctccagccccagctccgccagcactgaacggaaagaggtaatcgcttcggtgctcggcttgtcgtgaatacggaacagtgccggttctttcgctttctcaacgaaacgcgccgccgagatattcgccagaatcatgcactcttcaattaatttgtgcgcgtcgttacgctgggtctgttcgatacgttcaatacggcgttcagcgttgaaaatgaacttcgcttcttcgctctcaaatgagatcccaccgcgttcttcacgggctttatccagcactttatagaggttatgcaactcttcgagatgcttaaccagcggggcgtactgctcgcgcagatcctgatcgccctgcagaatatgccagactttggtgtaggtcagacgcgcgtgagagctcatcaccgcttcgtagaatttgtagcccgtcaggcggcctttcgacgaaaccgtcatctcgcacaccatacacaggcggtctacctgcgggttgagcgaacacaggccgttagagagcacttccggcagcatcgggataacctgcgaagggaagtacaccgacgtgccacggttacgcgcttctctgtccagcggcgttggcggacgcacatagtagctgacgtcggcaatcgcgacccataaacgccagccgccgccgcgttttttctcgcagtaaactgcatcgtcaaagtcacgggcgtcttcgccatcaatggtgaccagcggtaaatcgcgcagatcaacacggcccgcttttgcttcttccggcacttcttctttcagcccggcaacctgttgctcaacagcctgcggccagatgtacggaatttcatgggtacgcagagcgatatcaaccgccatgccggtgcccatattgtcgcccagcacttcgacgattttacccaccgctttggtgcggcgagtcggacgctgagtcagttcgactacgaccacaaagcccatccgcgcgcccatgatctgatcgggcgggattaagatatcgaagctcagacggctatcgtcaggaaccacaaagccgacgcccgcttcggtaaagtagcgaccaacaatctggctggtttttggcaccagtacgcggacaatacgcgcttcacgacgacctttacggtcagcacccagcggctgcgccagcacctgatcgccatgaatgcaggttttcatctgctcgctggagagatacaaatcatctttacgcccttcaacccgcagaaagccgtagccatcacggtggccaataacggtacctttcaccaggtcgaggcgttccggcagcgcatagcactgacgacgagtgaagaccagttgaccatcgcgctccatcgcgcgcaggcggcgacgcaggccttcaagctgctcttcgccttcaatgtgcagttctaccgccagctcatcacggctggccggtttttcacgtttggttaaatgttcgaggataaattcccgactagggatgggattcgcgtatttttcagcttcgcgttcctggaaaggatcttgtgacatctcggttcctccgttgtcatctctgatgaagattttcgtcactccaccagcaataatttataaagcggttgattctcttcaaccaaatcggcaagcgtgtagttatccagttccgtaagaaaactttgcacggccttagaaagcgcctgtttcaaccgacaggcaggtgtaatgtggcaaaactcactgctgcaattcaccagcgataagggctccagctcgcgcaccacatcaccaatacgtatcgcactcgccggtttacccaggcgaatgccgccattttttccacgaacagcagtcacgtagccggcacgactaagttgattgattattttgaccatatgattacgggagacgccgtagacgtcagtcacttcagaaatactggtcatccgcccttctggcaatgacgccatgtagatcagcgcacgtaatccgtaatcagtgaaactcgttaactgcacatcaacctcaaaagggaaatcgggaaaaaatacatttatattgatgataaaccagccacaagctgtgtcgctaatttatttcagttcggggaaggaaaaaagcgaggatttaacactgtgtcggatagcgtaatggcttaaccgacacagcaatgtatcacactgttagcccggcaggcaaaatatctgccaggcgtaccagaattacgcgtcgaacggatcgcgcagaatcatggtttcagtacgatccggaccggtagagatgatatcgatcggcacaccagtcagctcttcaatacgcttgatgtagttcagcgccgcctgcggcagaccgctacgatctttcacgccgaaggtggattcagaccagcccggcatggtttcgtaaatcggctctacacctttccagtcgtcagctgccagcggagtggtagtcacttcgcgaccatccggcatacggtaagccacgcagagtttaacctctttcaggccatccagaacgtccagtttagtcaggcagaagccagacagggagttcagctgtaccgcacgacgaacggcaacggtgtccagccagccggtacgacgacgacgccccgtagttgcgccgaattcgttaccctgcttgcagaggaactcgccagtttcatcaaacagttcggtcgggaacggacctgcacctacacgagttgagtaagctttgaggatacccagaacataatcaacataacgcgggcccaggccggaaccggtcgccacgccaccagcagtggtgttggaagaagttacgtacggataagtaccgtggtcgatatccagcagcgtaccctgcgcaccttcaaacatgacgaaatcgccacgctgacgcgcctggtcgagcaggtcagaaacgtcaaccaccatagaagtcaggatgtcggcaactgccatcgtatcatccagaactttctggtaatcaaccgcttcagctttgtagtagttaaccaactggaagttgtgatattccatcacttctttcagtttttcagcgaaggtttctttgtcgaaaaggtcgccaacacgcagaccgcgacgtgctactttatcttcataagcaggcccgataccacgaccggttgtgccgatcgctttcgcgccacgcgctttctcacgcgcgttatccagcgcaacgtgataatcaaggatcagcggacatgcttcagacagcagcagacgctcacgaacggggatgccacggtcttccagttctttcatctctttcatcagcgcggccggagacagcacaacaccgttaccgatgatgctggttacattctcgcggagaatacctgatggaataagatggagaacggttttttcaccgttgattacgagagtatggcctgcgttgtgaccgccctggtagcgtacaacatatttagcccgttcagtcagaagatcgacgatcttacctttaccttcgtcaccccattgggtgcccagtacgacgacgttgttacccatttttcaaaatcaccgtttgcttaaaaatggattctaccatcgctttttcagagttacagcactttttgcactcaaaaatgacctcgatcagtctgttttttgttcagccaatcgttttcctcaacatgtagtagaccacaacgcccgcaaccacaagtccaccgccaaaacgacgtaaaatattatcgggcaaattggtcatcgcagagatcatcttcttccatgccttcgggtaaagcatcggccctaaaccttccagtaccaaaaccagggcaagcgccagccagattgtcgaattcattcattatccttatagaaaaagaaaaccaccgacatccctgaggatgcggtggctttattgacctgtaccgcagtcgttatattaacgcgttgcggaagtcggcgtcttcatgtagcggaagaaatcgctatccgggctcatgaccatcacgtcctgattgccagagaagctgttctcataagcacgcaggctacggatgaatgcgtagaagtccggatctttactgaatgcatcagcaaacagtttggctgcttcggcatcgccttcaccacgcatgatgcggccctgacgctcagcttctgccagcgttctggtcacttcatagtcggcagtcgcgcgcagtttttccgcttcttcctgaccttgtgaacggtgacgacgcgctaccgcttcacgctcggcgcgcatacggttgtagatcgcttcagacacttcggtcggcaggttgatctgcttgatacgcacatcgacaacttcaatacccagcgccgccatactgttcgggttgatgaccggaactttgcccttcgtctcagccgttacgcgctctgccgcttcggcaatggcgttatctgccgccggggtagtaacttcatcttctgtacccgcagaaccggagttcagcgcgtcacgtacttcgagggtcagacgaccacgggaatcggtgacgatgtctttcacgtccaggcgaccaatttcagaacgcagacggtcagagaacttacgtttcaacagcacttccgcttgcgaaatgtcgccaccacccgttgccaggtagtaacggctgaaatcgctgatgcgccatttgatgtaagagtcgacgatcaggtcttttttctctttggtcacaaagcggtcggcctggttgtccatggtctgaatacgtgcgtcgagcattttcaccgtttcaatgaacggtatcttgaaatgcagacccggctcataaaccagaggtttgttgtcatcgtcacgcagtaccttaccaaaacgcagcgtaataccgcgctcaccttctttgacgacaaagacagacatgtaaagcactaccagcacgatgatgataatcgcgataactgacttacgcatcgttattccccctgacgctggtagtcgttacgctgcgcgttggcgcggcgttggtccataatatcgccctgactggtggacgacgtgttgcttgctccactggttgtggaggaagaggctggcggcaaacgcagcagattgctggcaccgttatcgctcttcgccgcaggggcgttaccacctttcagcatctggtctaacggcagaaccatcaggttgccacctttatcgttaaccagcactttgcgggtgttacccaacactttttccatcgtctcgatatacagacgctcgcgagtaatttccggcgcggctttatattccggcagaagtttagcaaagcgcgccacttcaccctgagcttccaggatggtctgggccttgtacgcacgcgcctcttcgaggatacgttgcgcctgaccgttcgcacgcggctgaacttcgttggtatacgcttctgcttcacgaatgtattgctgttcgttttcacgcgcggcaatcgcatcgtcaaacgccgcttttacttcttccggcggacgagcagcctggaagttgacgtccagcagagtgatgcccatgtcatacggacgaatcgtctcttccagttcgcgctgggtatcgctacgaatcacggtacgaccttccgtcagaatgcggtccatggtgtatttaccgataaccccgcgcagggcgctgtcggtagcctgacgcaggctgtcatccgggctggtcacgctatacagatatttttccggattggtaacgcggtactgcacgttcatctcaacgcgcactacgttctcgtccgacgtcagcatcacaccggaagcggccagttcacgcacggcttccacgtttaccggtttgacttcgtcgataaacgtcggtttccagttcagacccggctcaaccagatggctgaatttaccaaagcgtgttaccacgccgcgttcggcttctttaatggtatagaaaccactggccgcccagataatgacaatcgctgccgctgcgatggtaacgacacgaccgccaagctgcgggcgcgggccttgcgatgaactgccaccgccagatccggtgcctttaccgccgcccagaccaccgagctttttgctcagtttgcggaagatatcatctaaatcaggtggcccttgatcgcgaccgcctttgtttccatttccctcagagttgccgccaggtttgctgcttccccacgggtcgcggtcttgtccgttattaccgggctgattccacgccatgtttgtgctccatatttgttatgcggtgatccctgttgtctttcgacgccagaggatatgactccacgcttcagacgctacgccgttagatcaggtaatcgatcaacgccggttcttgtttacagaggcgacgccagtcaacgatcggcatacgaacttgcagacttacgctgccgtcctcctccatccactctttttctattgcctgaagctgataaaaacgacttctcagacgcccttcctgcggtggcagacgcaatgtatgctgcgccacctcgccggaaagccgctccgtcaaagcctgaaaaagctgtggtatccccgctccggtctgtgcggaaagccagacacggatcggtttgttctcttcgtcccgatcaatacgcggttcgaaatcttccagcatatcgatcttgttcatcaccagcagggttgggatctcgtgagcgtcgatctcttcaagaaccgtattcaccgcttcgatgttttcttgtacacgcacatccgccgcatcaatgacgtgcagcagtaatgtggcttgccgcgtctcttgtaacgtggctttaaatgccgccaccagatcgtgcggcaggtggcgaataaaccctacggtatctgcaagtacggtttcaccgacatctgcaacgtcaatacgccgcaacgtcgggtcgagggtggcaaacaactggtctgccgcgtagacccgcgcttcggtgatgcgattgaaaagggtagatttaccggcgttggtatatcccaccagcgaaacagtaggaacgtcggctttgatacgcgattgccgcccctgctcacgctgcttttcaactctttccaggcgtgactgtatctgcacgatgcgattacgcaacaaacgacggtcggtttcgagctgggtttcacccggaccacgcaaacctatcccgcctttctgtctttcaaggtgggtccagccacgcaccaggcgcgtagccagatggcgcagctgcgccagctcaacctgcaacttaccctcatgggtacgcgcacgttgggcgaaaatatctaaaataaggccggtgcggtcgataacacgacactcgcacaaacgctccaggttacgctcttgcgccgggctcagggcatggtcaaaaagaacgaccgaagcacccgtcgctttgacagcttccgcaatttcaactgctttaccttcacctacaaaatactttgggtgcggcgctttacggctaccggtaatcacctgcaatgcttcgacaccggcggaagagaccagagattcaaactcctggaggtcttccatatctttgtcttgcgtaaaatagatgtgtaccagtaccgcctgctcaccagcatcataacggtcaaacaagcgtataaccctctaaatagatcagcggggaacgcaggatcgctggctccccgtgtaaaaaaaacagcccgaaaccttattcggtttcttcgctgtcctgttgcgcggaagtattctgcgcgctgctaccatgatggtagttactgctggtaccgccaccggcgttgttactgtgatgagaaaccgggcgagacgggacaacagtagaaatcgcgtgcttgtaaaccatctggctgaccgtgtttttcaacaggatcacgaactgatcaaaagactcgatttgcccttgcagcttaataccattcaccaaataaatagaaactggaacacgttcccgacgcagtgcgttcaggaacggatcttgtaaagattgccccttagccattctctcttttccttatatgcttatttgtactttgaacctttcgattctgaaaaaattgcgcacgatacgtctcaattgtacacattcagcctgcgatagcaccaacaacctgtaatacttcgtcacgcgcctgttctggtttttcactgtcaagccagtgaaccccttcccaaccacgcagccaggttatctgccgcttcgccaactgtctcgtggcgcaaacacctcgataaaccatttcatcgtatgagatttcgccttcaaggtaagaccacatctggcgataacccacgcaacgaatggaaggcaagtccgtatgcaaatctcctcgggcaaaaagcgcccggacttctgcnnnnnnnnnnaacctgaagccaacatctgatgaaaacgctgctcaatgcgttgatggagcagttcacggctcgccggggcgatggcgaactgatgcacctgatacggtagagcgtctcctgacgtttgcgtcagttccgttaaagttttacccgaaatgaaaaaaacttccagtgcccgggaaagcctttgtggatcatttggatgaatccttgctgccgcaaccggatctacctcctgaagttgacgatgcaatgactcccaaccttgctctgccgcctgttgctcaattctggcccgcacttccgggtctgccgacggtagcggcgacaacccttccagcaatgccttgaaatacaacatcgtaccgcccactaacagtgggatccgccccgccgcggtgatatcggccatttccgccagcgcatcgcggcgaaaatcagcagccgagtaagcctgcgacggatcgcgaatatccagcaatcggtgcggcgcggcgagtaactcttcagcgttcggcttcgccgtcccgatatccatccctttgtaaataagggcagaatcaacgcttatcaactctactggtaaaattttacgcagctcaatggctaacgccgttttaccggaggccgtcggccccatcaaaaaaatcgccttaggcaggctcgccttactgatatcactcatctttcagggcttttatcgccggatgtaaatcaacagattgtaacagaccacccggcggcgttttcacaagttgcggacataaccgttccacgtccgccagcagggttatggcctgtgccattgaccactgcgcatgttcgctcatcagatttcgtgcaatccactgcgcaatattgccaggttcgaatacggactgcttcgccaggtagcctatcagttcaggaatcaagatttgtaaattttgttggcgtaagggtaaaggcacggccctgatggtcacatgctgtgcatctgactggaaatcaatacccaattccgccagggcagactgcgctttttctaatgccgatttttcttcggcagaaacttttagccgcaacggaatcagcagcggctgggcgcaaacgggcgcttcacccggcgtcaattgtgcctgacgtagccaacgttctgccactggcaaggataaaagtgaaatgttgccatcgcgctccagcaacgcacagtcggaatggacgatagtcagtacccgaccaaaactctgactgttcgccgcaagtgcaggttcctgcggttccggcgcttttaatttttgcatcggcgcgggcgtttgcaaaagctggcgatacacttcaccttgctgtttctggtagcctggctgcgcattcggccagggggcagccggacgactgcctgatgctggcgcaggagtgtagcgcggagctaccggctcacgagctgccggttctgcaaagtgattgcgccccgccgccacgcggttttccgggatggcacgcggtgcgggttgtggttcatcgtccagcggtagcggcgtttccagttgctgctgtagcacgctcagcacgccctgatagataaagtcatgcaccagacgcgactgatggaaacgcacttcgtgtttggcggggtgtacgttgacgtccacctgatgcgggtcgatctccagatacaacacaaacgccggttgttgatcggcccccagtttgtcttcgcaggcctggcggatcgcatgattgatcaggcgatcgcgcatcatgcgaccattcacgtagcaatactgaatttccgccagtgcgggcgtagtgtgatttggatcggccacccagccgcgcagggtgagatcgccgtattgccattcaatcgccagcgcttgttcgagaaaagcggtgccgcaaatcgcgcctaagcgccgttctttttgcccgccttccggcactgcgcggtactgacgcacaattttaccgttatgcgacaggttgatcgtgacgtcgaaacgcgccagcgcaatgcggcggatgatctcatcaatgtggttaaattcggttttctcggtgcgcaggaatttgcgccgcgccggggtgttgtagaacagatccagcacctccagcgtcgtccccacaggatgcgccgccggttttaccgtcacgctcatatcgcgcccttcggcataggcctgccaggcttcctgctgttctgcggtgcgtgaagtgagcgtcaggcgggaaaccgaactgatactcgccagcgcctcaccgcgaaagcccaggctgataatggcttcgagatcgtccagagaggcgattttactggtggcatgacgcgccagcgccagcgccagctcgtcttttttgataccgcagccgttatcacgaatgcggataagtttcgccccaccgcgttcgatatcaatatcgatacgtgtcgcacctgcatcgaggctgttttccaccagttctttgactaccgacgcaggtcgctcgaccacctcacctgcggcaatctggttcgccagttgtggcggtaagacctgaattggcatcaatcgtccttagtttggcagcgtgcgatctggcgtcgtcaccgtactggccgtttgtgccgttgccccctgcggcgcagattgcatcggatgcgcaaggaaataattgcgcaggcctttgtaaatggcttctgccagctgttgttggtaatcgtcgctcgccagcaaacgttcttcgctgttgttgctgataaaaccggtttcgaccagtactgatgggatatccggcgaacgcagaacgccgagactcgcgtgttctggtcggcgtttatgtatttcgccaatgcgttgcaactgactgatcatactggtcgctacatcataccctacccgttgggaatgaccgaactgtaaatccagcaccgcctggcttaaataggggtcagactgactgttcgccagcacatcacccgccccacccagcagctccgactgtttctcgtgctgctccagccagctggccatttcgctgttggcgcgacggttagagagcacccatacggaagcgccagtcgcactgcggttcggtgcggcatcagcgtgaatcgacacgaggaaattggcgttttgcttacgtgccacatcactgcgccccatcaccgagataaagtaatccccgtcacgggttaaaacgcccttaaacatcggatcgtcattgagcaaagtacgcaatttacgcgcgatggcgatggtgacatttttctcccgcgtaccaccggggccgatagcgccagggtcctgaccgccgtgtccggcatcaatagcgatgataattttatcgccagtgttagccgtcgcgcgcgctgccggacgcgttaccgtattactgctgataacacccgtagtgcggttactttccgttttaaacggattgcgcgccggttcgctgacgcgcggtgcgacaaccgcaggcgtttcaacgcgtttcgcaaccacgggcggcggaggaggaggtggcggcgcatcggcgttaatcgtaaagacgacagtgtaattgctgccattctgccgcttcaccgcttcggttttaccgttttcggtaagatcgaccaccagccgtagcgtttgtgcatctttaggcgttccagagcgaatcgccttcaccagattattgccgctgaacaacaacggcagtccctgaatcacgcccgtttgtttgatatcgagcgccacggtgcgtttgctttgatggctaaacgcataatcaggatcgccaataaaactcaacgttatccgcgcctgttgattaccgttagaaacctgaatatcagagagcgtcgcggcacccaccggcgtgcacagcagcagcagcgtcgctaccaaccaatttctgatgcgatacatcatcccgccacctttcaaaggttaaccggctaaacgcgccagcaacaattcacccgcagaggaaaccgcactcacgcgcgcctcacggccttgtgcctgataatcaatgtgtatttcgacatccgggtcaggaagaacacctgtaccttgttgtggccactccaccaggcagatggcatcgttggcaaaataatcgcggatccccataaactccagctcctcgggatcggcaaggcggtacaaatcaaagtgataaaccattaaattgtcgagcgtatagggttcgaccagcgtataagtggggcttttgacattaccctgatgacccagagcttgtaaaaagccccggctaaaggtggttttacctgcgcctaaatcgccatacagatagattacggttgcgccatcgcaggctttcgctacccgctcgcccaggtctaatgttgcctgctcatcagggagcggaattactcgattcatcatggtttttatcagtcacttccgggttaacaatacgctgtagcgtggaaaagagatcggttgccagcatcccgcgcgttccaaaacgcgccgccagtacgtcagctgcagcaccgtgcgcgacacagcccgcacaggcggcctcctacnnnnnnnnnnagtttttgcccaagcaatgcgccaataataccagagagcacatcgcccatgccgccgctcgccatgcctgcatttccggcatcaataatgcctaaagcgtcaggatgggcggcgaccacggttccggcacctttcagcaccgctacgccgccataacgttgtaccagacgtttggcgcaatgtaagcggtcactttcaatttcagcgacggaacagcctaacaaccgtgcggcctcgccaggatgcggcgtgatcacgcgattgtgacgcttatcgggattgattgccagcaggttcaatgcatcggcatcccacaacatcggtttgcgaaaattctcaactttttgcagtgcttttttcccccactcttgctggcccagaccgggaccaatcaccaccacatcggcccattccaggctttcggtaagagagtccatcgtcagttcatgcaccatcaattccggtcgtgcagtcagcagcggcgcaatgttttcactgcgggtcagtactcggactaaaccagcaccagcacgtagcgccgcttcccccgtcatacgaatagcccccgccgtgccgtgatcgccaccgataattaccagccgcccgtgatcgcctttatgcgaagtcgggcgacgcggttttagccagtgagaaagttgttctgccgaaaaccgctgaattttcgtctcctgacctgccagccaactatccagccccagtgagtcaaaatgcagttgtccggtaacatcccgcgcttttccagtgagcaagcctggtttcagcgcaataaaagtgatggtgtgatcggcgttgatcactgcgcctggcgtagcgccggtttcagccagcaggccggaagggatatcaaccgccgcaatcggcgcaggatgggaattagcgtggtcgattaactggctaatggattcgcggggcgcttgctgcaagccggtaccgagcagcgcatcaacaatcagatctaccgattcgggccagacaatattcgaagcatggatctcgcctcccgcgtttaaccatgcttcgcgtgccagcgcggcctcttccggcaacggtttgtcgctctcctgggccagcagcgtgacctcaatgccgaccgctgtggccagccgcgcgaccacgtagccatcgccgccgttattaccatgaccgcacagcaccagccaatggcgggcgtcaggatacgccgaacgacacacctggaatgcggcttcgccagcgcgaagcatcagctcatagagtgtaagccccagcgcatctgccgcctcacgttctccgcggcggatatcgtcggcgtgccagacggtgtgtggtatacttacggggtttttcttcattgtatggtccgtcatgtcagagcccctcgatctcaatcatttagcgcaaaaaattaaacagtgggggctggaactgggctttcagcaggtaggtattaccgataccgatctcagcgagtccgagcccaaactgcaagcatggctggacaaacaataccacggcgaaatggactggatggcacgtcacggtatgctgcgcgctcgcccccatgagttattgcccggtacgctgcgcgtgatcagcgtgcggatgaattaccttcctgctaacgccgcatttgcccgcaagctgaaaaaccccaaactcggctatgttagccgttatgcgctgggccgtgactatcacaaacttctgcgcaaccgactcaaaaagctgggcgagatgattcagcaacattgtgtttcgctgaattttagaccgtttgtcgattctgcgcctattctcgagcgcccgttagctgaaaaagctgggctcggctggacaggtaagcactcacttatcctcaatcgcgaggccggttctttcttctttttaggcgaattgctggtcgatattccgctgcccgtggatcaaccagtcgaggaaggatgcggtaaatgcgtggcctgtatgacgatttgcccgaccggtgccatcgtcgagccatataccgtcgatgctcgccgctgtatctcttatctcaccatcgaacttgaaggggcgatcccggaagagttgcgaccgttaatgggaaaccgtatttacggttgcgatgactgccagcttatctgcccgtggaatcgctattcacaactcaccacagaagaggatttcagcccgcgtaagccgctacacgcaccggaactcattgagttattcgcctggagcgaagagaagtttttaaaagtcacggaaggatcggcgattcgtcgtattggtcacctgcgttggctgcgtaatattgccgtagcattaggcaatgctccttgggatgaaacgattttgacagcgctggaaagtcgtaaaggtgagcacccacttctcgatgagcacatagcgtgggcgattgcgcagcaaatagagagacgaaatgcgtgcatagtcgaagtgcaattgccgaaaaaacagcgtctggttcgggtgattgaaaaagggttaccgcgtgacgcctgattcatccacagcttgtgaataaaaataaaaacgcattgcaattcaagacgaataaaatcgtcaagtgatcgactcgacaaaacggaatcttaatttttaacttatctatcaataggttaaaaaaatactattcaccgtgcgaagtttctttgaaattaagattacagcctgaggctgtggataactctgtttacaagagtttgtcagagacaacgaaaaccagcaataacgcatcgcatcgctgtggatattttattgagagaagaatttggagcgggaaacgagactcgaactcgcgaccccgaccttggcaaggtcgtgctctaccaactgagctattcccgcttgggtggtctgtgccttacagcactttcaaattttggagcgggaaacgagactcgaactcgcgaccccgaccttggcaaggtcgtgctctaccaactgagctattcccgcttgggtggtctgtgctttgcagcacttttcaaattttggagcgggaaacgagactcgaactcgcgaccccgaccttggcaaggtcgtgctctaccaactgagctattcccgcgtactacttaattttgctttcgtaattttcgcatttctgcgtcgttacgggaggcgcattatacgagaaatctttccctctgcaaccccccaaaaaagttttttttgcgtttttatctcaagtgctgaaattatcagcaagacgttcaatttagcgtcaaaatcacgccgccgcaagtggattccggcgcttacgtgaccaggaaaaattttacagcttgataaaatgctcgcggtagtaagccagctccgccaccgattcacggatatcatccatcgcctgatgcgtcccctgcttggtaaaaccatccagaatttccggcttccagcggcgcgccagctctttcagggtgctgacatcgagataacggtagtggaagtaggcttccagctccggcatgtatttaaacaggaaacgacggtcctgaccgatgctgttaccgcaaatcggcgattttcccgcaggcacccactgttttaaaaattcgagcgttgccagttcagcttcccgatcgcccatcgtgctcgctttcacgcgctctaccagcccgctggcggtatgggtgcgcacgttccagtcatccatcagcgccagctgttcatcagactggtgtactgcaatggtcggcccttctgccagaatattcaggttggcatcggtcaccagcgtggcaatctcaataatgcgatcgcgctcgggatccagaccggtcatctcaagatcgatccaaatcaggttgttttcattggcactcatgctattttccacccattcacagtgactatattgatccacaattgcgtgtatcatagatgttttgcccatcaggggcgaccaggagtctgtacgattgagtaaaaataaactctccaaaggccagcagcgccgcgtgaacgccaatcaccagcgtcgtcttaaaacgtctaaggagaagcccgactacgacgacaatctgtttggcgagcctgatgaaggtatcgtcatcagccgctttggtatgcacgctgatgtggaatccgccgatggcgacgttcaccgctgcaatattcgccgtaccatccgttcgctggtaaccggcgaccgcgtagtctggcgtccgggtaaaccggcggcggaaggcgtaaatgtcaaagggatcgtggaagcggtgcatgagcgtacctcggtgttgacgcgtccggatttctacgacggcgtaaaacctattgccgccaacatcgaccagattgtcattgtctccgccattttgccggagctgtcgctcaatattatcgaccgttacctggtggcctgcgaaaccttgcagattgagccgattattgtgctcaacaagatagacctgctggacgacgaaggcatggcgttcgtcaacgagcagatggatatctaccgcaatatcggttatcgcgtattgatggtttccagccatactcaggatgggctaaaaccgctggaagaggcgttgaccgggcgcatcagcatttttgccgggcagtctggcgtcggcaaatccagcctgctgaatgcgttgctggggctgcaaaaagagatcctgaccaacgatgtctctgacaactcggggctcggtcagcacaccacgaccgccgctcggctgtatcacttcccgcacggcggtgatgtgattgattcccctggtgtgcgtgagttcggcctctggcacctggagccggaacaaatcactcagggctttgtcgaattccatgactacttaggtctgtgtaaatatcgcgattgcaaacacgataccgatccgggctgcgctatccgggaagcggttgaggaagggaaaatcgcggaaacccgtttcgaaaactatcaccgtattctggaaagcatggcgcaggtaaaaacgcgtaaaaacttttctgatacggatgactgacaattaagctaaccgtcgttagaatcgtcccctttttttcaggatccggcatgtaggccggatcaggaacgacaaaacaatggcctggaggctaccttgttaaattcatttaaactttcgctacagtacattctgccgaaactatggcttactcgcctggcgggttggggcgcaagcaagcgggcaggatggctgacaaaactggttatcgatctgttcgttaaatactacaaggtcgacatgaaagaggcgcaaaagccggacaccgccagctaccgcacctttaacgaattctttgtccgtccgctgcgtgacgaagtacgcccaatcgataccgatccgaatgtcctggtcatgcctgccgatggcgttatcagccagttgggtaaaatcgaagaagataaaatcctgcaagccaaaggccacaactacagcctcgaagccttgctggcaggcaactatctgatggcggacctgttccgcaacggtacgtttgtgaccacttacctctccccgcgtgactaccaccgcgtacacatgccgtgcaacggtattctgcgtgagatgatctacgtgccgggcgatctcttctccgttaaccatctcaccgctcagaacgtgccgaatctgtttgcccgtaacgaacgcgtgatttgccttttcgataccgaatttggcccaatggcgcagattctggtcggagcgacgattgttggcagcattgagacggtctgggcgggcaccattacgccgccgcgcgaaggtatcatcaagcgctggacctggcctgccggggaaaacgacggttctgtggcactgctgaaaggccaggaaatgggtcgctttaaactcggttccaccgttatcaacctgtttgcaccgggtaaagtgaatctggttgagcaactggaaagcctgtctgtcacgaaaattggccagccgctggcagtatctaccgaaacctttgttacgccagacgctgaacctgccccgcttcctgctgaagagatcgaagcagaacacgacgccagcccattggttgacgacaaaaaagaccaggtctaatccatcaaaggaaacgctgacgtgcgcctgattatcacttttctgatggcctggtgcctcagttggggggcgtacgccgcgacggcccccgatagcaaacaaatcactcaggaactggagcaggcaaaagcggcgaaacccgcacagccggaagtcgtagaggcgctccagtctgccttaaatgcgcttgaggaacgaaaaggttcccttgagcgcatcaaacaatatcagcaagttatcgataattatccgaaactctccgctactctgcgcgcacaattaaacaacatgcgtgacgagccgcgcagcgtgtcgccgggaatgtctaccgacgcgctgaatcaggaaattctccaggtcagcagccagttgctggataaaagccgtcaggcccagcaagagcaggagcgcgcccgcgagattgccgattcgctgaatcaactgccgcaacagcaaaccgacgcccgccgtcagttaaatgagatcgagcgccgcctggggacgcttactggcaatactccgctcaatcaggcacaaaatttcgcgttgcagtctgactctgcacgtcttaaggcgctcgttgatgaactggagctggcgcagctgtctgccaataaccgccaggaattagcgcgcttacgctcagagctggcggaaaaagagagccagcaactggatgcgtatttgcaggccttgcgtaatcaattaaacagccaacgtcagcttgaggcggagcgggcgctggaaagtaccgaattactggcagaaaacagtgccgatttgccgaaagatatcgtcgcgcaattcaaaattaaccgcgaactatcggcggctttgaatcaacaggcgcagcggatggatctcgttgcctcgcaacagcgtcaggctgccagccagacgttacaggtccggcaggcgttgaatacgctgcgtgaacagtcgcaatggctgggatcgtccaatctgctcggcgaagcgctgcgggcgcaggtggcacggctgccagaaatgccaaaaccacaacagcttgataccgaaatggcgcagttgcgtgtgcaacggttacgttatgaggatctgcttaataaacagccgctgctacggcaaatccatcaggccgacggtcagccgctgaccgccgagcaaaaccgtattctggaagcacaactgcgcactcagcgtgagttgctgaactcattgttgcagggtggcgacacgctactattggaactgaccaagctgaaagtctccaacgggcaactggaggatgcgctgaaagaggtgaacgaagcaacgcaccgctatctgttctggacctctgacgtgcgcccgatgaccatcgcctggccgctggaaatcgcccaggatctgcgtcgtctcatttcgctggacaccttcagtcagttgggcaaagccagtgtgatgatgctgaccagcaaagagacaattttgccgctgtttggcgcgttgattctggtcggttgcagtatttactcgcgccgctatttcacccgttttcttgaacgttcggcggcgaaagttggcaaagtgactcaggatcacttctggctgacgttgcgcactcttttctggtcgattctcgtcgcgtcaccgttaccggtgctgtggatgacgctgggttacggcttgcgcgaggcgtggccttatccgctggcggtcgcgattggcgatggtgtaacggccaccgtgccgctgctgtgggtagtgatgatttgcgccacctttgcccgcccgaacggcttgtttatcgctcattttggctggccgcgcgaacgtgtttcccgtgggatgcgctactacctgatgagcatcgggcttattgtgccgctgattatggcgctgatgatgttcgataacctcgacgaccgtgaattctccggttcgctgggacggctttgctttatcctcatttgcggtgcgctggcggtggtcaccctcagcctgaaaaaggccgggatcccactgtatctcaacaaagagggcagcggcgacaacattaccaaccatatgctgtggaacatgatgattggcgcgccactggttgccattctggcgtcggcggtgggttatctggcaacggcacaggcgctgttagcgaggcttgaaacctcggttgccatctggttcctgctactggtggtttatcacgttatccgccgctggatgctgatccaacgccgcaggctggcgtttgaccgggcgaagcatcgccgggcagagatgttagcgcaacgtgcgcgtggcgaagaggaagcacatcatcacagtagcccggaaggggcaattgaagtcgatgaaagcgaagtcgatctcgatgccatcagtgcgcaatccttgcggctggtgcgctcaattttgatgttgatcgccctgctttcggtcattgtgctgtggtcagaaatccattccgctttcggcttcctcgaaaatatttcgctgtgggatgtcacctccacggtacagggcgtagaaagtctggagccaattaccctcggtgcggtgctgattgccattctggtgtttatcatcaccacgcagctggtgcgcaacctgcccgcgctgctggaactggcgattttgcagcacctggatttaacgccgggtacgggttacgccatcaccaccatcaccaaatatctgctgatgctgattggcgggctggtcggcttctcaatgattggtattgagtggtcgaaattgcagtggctggttgccgcgctcggtgttggtctcggttttggtttacaggaaattttcgccaactttatctctggcctgatcatcctgttcgaaaaaccgattcgcattggcgatacggtaacgatccgcgatcttactggtagcgtgacgaaaattaatacccgcgcaaccaccatcagcgactgggaccgtaaagagataatcgtgccgaacaaggcgtttattaccgagcagtttatcaactggtcgctctctgactcggtcacgcgcgtggtgttgacgattccggcccctgccgatgccaacagtgaagaagtgacggaaatcctgctcaccgcagcgcgtcgctgctcgctggtgatcgacaacccggcaccggaagtcttcctggtggatctgcaacaagggattcagattttcgagctgcgtatttacgccgctgagatgggtcaccgtatgccgctacgccatgagatccaccagctgattctggcaggcttccatgcccacggtatcgatatgccattcccgcccttccagatgcgtctggaaagcctgaatggtaaacaaacggggagaacattaacttctgcgggcaaaggtcgtcaggcgggaagtttgtaatgcatgaagctgccaaatgatgtcaacgtggctcatttagcagcttaacatcatcttcagttatcaccggccctggagagtatcatccatacgcattacttcctgacaactcatcgccggagagacgatgagttgcaggatttcatatgatcagtcgagagctaactcaggtttattcgccatgcgactgcaatagttctggtaaatcgccatcgctaacagcgagaagaagacagggccgccaatcatccacaatgtgctgtcccagtctccagcttcaaccacaggttgaatgatggtgaagacgttcgcaaatgtcaccaccagtacgacaaccaccgtcgcgatcattgccgacatacgcgttttgaaaatcacaaatggtctgtcgagatcctgacgtgctttaaagaatgggaaagccagcgcgaggaacaggtaaggaagcgtcatagacacgttcgccatcagcgtcagcttgttaaagaacgccgatgcggtaccgccaccaaacgaaaccagcagaatgaagatagtaaccaacccgcactgcatccacatggcgatagacggcatccccatcgcattcaggcgcgtcatcggttccggccacaatgctttcggcgtcccctggatgatggctttcaacggtgaatagcaaagcgtaaagaacgcaccggtataggcgaggaacatcgaaagtccagtaatacgcgcaaaccatacgcccagcgacaatgacgcttcaggtgacaaatgcagtgcattacccagcgtcatcccaaggctcttcatcagcacataggtaatattgccgaggttaacggaaccattacttaatacctgctgccagtttgtgctgacgccccataaaaatattgccagcgaataaccgattgaaataacaatagcggcaaaaacaatacctttggcaaagttcttttctggattttccgttttatcgaccagaccaccaaccgcttcaattccgccataggcaaaaatggcaaataccacaaacgatagcattgccagaccggactgataacccgggttcggtgatgcaaggaaattaatatcctgcgcgaaatgcccaccatttaataacaaaatagtaatgcttactaacagcaatactaaattcagacacattactgcaataccgcccaccgcagtaatgcgggcaattttattaatccccttagaagcaacgacggtgaccagaatcatccatgccactgccagcagaccaaccacctgcgtaggctccagtccggcaatacgccagtgctgggtcatgtcgctaccatagaggaatgttgagaacggtacccaaactttcgcggaggtactcaccatccagatgatataagaggaaaaccacataaacgtaccaatgaaggcaaaacgtggtccgacactattattcatccaggaatagataccaccttcttctttgcgataagcagctcccatttcagccatcattaaggcgaatggaataaagaataacaatgcagaaaatatataaaagggaatcgcactataacccattaagtaataagccgatgggctattggcaaaaccaaatacggaagtaaagatcatcaatatgagtcctatcagactcattttttttatcgtgtgaggcatgaaaccatccttcatttcagcgcgtgtataacacgtgcccactgaactgcactgcgcaacattgagcaggcagcgtaaaaaccaatacagaattgatacctggatgatatcaaatatccagtcttaaattgtggcctttagcggaaaaatgaaaacatatgctacagaatggcgcttattacgccattcttcgctgttaattcagtaatttttcagaattatgcccggtcaacgctaaaggcgatgacttcagccagtgtctccgcgcccagcgccaacatcaccagacgatcaacacctaatgccacgccggaacagtcaggcataccgactttcaaggcgtcaatcagattctggtcaatggggtgctgcggcaaaccgcgcgccgcgcgcttacggttatcttgttcaaagcgttgttgctgctcacgggcatccgtcaattcatggaaaccattcgccagctcaatacctttataataaacctcaaagcgttcagcgacccgatgatcttcggtactgatttgcgccagtgatgcctggctggctggaaagtggtacacaaaggtcggtttttctttaccaatatttggctctacgccaaaggtaaacagcaattgtagcaacgtgtcgcggtcttcttcggtatcagcaacattgctcaaatccagtttcgctgccacttcccgcagttgcgttttgtcggcagagagtgggtcaatttccagataacgcaagaaagcttgttgataagaaaggctttctgctgccgggcagtccagcacctgttgtaagagatcgtccacctcgttcatcaaccggtacatatcatagtgcggtcgataccactccagcatagtgaactcagggttgtgataacgccccatctcttcattacggaagctgcggcacagctggaataccggcccacaaccggcaaccagcaggcgtttcatatggtattccgggctggtcattaaccagagattcatcccctgcgaatgcccggggccaacgaaacgtgtctcaaacgggaccaaatgaatatcggttaccgtcgcctggctcatacaaggcgtctccacctccagcactccacgatcggcaaagaaacgacggatctccgccataatcgccgcgcgttttaataagttaggaatggatgcgctcggctgccaggatgccgtttcgctcatagttaaatctccagtttttgacaagggcacgaagtctactcgcaacgcgacggcgagacaaattttacgcaggaatcaaacagcggtgggcagtgactaaaaaaagcacgatctgatggtttagtaattaaattaatcatcttcagtgataatttagccctcttgcgcactaaaaaaatcgatctcgtcaaatttcagacttatccatcagactatactgttgtacctataaaggagcagtggaatagcgttcgcagaccgtaactttcaggtacttaccctgaagtacgtggctgtgggataaaaacaatctggaggaatgtcgtgcaaacctttcaagccgatcttgccattgtaggcgccggtggcgcgggattacgtgctgcaattgctgccgcgcaggcaaatccgaatgcaaaaatcgcactaatctcaaaagtatacccgatgcgtagccataccgttgctgcagaagggggctccgccgctgtcgcgcaggatcatgacagcttcgaatatcactttcacgatacagtagcgggtggcgactggttgtgtgagcaggatgtcgtggattatttcgtccaccactgcccaaccgaaatgacccaactggaactgtggggatgcccatggagccgtcgcccggatggtagcgtcaacgtacgtcgcttcggcggcatgaaaatcgagcgcacctggttcgccgccgataagaccggcttccatatgctgcacacgctgttccagacctctctgcaattcccgcagatccagcgttttgacgaacatttcgtgctggatattctggttgatgatggtcatgttcgcggcctggtagcaatgaacatgatggaaggcacgctggtgcagatccgtgctaacgcggtcgttatggctactggcggtgcgggtcgcgtttatcgttacaacaccaacggcggcatcgttaccggtgacggtatgggtatggcgctaagccacggcgttccgctgcgtgacatggaattcgttcagtatcacccaaccggtctgccaggttccggtatcctgatgaccgaaggctgccgcggtgaaggcggtattctggtcaacaaaaatggctaccgttatctgcaagattacggcatgggcccggaaactccgctgggcgagccgaaaaacaaatatatggaactgggtccacgcgacaaagtttctcaggccttctggcacgaatggcgtaaaggcaacaccatctccacgccgcgtggcgatgtggtttatctcgacctgcgtcacctcggcgagaaaaaactgcatgaacgtctgccgttcatctgcgaactggcgaaagcgtacgttggcgtcgatccggttaaagaaccgattccggtacgtccgaccgcacactacaccatgggcggtatcgaaaccgatcagaactgtgaaacccgcattaaaggtctgttcgccgtgggtgaatgttcctctgttggtctgcacggtgcaaaccgtctgggctccaactccctggcggaactggtggtcttcggccgtctggccggtgaacaagcgacagagcgtgcagcaactgccggtaatggcaacgaagcggcaattgaagcgcaggcagctggcgttgaacaacgtctgaaagatctggttaaccaggatggcggcgaaaactgggcgaagatccgcgacgaaatgggcctggcaatggaagaaggttgcggtatctaccgtacgccggaactgatgcagaaaaccatcgacaagctggcagagctgcaggaacgcttcaagcgcgtgcgcatcaccgacacctccagcgtgttcaacaccgacctgctctacaccattgaactgggccacggtctgaacgttgctgaatgtatggcgcactccgcaatggcacgtaaagagtcccgcggcgcacaccagcgtctggacgaaggttgcaccgagcgtgacgacgtcaacttcctcaaacacaccctcgccttccgcgatgctgatggcacgactcgcctggagtacagcgacgtgaagattactacgctgccgccagctaaacgcgtttacggtggcgaagcggatgcagccgataaggcggaagcagccaataagaaggagaaggcgaatggctgagatgaaaaacctgaaaattgaggtggtgcgctataacccggaagtcgataccgcaccgcatagcgcattctatgaagtgccttatgacgcaactacctcattactggatgcgctgggctacatcaaagacaacctggcaccggacctgagttaccgctggtcctgccgtatggcgatttgtggttcctgcggcatgatggttaacaacgtgccaaaactggcatgtaaaaccttcctgcgtgattacaccgacggtatgaaggttgaagcgttagctaacttcccgattgaacgcgatctggtggtcgatatgacccacttcatcgaaagtctggaagcgatcaaaccgtacatcatcggcaactcccgcaccgcggatcagggtactaacatccagaccccggcgcagatggcaaagtatcaccagttctccggttgcatcaactgtggtctgtgctacgccgcgtgcccgcagtttggcctgaacccagagttcatcggtccggctgccattacgctggcgcatcgttataacgaagatagccgcgaccacggtaagaaggagcgtatggcgcagttgaacagccagaacggcgtatggagctgtactttcgtgggctattgctccgaagtctgcccgaaacacgtcgatccggctgcggccattcagcagggcaaagtagaaagttcgaaagactttcttatcgcgaccctgaaaccacgctaaggagtgcaacatgacgactaaacgtaaaccgtatgtacggccaatgacgtccacctggtggaaaaaattgccgttttatcgcttttacatgctgcgcgaaggcacggcggttccggctgtgtggttcagcattgaactgattttcgggctgtttgccctgaaaaatggcccggaagcctgggcgggattcgtcgactttttacaaaacccggttatcgtgatcattaacctgatcactctggcggcagctctgctgcacaccaaaacctggtttgaactggcaccgaaagcggccaatatcattgtaaaagacgaaaaaatgggaccagagccaattatcaaaagtctctgggcggtaactgtggttgccaccatcgtaatcctgtttgttgccctgtactggtaaggagcctgagatgattaatccaaatccaaagcgttctgacgaaccggtattctggggcctcttcggggccggtggtatgtggagcgcaattattgcgccggtgatgatcctgctggtgggtattctgctgccactggggctgtttccgggtgatgcgctgagctacgagcgcgttctggcgttcgcgcagagcttcattggtcgcgtattcctgttcctgatgatcgttctgccgctgtggtgtggtttacaccgtatgcaccacgcgatgcacgatctgaaaattcacgtgcctgcgggcaaatgggttttctacggtctggctgctatcctgacagttgtcacgctgattggtatcgttacaatctaacgtatcgccaatgtaaatccggcccgcctatggcgggccgttttgtatggaaaccagaccttatgttcaaaacgacgctctgcgccttattaattaccgcctcttgctccacatttgctgcccctcaacaaatcaacgatattgtgcatcgcacaattaccccgcttatagagcaacaaaagatccccggtatggcggtggcggtaatttatcagggtaaaccttattactttacctggggctatgcggacatcgccaaaaagcagcccgtcacacagcaaacgttgtttgagttaggttcggtcagcaaaacatttacgggcgtgcttggtggcgacgctattgctcgaggggaaatcaagttaagcgatcccgcaacaaaatactggcctgaacttaccgctaaacagtggaatgggatcacactattacatcttgcgacctacaccgctggcggcctgccattgcaggtgccggatgaagtgaaatcctcaagcgacttgctgcgcttctatcaaaactggcagcctgcatgggctccaggaacacaacgtctgtatgccaactccagtatcggtttgttcggcgcactggctgtgaagccgtctggtttgagttttgagcaggcgatgcaaactcgtgtcttccagccactcaaactcaaccatacgtggattaatgtacctcccccagaagaaaagaattacgcctggggatatcgcgaaggtaaggcagtgcatgtttcgccaggggcgttagatgctgaagcttatggtgtgaagtcgaccattgaagatatggcccgctgggtacgaagcaatatgaatccccgtgatatcaacgacaaaacacttcagcaagggatacaactggcacaatctcgctactggcaaaccggcgatatgtatcagggcctgggctgggaaatgctggactggccggtaaatcctgacagcatcattaacggcagtggcaataaaattgcactggcagcacaccctgtaaaagcgattacgcccccaactcctgcagtacgcgcatcatgggtacataaaacaggggcaaccggcggatttggtagctatgtcgcgtttattccagaaaaagagctgggtatagtgatgctggctaacaaaaactatcccaatccagcgagagtcgccgccgcctggcagattctcaacgctctacagtaaaatttcatcgggtccgaattttcggaccttttctgcgcttttccttgctgtcatctacacttagaaaaaaaccagtaaggaaacatttatgcgcctgctccctctcgttgccgcagcgacagctgcatttctggtcgttgcctgcagttctcctacgccgccgcgtggcgtaacagtagtgaataatttcgacgcaaaacgttatctcggtacctggtatgagattgcccgttttgatcaccgttttgaacgtggactggaaaaagtcaccgcaacatacagtctgcgtgatgacggcggcctgaatgtcatcaataaaggctataaccctgacagagaaatgtggcagcagagtgaagggaaagcgtactttaccggcgcaccaacacgcgctgcgctgaaagtgtcattctttggtcctttctatggcggttataacgtcattgcacttgatcgggaataccgccatgcgctggtttgcggcccggaccgcgactacctgtggatactctcccgcacgccaaccatttctgacgaagtgaaacaggagatgctggcagtcgcgacccgggaagggtttgatgtcagtaagtttatttgggtacagcagcccggtagttagtgagtgctgagtttcagaccaataatccccaatacgattaacgccagactcgccaggcgcatcgggttagcggactcaccgagcagcacaatgccggtgatggccgcgccgactgcgccaatacccgtccacacggcataagccgtccctaccggtaacgatttcatcgcccaggcaagtagcgccatactgactatcatcgccgtcacggtaataacactcggcgtcaaacggctaaagccgtgggtatatttcaggccaacggcccataccacttccagcagaccagcaataactaagataatccaggacatatcaggctccggagaattggggccgtccccggtgaaaagaggcgtttgcaggtcgtcctgcaaagctgatggttgaacggatattttgccaggtggcaggggaatttcaactattacctttgtgactatcgcaaaaaaacaaacggcacgacataactgtcgtaccgttattgcttattgctgcgctttcgttgctgcaccagaaatcgcgttaccgc

SEQ ID NO: 199 - DNA, 33325 bp, Escherichia coli
  source 1..33325: mol_type = genomic DNA
aatatttggtgagcatccacagcgagcgttcaaatatatcgaacaaggactttcgaaagaacaaattctggaaaaaactgggctatcgcttggcgtaaaagacgccagtctggccattgaagaaggcgagatatttgtcatcatgggattatccggctcgggtaaatccacaatggtacgccttctcaatcgcctgattgaacccacccgcgggcaagtgctgattgatggtgtggatattgccaaaatatccgatgccgaactccgtgaggtgcgcagaaaaaagattgcgatggtcttccagtcctttgccttaatgccgcatatgaccgtgctggacaatactgcgttcggtatggaattggccggaattaatgccgaagaacgccgggaaaaagcccttgatgcactgcgtcaggtcgggctggaaaattatgcccacagctacccggatgaactctctggcgggatgcgtcaacgtgtgggattagcccgcgcgttagcgattaatccggatatattattaatggacgaagccttctcggcgctcgatccattaattcgcaccgagatgcaggatgagctggtaaaattacaggcgaaacatcagcgcaccattgtctttatttcccacgatctcgatgaagctatgcgtattggcgaccgaattgccattatgcaaaatggtgaagtggtacaggtcggcacaccggatgaaattctcaataatccggcgaatgattatgtccgtaccttcttccgtggcgttgatattagtcaggtattcagtgcgaaagatattgcccgccggacaccgaatggcttaattcgtaaaacccctggcttcggcccacgttcggcactgaaattattgcaggatgaagatcgcgaatatggctacgttatcgaacgcggtaataagtttgtcggcgcagtctccatcgattcgcttaaaaccgcgttaacgcagcagcaaggtcttgatgcggcgctgattgatgcgccgttagcagtcgatgcacaaacgcctcttagcgagttgctctctcatgtcggacaggcaccctgtgcggtgcccgtggtcgacgaggaccaacagtatgtcggcatcatttcgaaaggaatgctgctgcgcgctttagatcgtgagggggtaaataatggctgatcaaaataatccgtgggataccacgccagcggcggacagtgccgcgcaatccgcagacgcctggggtacaccggcgactgcaccgactgacggcggtggtgctgactggctgaccagtacgcctgcgccaaacgtcgagcattttaatattctcgatccgttccataaaacgctgatcccgctcgacagttgggtcactgaagggatcgactgggttgttacccatttccgtcccgtcttccagggcgtgcgcgttccggttgattatatcctcaacggtttccagcagttgctgctgggtatgcccgcaccggtggcgattatcgttttcgctctcatcgcctggcagatttccggggtcggaatgggcgtggcgacgctggtttcgctgattgccatcggcgcaatcggtgcctggtcgcaggcaatggttactctggcgctggtgttaaccgccctgctgttctgtatcgtcatcggtttgccgttggggatctggctggcgagaagtccgcgagcggcgaaaattattcgtccactgcttgatgccatgcagaccacgccagcgtttgtttatctggtgccaatcgtcatgctatttggtatcggtaacgtgccgggcgtggtggtgacgatcatctttgctctgccgccgattatccgtctgaccattctggggattaaccaggttccggcggatctgattgaagcctcgcgctcagtcggcaccagcccgcgccagatgctgttcaaagttcagttaccgctggcgatgccgaccattatggcgggcgttaaccagacgctgatgctggccctttctatggtggtcattgcctcgatgattgccgtcggcgggctgggtcagatggtacttcgcggtatcggtcgtctggatatggggcttgccaccgttggcggcgtcgggattgtgatcctcgccattatcctcgatcgcctgacgcaggccgttgggcgcgactcacgcagtcgcggcaaccgtcgctggtacaccactggccctgttggtctgctgacccgcccattcattaagtaactctgcacttgcccggtgacgccgggcattatcaccctgccaaaaaaaggaataacaatgcgacatagcgtactttttgcgacagcgtttgccacgcttatctctacacaaacttttgctgccgatctgccgggcaaaggtattactgttaatccagttcaaagcaccatcaccgaagaaaccttccagacgctgctggtcagtcgtgcgctggagaaattaggttataccgtcaacaaacccagcgaagtggattacaacgttggctacacctcgcttgcttccggcgatgcaaccttcaccgccgtgaactggacgccactgcatgacaacatgtacgaagctgccggtggcgataagaaattttatcgtgaaggggtatttgttaacggcgcggcacagggttacctgatcgataagaaaaccgccgaccagtacaaaatcaccaacatcgcacaactgaaagatccgaagatcgccaaactgttcgataccaacggcgacggaaaagcggatttaaccggttgtaaccctggctggggctgcgaaggtgcgatcaaccaccagcttgccgcgtatgaactgacccataccgtgacgcataatcaggggaactacgcggcgatgatggccgacaccatcagtcgctacaaagagggcaaaccggtgttttactacacctggacgccgtactgggtgagtaacgaactgaagccgggcaaagatgtcgtctggttgcaggtgccgttctccgcactgccgggcgataaaaacgccgataccaaactgccgaatggtgcgaattatggcttcccggtcagcaccatgcatatcgttgccaacaaagcctgggccgagaaaaacccggcagcagcgaaactgtttgccattatgcagttgccagtggcagatattaacgcccagaacgccattatgcatgacggcaaagcctcagaaggcgatattcagggccacgttgatggctggatcaaagcccaccagcagcagttcgatggctgggtgaatgaggcgctggcagcgcagaagtaatttttattcaggcggataaggcgtttttgcctcatccgccgctctgtacacaatgcctgatgcgacgctgacgcgtcttatcatgcctacaaaatacactcattccgtatggcggataaggcgttttcgccgcatccgccgttctgtgcacaatgcctgatgcgacgctggcgcgtcttatcatgcctacaaaccacatcgcacatttcaacaagctatctttcatcccatattcatcaacatccgctattattgatttccagcttaatcatcacctgatgaacaaaaataatgactaaacctaatcatgagcttagcccggcgctgatcgtgctgatgtctatcgccaccggtctggcggtcgccagtaactattacgctcagccattgctcgacaccatcgcgcgtaacttttccctttccgccagttcggcaggctttattgttaccgccgcgcaattgggctatgcagcaggtctgctgtttcttgttcccctcggtgatatgtttgaacgccgccgcctgattgtctcgatgaccttactggcggcaggcggcatgttaatcactgccagcagtcagtcgctggcgatgatgatcctcggtacggcattaaccggtttattctctgtcgtggcacaaattctggttccgctggcagcgacgctggcttcaccggacaaacgcggcaaagtggttggcactattatgagcggtctgctgttggggatcttgctggcacggacagttgccggattgctggcgaatctcggcggctggcgcaccgtcttttgggttgcttcggtgttaatggcactgatggcgctggcattatggcgtggtctgccacaaatgaaatcagaaacccacctcaactacccacagttgttgggttccgttttcagtatgtttatcagcgataaaattctgcgtacccgcgcgttgctgggctgcctgacctttgccaatttcagcattctctggacctcaatggcctttttgcttgccgctccaccttttaactacagcgatggtgtaattggtctgtttggacttgcgggagctgccggagcgttgggcgctcgtccggcgggcggttttgccgataagggcaaatcgcaccacaccacaactttcggtctgctgctgctattactttcatggctggcgatctggtttggtcacacttccgtactggcgttgattatcggaatcctggtgctggatctcaccgtgcagggcgtgcatatcactaaccagacggtaatttatcggatacatcctgatgcgcgtaatcgcctgaccgcaggttacatgactagctactttattggcggtgccgccggttcgctaatttcagcctcagcctggcaacatggcggttgggctggcgtttgtctggctggcgcgacgattgccctggttaacttactggtctggtggcgaggttttcatcgtcaggaagccgcaaattaagcaatcagcaaccgttttcgtggctttacacttataagggtgttaagaagcccatcagtctgataaggttaagatattcattcagtctatttataatattaacaatcgttaagcgtacactctatggaaagccctactccacagcctgctcctggttcggcgaccttcatggaaggatgcaaagacagtttaccgattgttattagttatattccggtggcctttgcgttcggtctgaatgcgacccgtctgggattctctcctctcgaaagcgtttttttctcctgcatcatttatgcaggcgcgagccagttcgtcattaccgcgatgctggcagccgggagtagtttgtgggttgctgcactgaccgtcatggcaatggatgttcgccatgtgttgtatggcccgtcactgcgtagccgtattattcagcgtctgcaaaaatcgaaaaccgccctgtgggcgtttggcctgacggatgaggtttttgccgccgcaaccgcaaaactggtacgcaataatcgccgctggagcgagaactggatgatcggcattgccttcagttcatggtcatcgtgggtatttggtacggtaataggggcattctccggcagcggcttgctgcaaggttatcccgccgttgaagcagcattaggttttatgcttccggcactctttatgagtttcctgctcgcctctttccagcgcaaacaatctctttgcgttaccgcagcgttagttggtgcccttgcaggcgtaacgctattttctattcccgtcgccattctggcaggcattgtctgtggctgcctcactgcgttaatccaggcattctggcaaggagcgcccgatgagctatgaggttctgctgcttgggttactggttggcgcggcgaattattgcttccgctatttgccgctgcgcctgcgtgtgggtaatgcccgcccaaccaaacgtggcgcggtaggtattttgctcgacaccattggcatcgcctcgatatgcgctctgctggttgtctctaccgcaccagaagtgatgcacgatacacgccgtttcgtgcccacgctggtcggcttcgcggtactgggtgccagtttctataaaacacgcagcattatcatcccaacactgcttagtgcgctgacctacgggctcgtctggaaagtgatggcgattatataatccacaagaatcatttttctaaaacaatacatttactttatttgtcactgtcgttactatatcagctgaaattaatgaggtcatacccaaatggatagttcgtttacgcccattgaacaaatgctaaaatttcgcgccagccgccacgaagattttccttatcaggagatccttctgactcgtctttgcatgcacatgcaaagcaagctgctggagaaccgcaataaaatgctgaaggctcaggggattaacgagacgttgtttatggcgttgattacgctggagtctcaggaaaaccacagtattcagccttctgaattaagttgtgctcttggatcatcccgtaccaacgcgacgcgtattgccgatgaactggaaaaacgcggttggatcgaacgtcgtgaaagcgataacgatcgccgctgcctgcatctgcaattaacggaaaaaggtcacgagtttttgcgcgaggttttaccaccgcagcataactgcctgcatcaactctggtccgcgctcagcacaacagaaaaagatcagctcgagcaaatcacccgcaaattgctctcccgtctcgaccagatggaacaagacggtgtggttctcgaagcgatgagctaacgcgtcatctcgctcaaaaatccagatttataaaagaaaaaatgactggccagcatcgcaacatgctggcctttttggcaagcaggtcggctcagccgatgagttaagaagatcgtggagaacaatatgagcgcaaatgcggagactcaaaccccgcagcaaccggtaaagaagagcggcaaacgtaagcgtctgctcctccttctcaccttgctctttataattattgccgtagcgatagggatttattggtttttggtactgcgtcatttcgaagaaaccgatgacgcatacgtggcagggaatcagattcaaattatgtctcaggtgtctggcagcgtgacgaaagtctgggccgataacaccgattttgtaaaagaaggcgatgttctggtcactctcgacccgacagatgctcgccaggcgtttgaaaaagccaaaactgcactggcttccagcgttcgccaaacccaccagctgatgattaacagcaagcagttgcaggcgaatattgaggtgcagaaaatcgccctcgcgaaagcacaaagcgactacaaccgccgtgtgccgctgggcaatgccaacctgattggtcgcgaagagctgcaacacgcccgcgacgccgtcaccagtgcccaggcgcaactggacgtcgctattcaacaatacaatgccaatcaggcgatgattctggggactaaactggaagatcagcctgccgtgcaacaggctgccaccgaagtacgtaacgcctggctggcgctggagcgtacccgtattgtcagtccgatgactggttatgtttcccgtcgtgccgtgcaaccgggtgcgcaaattagcccaacgacgccgctgatggcggtcgttccagccaccaatatgtgggtggatgccaactttaaagagacgcagattgccaatatgcgcatcggtcagccggtcaccatcaccaccgatatttacggcgatgatgtgaaatacaccggtaaagtggttggtctggatatgggcacaggtagcgcgttctcactgcttccggcgcaaaatgcgaccggtaactggatcaaagtcgttcagcgtctacctgtgcgtatcgaactggaccagaaacagctggagcaatacccgctgcgcattggtttgtccacgctggtgagcgtcaataccactaaccgtgacggtcaggtactggcaaataaagtacgttcaacaccggtcgcggtaagtaccgcgcgtgaaatcagcctggcacctgtcaataaactgatcgacgatatcgtaaaagctaacgctggctaatccagaggtgcgtgtgatgcaacagcaaaaaccgctggaaggcgcgcaactggtcattatgacgattgcgctgtcactggcgacattcatgcaggtgctggactccaccattgctaacgtggcgatccccactatcgccgggaatctgggctcatcgctcagccagggaacgtgggtaatcacttctttcggggtggcgaatgccatctcgatcccgcttaccggctggctggcaaagcgcgtcggggaagtgaaactgttcctttggtccaccatcgcctttgctattgcgtcgtgggcgtgtggtgtctccagcagcctgaatatgctgatcttcttccgcgtgattcaggggattgtcgccgggccgttgatcccgctttcgcaaagtctattgctgaataactacccgccagccaaacgctcgatcgcgctggcgttgtggtcgatgacggtgattgtcgcgccaatttgcggcccgatcctcggcggttatatcagcgataattaccactggggctggatattcttcatcaacgtgccgattggcgtggcggtggtgttgatgacactgcaaactctgcgcggacgtgaaacccgcaccgaacggcggcggattgatgccgtggggctggcactgctggttattggtatcggcagcctgcagattatgctcgaccgcggtaaagagctggactggttttcatcacaggaaattatcattcttaccgtggtggcggtggtggctatctgcttcctgattgtctgggagctgaccgacgataacccgatagtcgatctgtcgttgtttaagtcgcgcaacttcaccatcggctgcttgtgtatcagcctcgcgtatatgctctacttcggcgctattgttctgctgccgcagttgttgcaggaggtctacggttacacggcgacctgggcaggtttggcctctgcgccggtagggattattccggtgatcctgtcgccgattatcggccgcttcgcgcataaactggatatgcggcggctggtaaccttcagctttattatgtatgccnnnnnnnnnntctactggcgtgcctatacctttgaaccaggtatggattttggcgcgtcggcctggccgcagtttatccaggggtttgcggtggcctgcttctttatgccgctgaccaccattacgctgtctggtttgccaccggaacgactggcggcggcatcgagcctctctaactttacgcgaacgctggcggggtctatcggcacgtcgataaccacgaccatgtggaccaaccgcgagtcgatgcaccatgcgcagttgactgagtcggtaaacccgttcaacccgaatgcccaggcgatgtacagtcaactggaagggcttgggatgacgcaacagcaggcatcaggctggattgcccagcagatcaccaatcaggggctgattatttccgccaatgagatcttctggatgtcagccgggatattcctcgtactgctggggctggtgtggtttgctaaaccgccatttggcgcaggtggcggcggaggcggtgcgcactaagtacaactaagccagttcatttgaactggcttttttcaattaattgtgaagatagtttactgactagatgtgcagttcctgcaacttctctttcggcagtgccagttcttcgttgctgttgatgcgtacgtcacgttccagaatgctacgcgcaatatcctgcgcttcctgcaacgagtgcatctggtaagtgccacactggtagacattcagttccgggatctgattctgatcctgcactttcagcacgtcttccattgccgctttccaggcatcagcaacacgctgctcatctggcgtaccaatcagactcatataaaaaccggtgcggcagcccattggcgagatatcgataatctctacacccttaccgttaagatggttacgcataaaaccagcaaacaggtgctccagggtatggatccctctttctggcatcacttctttgttcggcacgcagaagcgcagatcgaacacggtgattgcgtcgccatgcggggtgttcattgttttcgccacccgaactgcaggcgcttccatccgggtatgatcgactgtgaagctatctaacaacggcatttagccacctccggtaattttttttaaaattttctgaactctttcttcccaggcgagtctgagtatatgaaagacgcgcatttgttatcatcatccctgaattcagagatgaaattttggccactcacgagtggcctttttcttttctgtcaggcgtgtttttccagccacaccgcaaacggttcggtatcagcggtttccatttcctgctgacggcgttcagatgcctcgcgctcggctacaaaatcctcttcgcgcagaatttccagcggctcttcacgcagcagattacggtaggcttctgcaaacgctttgcctgttccgccaataccagtatcaatcatagaccttaagatacgggcagagaaagtcagatcgggattatcgaagcaggcaaccagttcatcacacactttctgatacgcttcgccgccgttaatgctatccagcgtttgcgcgacgcgtttcagatcgcggaacagatctttacccacctgcagtaacgggaactgcgcggtttcgcagccgatacccagcgtcaggcccggtttgcgaccttcaaggatcacccggttccagttaacgcgcgtacaggcaagttcgctactgctcatttccggtgcatcagccagcgcacaccagaccataaacaggtcgaggaatcgcacctgctgttcatctacaccaatcggcgagaacgggttgatgtccagcgaacgcacttcaatatattcaatgccgccacgtaacagcgcatcagaaggtgactcgccgctgcgggtaacgcgttttggacgaatcggcgcatacagttcgttttcaatctgcagcacgttgctattgatttgcagcctcttaccgtctttctcaaagccaatcttcgcagactcttacgatggcgttttgattgcctgtttaaggcccgctacgtactcgtaaagatcgttgaaggtaataccaagattgctttgcgatttattggtatagccgagatcgctcaaacgaagagaggtcgcatacggcaggtaatacataccgcactcggttttctcaaacggcagcgacgttggttttccttgcaggaaagaagaacaaatcgccggagatgcaccaaacagataaggaatgacccaaccgaaacgatagtaattgcggataacgcggaaatagcccgcagaaattttctctttggcatcagcgcccgagatatcaccgcacttcgcttgccagaatgccattggcaaagagaaattgtagtgcacgccggaaatggtttgcatcagcgcgccgtagcgatttttcagcccttcacgatacagcgttttaaagcgtccggtgttagaagtgccgtactgtgccagttcgatgtcctgaccttctgcgatgtagcatggcatacttaacggccacatccgctcatcacccatattgcgcgccgtataacgatgcagatcgcgcataaaggtcagcatatgttcaatatcaccatccactggtgtaatgaattccagcaatgcttccgcaaaatcggtagtaatccatttgtgcgtcagtgcggaacctaatgcttcaggatgacctgttgttgccagtgtgccatcagcattaacacgcaaagtttcgcgctccagcccacgctgtatcccctttaacgcctgaggatgtttttccagccaggccagcgcctgtgatacgtccgggatcaaattgacctcccgcctgtcaaaatcgttttaattagcataactgtaatggtgaccatatgtgcaggcctacaattagtgccaccacatcatgccctgaacggtcgctgctgcaactgcaacatagcgtaacgctttaccaaggcacaaaaaaaagattactggcccccaggagatgcgcatccatcccgctaacagacacagtaaatcgccaaccacgggcatccagcttaataatagcgtgactgcaccatagcgtttcagccagccggtagctttctcttgccagcgcgatgttttacgcaatggaaagaaacgcccaaggataacgttagttaaccctccaaggctattacccattgttgctgttaaaactaaaacccagggataactgatcccggaaagcaacattgccaccagcacgacttcggagttgccgggtaatagtgtagcgctgagaaaactactggcaaacaacgagaaaagcgataacgcttcactcacagcaagcgaacatccacggcgtccatgcctgctgcacgggccgcctgaataccgaaatcggcatcttcaaagaccacacactgcgtcggttgcacgcccatacgctgcgcgcacaacaaaaatgtgtctggcgcgggtttatggtgtttgacgtgatcagcagcgacgacggcgtcaaaataacggcgtaatcccaggtgcgccagcaatgcctcagcgatggcgctttcactccccgttcctacagccattgggcgacgaccatgccaacttttcaccacttcaacaagaggaagcggctcgacactatccagcagcatacttcttactgcttctgttttttcacgcgctaacgcatgcgggtcgagatcggcctgattcagctcaataattgcctgagcaatacgccaggtgggcgatccattaagcgcaatcattgcctgaacatcgtactgaagaccgtagtgccctaatacttcgcgccacgctttacggtgcgtaggctccgtatccaggattgtgccatccatatcaaaaattaaacctgcataacgctcgtacatggtcttctcgcaagtcgaaaaatatgacgctactttagcgtaattgcttgattttgtcgctgatggcgaaggagaagaaaattcaggaaatggataaagtagttatttagaaatgagatatttttgaaggaaatttttgggagaagatggtgcatccgggaggattactcactggcgttcgcccttcgggccgttgctgacgcaacgttatcctccctggtgcctgcggttaataccgctatctcttcgataccttcattgctgaaggttacggagaatatggtgcatccgggaggattcgaacctccgaccgctcggttcgtagccgagtactctatccagctgagctacggatgcatcgggaaaatttattttactgctgatattgatatcgctactaaagccatatcaagtaagagatggtgcatccgggaggattactcgccttgcggctcgcccttcgggccgttgctaaagcaacgttatcatccctggtgcctgcggttaattccgctacctcttcgataccttcattgctgaagatttcggagaatatggtgcatccgggaggattcgaacctccgaccgctcggttcgtagccgagtactctatccagctgagctacggatgcatcgggaaaatttatnnnnnnnnnnnnnnnnnnnnnnnnnnnnnnnnnnnnnnnnnnnnnnnnnnnnnnnnnnnnnnnnnnnnnnnnnnnnnnnnnnnnnnnnnnnnnnnnnnnntttactgctgatattgataccgctactaaagccatatcaagtaagagatggtgcatccgggaggattcgaacctccgaccgctcggttcgtagccgagtactctatccagctgagctacggatgcatcgggaaacttactttactgcagattttttgataccgctactaaagccgtatcaagtaagagatggtgcatccgggaggattactcgccttgcggctcgcccttcgggccgttgctaaagcaacgttatcctccctggtgcctgcggttataccgccacctcttccataccttcatcgctgaaagtacgtagaatatggtgcatccgggaggattcgaacctccgaccgctcggttcgtagccgagtactctatccagctgagctacggatgcaaatggcggtgaggcggggattcgaaccccggatgcagcttttgaccgcatactcccttagcaggggagcgccttcagcctctcggccacctcaccacacgcctcttacgagtgcttcgaagaacttgtttatcgctcatcgtcgctgcgtggcgcacatattactttctgagacttataagtcaaacaatttttcctacacttttatcgtttgcacacttcacgttcaattagtctgtaaaaacgtcaaaaagagtgttttatcaacagaaaaatggaggtctgacagatagtagtaatgcaaaaaaatggagacttaagttgaatgaacgggagtaaagcgaaaagactatagagtgaaggagaaattttgagggtgcgtctcaccgataaagatgagacgcggaaagattagtaactggactgctgggatttttcagcctggatacgctggtagatctcttcacggtgaacagaaacttccttcggggcatttacgccaatacgtacctggttgccctttacccctaaaactgtcacggtgacctcatccccaatcatgagggtctcaccaactcgacgagtcagaatcagcattctttgctccttgaaagattaaaagagtcgggtctctctgtatcccggcattatccatcatataacgccaaaaagtaagcaatgacaaacacattacatgtaagcagtcatggcattacattctgttaaacctaagtttagccgatatacacaacttcaacctgactttatcgttgtcgatagcgttaatgcgaatgccgtgaagcgagtccacggcattgcctgacgcttatattattgcaatttcgcgctgacccagcctttcacactggctaacgctgcaggtaaggccgcagcatccgtaccaccggcttgcgccatgtcaggacgtccaccacccttgccgcccacctgctgagcgaccataccaatcagttcccctgctttcacacgatctgtgacgtccttagatacgcctgcaatcagagaaaccttaccttcggctaccgttgccagcacgataattgtcgaccccagctgattttttaaatcgtcaaccatggtacgcaacattttcggctcaacaccgctaagctcgctaaccaacagcttaacaccattaacatcaattgccttactggaaagatttgcgctctcctgtgcggcagcttgttctttaagctgttgtagttctttttctaactgacgcgtacgttccagtactgagcgcactttatccgccagattattgctatcgcctttcagcagatgcgcgacttcgcttaagcgatcgctgtctgcatgaacggtggtgatagcgccttctccggttaccgcttcgatacgacgaacgcctgcagcagtacccgattcagagatgatgcggaacagaccaatatcaccagtgcggctggcgtgagtaccgccacacagctcggtggagaaatcgcccatgctcagcacgcgtacacgctcatcatacttctcgccgaacagcgccatcgcacctttcgctttcgccgcttcgagatccatgatgttggtttcgatcggcaaattgcgacgaatctgtgcgttcaccaggtcttcgaccgcacgaatctcttccggtttcatcgcttcgttgtgtgagaagtcgaagcgcagcaccttgtcgttaaccagtgaacctttctgcgatacatgagtccccagaacctggcgcagcgcagcgtgcatcaggtgcgttgcggagtgattcagacgaatacgggcgcgacgagcctcatcaacatcagcctgcacagcgtcgcccactttcagagaacccgcagcaagtttaccgatgtgaccaatcgcctggccgtatttctgcgtatcttccaccgcgaaggagaagttagcgcctttcagttcgcctttatcaccaacctgaccgccggattccgcatagaatggtgtttgatccagcacgaccacagcttcctggcctgcattgatggcatcaaccgctttaccatcaacaaacagcgcggtcactttgccgttcagttccagatggtcatagcctttaaattcagatgcactatcaacacggatcattgcgttgtaatcggcaccaaagccgctggcttcgcgcgcgcgacgacgctgctcttccattgctgcttcaaaaccagcttcgtcaactttgatgttgcgctcacgacaaacatcagccgtcaggtcaaccgggaagccataggtgtcgtacagacggaaagccgtttcaccatccagcgtatcaccagaaagttttgccagctcttcatccagcaacgccagaccgcgctccagagtacgggcaaactgctcttcttcagtcttcagcacctgctcaacctgcgcctgctggcgtttcaggtcttcacccgcagagcccataacgtcgatcagcggaccaaccagtttgtagaagaaggtttctttcgcgccgagcatattgccgtgacgcactgcgcgacgaatgatacgacgcagtacataaccacggttttcattggacggcattacgccatccgcgatcaggaacgcacaagaacgaatgtggtcagcgattacgcgcagcgatttattgctcagatcggtcgcgccagtgactttcgctaccgcctggatcaacgtgcggaacaggtcgatgtcatagttagagttaacgtgttgcagcaccgcagcaatacgctccagacccataccggtatctacagacggcttcggcagcggttccatcgtgccatctgcctggcggttgaactgcatgaagacgatgttccagatctcaatgtagcggtcgccgtcttcttccggacttcccggagggccaccccaaatgtggtcgccgtgatcgtagaagatttcggtgcacgggccgcacggaccagtgtcacccatctgccagaagttnnnnnnnnnnggcgcacctttgttatcgccgatgcgaataatacgttcgcgcgggatcccgacttctttttcccagatttcgtaggcttcgtcgtcgctttcatagacggtaacccacagacgctctttcggcagggcaaaccatttttcgctggtcagcagttcccatgcaaactgaatggcatcgtgtttgaaatagtcgccgaagctgaagttgcccagcatttcgaagaaggtatggtgacgcgcggtgtaaccgacgttttccaggtcgttgtgtttaccacccgcacgcacgcagcgttgggaagtggtagcgcgggaataattacgcttgtcgagcccaaggaacacatccttgaactggttcatcccggcgttggtaaacaacaaagttgggtcgttatggggtaccagggagctgctggcaactacctgatgtcccttactatggaaaaagtcgagaaacgcctgacggatctcagcggtgctcttgctcataattatcctgaaatcaagctaacgaaatatcgccaccagctccagcgtgtcttaaccgccgggctggtaactgaaaagtgggaataagataagttttcttgactgggaagtaaaataccgtatgcgttcagtcggcaaaatttcgccaaatatcctggatatcttccatcagatagccacgatagagcagaaaacgctggatcttaactttttctgaaaagacagttggcaaaggttcaccatattttcgcgtcgcctgatcgcgcgccagtgcgcaccagtcgatgtcacattcacgcatcgctttttctgtcgcttcgcgggaaatacctttctgattcagttcctgacgaatacgtgcaggtccataacctttgcggctacggctggcgataaagcgcgcaacaaatcggctgtcatcgagatagccatgttcatggcaccaggcaataacgcgctcgtaatcttctgccgtagcatcaatctcttctgggccatttttgcccataatcggtgccacgagtttacgtcgcagttcttgctcactgtgatcgcgcaccgccagaatgcgtaccgcacgatccaacaggcgagcatatgccgggcgacgggacgttgattctgtcatggcatatccttacaacttaaaaaagcaaaagggccgcagatgcgacccaggttttgctgataaacagatttaatagtcaatgagtgtgcagaatgttcccgcaggcccaattcgttagaggatcgaggtgagagtaatttttcacgccagtgctggcctgttcccctcaccctaaccctctccccaaaggggcgaggggaccgtccgtgcacacattatctattatcatcaataacgaacgattaaaaatcttcgttagtttctgctacgccttcgctgtcatctacagagaaatccggcgttgagttcgggttgctcagcagcaactcacgtactttcttctcgatctctttcgcggtttccgggttatctttcagccaggcagttgcattcgctttaccctgaccgatcttctcacctttgtagctgtaccacgcgcctgctttctcgatcagcttctcttttacgcccaggtcaaccagttcgccgtagaagttgataccttcgccgtagaggatctgaaattcagcctgtttaaacggtgcagcgattttgttcttcaccactttcacgcgggtttcgctacccaccacgttttcgccctctttcaccgcgccgatacgacggatgtcgagacgaacagaggcgtagaatttcagcgcgttaccaccggtagtggtttccgggttaccgaacatcacaccaattttcatacggatctggttgatgaagatcagcagcgtgttggactgcttcaggttacccgccagcttacgcatcgcctggctcatcatacgtgccgcaaggcccatgtgagagtcgccgatttcgccttcgatttccgctttcggcgtcagtgccgccacggagtcaacgacgataacgtctactgcgccagaacgcgccagggcgtcacagatttccagtgcctgctcgccggtgtccggctgggagcacagcaggttatcgatatcgacgcccagtttacgtgcgtagattgggtccagcgcgtgttcagcatcgataaacgcacaggttttaccttcacgctgcgctgcggcgatcacctgcagcgtcagcgtggttttaccggaagattccggtccgtagatttcgacgatacggcccatcggcagaccacctgccccaagcgcgatatccagtgaaagcgaaccggtagagatggtttccacatccatggaacggtcttcacccaggcgcatgatggagcctttaccaaattgtttctcaatctggcccagtgctgccgccaacgctttctgtttgttttcgtcgatagccatttttactcctgtcatgccgggtaataccggatagtcaatatgttctgttgaagcaattatactgtatgctcatacagtatcaagtgttttgtagaaattgttgccacaaggtctgcaatgcatacgcagtagcctgacgacgcaccgcatcacggtcaccgctgaagcattcccgccgggtaatgccttcaccgcgggcagtggcaaaagcaaaccagacggtgccgacaggcttctcttcactgccgccatccggcccggcgataccactaatagacacggcataatcagcacgagccgctttcagtgcacctatcgccatttccaccacgacgggttcactcaccgcgccatgctgcgccagcgtctcttcgcgtacgccgatcatctgcgctttggcttcgttactgtaggtgacaaatccgcgttcaaaccaggcggagctaccggcaatatcggtaatcactttcgctacccaaccaccggtacaagactcggcagttgttacggttgcgccacgggctttcagcgcctgcccaacctgttcacttaactgcatcagttcactgtcagtcatcacaacctctgtcagtcaaaaatttatgccggacaagatagcactttcgtcaggaagatggtgttggcgttgcaattttacgaggaggattcagaaaaaagctgattagccagagggaagctcacgcccccctcttgcaaatagttactgcacgcgcgccagcgccacggcttgtcctaactgccagaccgccattgcgtaatgggtgctgtggttataacgggtaatggtgtagaagttcggcagaccgtaccagtactggtaaccggtaccgacatccagacgcagcaggctggcttgttgatggttgcccagcggctgctgtggcgttaaacctgccgtggcaagctgcgaaatgctgtacctggttttgaagccatttggcaagcctggagcctgaccgtttgccattaccgcgacctgatcgcctttcacccagccgtgcgctttgaaatagttcgccacgctaccgatcgcatcaaccggatcccacaggttgatatgcccgtcgccgctgaaatctaccgcatattggttgtaagacgacggcctaaactgtccgtagcccatcgccccggcaaaggaacctttcagattgagcggatcgtcctgctcgtcgcgcgccatcaacaggaaggtttccagctcgccagagaaatactccgcgcggcgtgggtagttaaatgacagcgttgccagcgcatcgaggatgcgagttttccccatcacgcgcccccagcgggtttcaacgccgataatcccgacgataatttccggcggtacgccatacacctgccacgcgcgattcaacgcatcttcatactgattccagaaaaccacaccgttctgcacgttgtccggcgtaataaattttttgcgataacggagccatgcgccgttcggacctgatggcggtttcaccgatgtggttggtgcctggttatccatcagccgcagtaccgaatccagacgcttcgcctgggagagaatttcctgcaactgctgacgatcgaaaccgtgtttgttcaccattttgtcgatgaactgctgggcattcgggttattagcgaaatcgccgcccatctgcatcacattgtgctgcggctcaagcaggaagccgccagacggcgttccggtggtcgtttcagtctcagtaggttttggcttgctgctacaggcggcaagcaacacaaaaaggggaagcaatgttacataacgacgcttgaacatgaggggtccatttaacagattcaaccaggggcaagtatggtaaagcatcacgccccacacaaggaagcggtagtcactgcccgatacggactttacataactcaactcattcccctcgctatccttttactcaaactttcaaattaaaatatttatctttcattttgagatcaaaataacacttttaaatctttcaatctgattagattaggttgccgtttggtaataaaacaataaatcctgaaggagagaacaatgatagaaaccattactcatggtgcagagtggtttatcgggctgttccaaaagggcggagaggtgtttaccgggatggtgaccggcattcttccgctgttgattagcctgctggttatcatgaacgcactgattaattttatcggtcagcatcgtattgaacgttttgctcaacgttgcgccggtaaccctgtttcccgttacctactgttaccgtgcattggcacgtttgtcttttgcaatccgatgaccttaagcctgggtcgctttatgccggaaaagtacaaacccagctactacgcggcggcctcttatagctgccactcaatgaatggcctcttcccccatatcaaccctggcgaactgtttgtttatcttggcattgccagcggtctgacaacgctgaacctgccacttggcccactggcggtgagttatctgctggttggtctggtcaccaatttcttccgcggctgggtgaccgatctgaccaccgccgtttttgagaaaaagatgggcattcaacttgaacaaaaagttcacctggcaggagcaacatcatgacgcgtattcggatcgaaaaaggaacgggtggctggggcggcccgcttgagctggaagccacgccgggcaaaaaaatcgtctatatcaccgccggtacccggcctgcgattgttgacaaactggcacaacttactggctggcaggctattgacggatttaaagaaggtgaacccgcggaggcggaaattggtgtcgcggtaatcgactgtggcggcacattacgctgcggcatctatccgaaacggcgtattcccaccattaatatccactcgacgggcaagtccggtccactggcgcagtacattgtggaagatatttatgtctctggcgtaaaagaagaaaacatcactgtagtgggtgatgcgacaccacaaccctcttccgtgggccgtgactatgacaccagcaagaaaatcaccgaacaaagcgatggtttactggcgaaggtgggaatggggatgggttctgccgttgccgtgttgtttcaatctggtcgtgacaccatcgacactgtattaaaaaccattctgccgtttatggcattcgtctcggcgctcattggcatcattatggcttctggccttggtgactggattgcccacggtcttgctccgctggcgagccatccactgggtctggtcatgctggcgctcatctgctccttcccactgctttcacctttcctcggcccaggcgcagttatcgcacaggttatcggcgtattgattggcgtgcagattggtctcggcaatattccgccgcatctggctttacctgcactgtttgccatcaacgcgcaggcggcctgcgacttcatcccggtcggtttgtcgctggcggaagctcgtcaggacacggttcgcgtcggtgtcccttctgtactggtgagccgctttttaaccggcgcgccgactgtactgatcgcctggtttgtctccggttttatctatcaatagaggctgaaacatgaccgttatttatcagaccaccatcacccgtatcggcgcgagtgccactgacgccctcagcgaccagatgctcatcacctttcgtgaaggcgcgccagcggacctcgaagagtattgcttcattcattgccacggcgagttgaaaggtgcactccatcccggtttgcaattttcactcgggcagcatcgctatccggtgaccgctgttggcagcgtggcggaagacaaccttcgcgaactgggtcatgtcaccctgcgcttcgatggtttaaacgaagcggaatttccgggcactgtccatgtggcaggccctgtacccgacgatatcgcgccgggatcggttttgaagtttgaatctgttaaggagtaaaaaatgaatcaggttgccgttgtcatcggtggtgggcaaaccttaggcgcgttcctgtgccacggtctggctgccgaggggtatcgcgtcgcggttgtcgatattcagagcgacaaagccgcaaatgtggcacaagaaattaacgccgaatatggtgaaggtatggcgtacggttttggtgctgacgccaccagcgagcaaagcgttctggcgctctctcgtggggtagatgaaatctttggtcgcgtggatttgctggtctatagcgccggaatagcaaaagcagcctttatcagcgacttccagctcggcgattttgaccgttcgctacaagtgaatctggtgggttatttcctgtgtgcccgtgaattttcgcgtttgatgatccgcgacgggattcagggtcgcattattcagatcaactcgaaatccggcaaagtgggtagcaaacacaactctggctacagcgcagcgaaatttggtggcgtcgggctgactcaatcactggcgctggatctggcggagtacggcattacggtgcattcactgatgctcggtaacctgctgaaatcgccgatgttccagtcactgttgccacaatacgcgaccaagctgggtatcaaaccggatcaagtcgagcagtattacatcgacaaagtaccgctcaaacgcggctgcgattatcaagatgtgctgaatatgctgctgttctacgccagtcctaaggcgtcgtactgcaccggacagtcgatcaatgtcaccggcggtcaggtgatgttctgatcaacagcggagatccgttaaggatctccgtgagactatagaatgcctgatgcgctacgctcatcaggcatacaggacttccgccactacattaaggaaaagttatggtatccgcactcatcaccgtcgccgttatcgcctggtgtgcgcaactggccttaggcggctggcaaatttctcgttttaaccgtgccttcgacacactatgccagcaagggcgggttggcgtgggccgttccagcgggcgctttaaaccgcgggtcgtggtcgccatcgccctggacgatcagcagcgcatcgtcgacaccttgtttatgaaaggactgaccgtcttcgcccgaccgcaaaaaattcccgcaattaccggtatgcatgcgggtgatttacagcccgatgtgatctttccccatgatccactatcacagaatgctctatcattggcgcttaaactgaaacgtggataatttcgttgtgaatgttacttgcttgcgaagttatcattttgaaacctaaatcaggtaatcacgcccatgaaaccnnnnnnnnnngccgccattctggagtatctgcaaaagcagggtaaatgctcggttgaagaattggcgcaatactttgacaccacaggcacaaccattcgcaaagatctggtcattctggaacatgccggaaccgtcattcgtacttatggcggagtggtgttgaataaagaggaatccgatccgcctatcgatcataaaacgctcatcaacacccacaagaaagagctgattgcagaagctgccgttagttttattcatgatggcgactcaataattcttgatgctggcagtaccgttttgcagatggtccccctgctctcgcgctttaataacatcacggtgatgaccaacagtctgcatatcgtcaatgcgctatctgaactggataacgaacaaaccatcctgatgccaggcggaacatttcgcaaaaaatcggcctcatttcacgggcaactggcagagaatgccttcgagcatttcaccttcgacaaattattcatgggtactgacggcatcgatctcaatgcgggcgtaaccaccttcaacgaggtctataccgtcagtaaggcaatgtgcaatgccgcgcgcgaagtgattttaatggcggactcatcaaagtttggccgtaaaagccccaacgtagtttgcagtcttgaaagcgtcgataagctgattaccgacgcaggtatcgatccggcgtttcgtcaggcgctggaagagaaagggatcgatgtgatcataaccggagagagcaatgagtgaagcactactgaacgcgggacgtcagacgttaatgctggagttgcaggaagcaagccgtttaccggaacgtctgggcgatgattttgttcgcgccgccaatatcatcctgcactgcgaaggcaaagtggtggtttcgggaattggcaaatcgggccacattggtaagaaaatcgccgcaacgcttgccagtaccggcacaccggctttttttgtccatccggcagaagcactgcacggcgatctggggatgattgaaagccgcgatgtgatgctgtttatctcttactccggtggcgcgaaggaactggatctgattattccgcgtctggaagataaatctatcgcgctgctggcgatgaccggcaaaccgacgtcaccgctgggcctggcggcaaaagcggtgctggatatctccgtagaacgcgaagcctgcccgatgcaccttgcgccgacctccagcaccgtcaataccctgatgatgggtgacgcgctggcgatggcggtcatgcaggcgcgcggatttaatgaagaagattttgcccgctcccacccagccggggcactgggcgctcgcttgctgaataaagtgcatcatctgatgcgccgtgatgacgctatcccgcaggtagcgttaaccgccagcgtgatggatgcgatgctggaactcagtcgcaccggtttggggctggtggcagtatgtgacgctcaacaacaggtacaaggcgtctttaccgacggcgatttacgtcgctggctggttggcggcggcgcactcaccacgccagttaatgaagcgatgacgacaggcggcaccacattacaggcacaaagtcgcgccatcgacgccaaagagatcctgatgaagcgcaaaatcactgccgcaccggtggtggatgaaaacggcaaactcaccggcgcaattaacctgcaggatttctatcaggccgggattatttaatccttcaatcccagacgtttcgccagccgatgcaggttggcgacgtcggtttccagcatccgcgcgcaggcagcccagttgtgatgattttgtgccagtgcctggcgaatggtttcacgctggaacgcttctgtcgcttcacgcaggttttgcttaacaacgggcaccgccgccgcttctggcggcggcaacgtcacctcaggaaaagcaaaatgttgcgcctcaagaatcacttcatcgccgttgcgggtggctctcgacagcactaccgcccgatgaatagcatgttccagttcgcgcacgttccccggaaaacgatagtgttgcagtaaatttcgcgctccggcacttaataccacgcgggagagccccagccgcaaacgacactgctcgcagaaataccccgccagcagaatgacatcatcgccccgctcacgcagcggcggcaccgaaagtggaaacacgctcaggcgatgaaacaagtcagcgcgaaatcgccctgccagcacctcttcgcgtaagtcgcggttagtcgccgccagcacgcgcacatcgacccgcaaactgcggtcatcgccaacgcgctgaatatcgccatactgcaacaccctcagcagcttggcctgcaatgccaacgacaactcgccgatctcatccagaaacagagtgccgttatccgccatttcaaacttcccgctgcggttactgatagcgccagtaaacgctcctttcacatgcccgaacaactcactttccgccacactttccggcagtgcagcacagttgagatagaccagcggattcaccgcccgtggcgaggcttcatgaatcgctttcgccaccagctccttaccggttcccgtctcaccgctgatcaggacgttgagatcggacgccgccacaatctcaatctcttttttcagttgcgtcatgccaggggacaagccaatcatctgcgtctgtttcaccgcttcaaacggcgtggcatcgcctggcatcatattctggctttccagttgttcaatcagcaacgcattgcttaacgctcccgccgccagcgcagcaatcagccgtagctcttcgtcgctgaaaacatcgaactgatcgggctgcatcccgtcgagcgtcagtgcgccgatcaggttttgcccggcaaacaatggcagaccaacgcaggcgtgaaccttcagactctcctgcccaggaatcaaaccgtcatagggatcgggcaattcgctgtctgcgggaaagcgcaccacatccccggcgcgggcaatcgcttccagccgtggatgcccttccagcgcaaagcgtctaccgagtacatcctttgccagaccgtcgatggcaagcggaataaactgccgcgaatcgtaacgtagcaacgcagacgcatcgcactccagcacctgacgtagcgtggtgatcaggcgctgaaaacgatcctgatgaccaatcccacgctgcaattcgatggcgatattcgccagcacatcaacggaaaaactcatctttgcctcactgtcaatttgactatagatattgtcatatcgaccatttgattgatagtcattttgactactcattaatgagcataattttatttatatagtaaaaacaatcagataaaaaactggcacgtaatctgcaattagcaagacatctttttagaacacgctgaataaattgaggttgctatgtctattgtggtgaaaaataacattcattgggttggtcaacgtgactgggaagtgcgtgattttcacggtacggaatataaaacgctgcgcggcagcagttacaacagctacctcatccgcgaagaaaaaaacgtgctgatcgacaccgtcgaccataaattcagccgcgaatttgtgcagaacctgcgtaatgaaatcgatctggcggatatcgattacatcgtgattaaccatgcagaagaggaccacgccggggcgctgaccgaactgatggcacaaattcccgatacgccgatctactgtacagccaacgctatcgactcgataaatggtcatcaccatcatccggagtggaattttaatgtggtgaaaactggcgacacgctggatatcggcaacggcaaacagctcatttttgtcgaaacaccaatgctgcactggccggacagcatgatgacttacctgacaggcgacgcggtgctgttcagtaacgatgctttcggtcagcactactgcgacgagcatctgttcaacgatgaagtggatcagacggagcttttcgagcagtgccagcgttactacgccaatatcctgacgccgttcagccgcctggtaacaccgaaaattaccgagatcctgggctttaacttaccagtcgatatgatagccacttcccacggcgtggtatggcgcgataacccgacgcaaattgtcgagctgtacctgaaatgggcggctgattatcaggaagacagaatcaccattttctacgacaccatgtcgaataacacccgcatgatggctgacgctatcgcccaggggattgcggaaaccgacccacgcgtggcggtgaaaattttcaacgtcggccgaagcgataaaaacgaaatcctgactaatgtcttccgctcaaaaggcgtgctggtcggcacttcgacgatgaataacgtgatgatgccgaaaatcgccgggctggtggaggagatgactggtttacgcttccgtaacaaacgcgccagtgctttcggctctcacggctggagcggcggtgcggtggatcgtctttccacgcgcctgcaggatgcgggtttcgaaatgtcgcttagcctgaaagcgaaatggcgaccagaccaggacgctctgaagttatgccgtgaacacggtcgcgaaatcgcccgtcagtgggcgctcgcgccgctgccgcagagcacggtgaatacggtagttaaagaagaaacctctgccaccacgacggctgacctcggcccacggatgcagtgcagcgtctgccagtggatttacgatccggcaaaaggcgagccaatgcaggacgttgcgccaggaacgccgtggagtgaagtcccggataacttcctctgcccggaatgctccctcggcaaagacgtctttgaagaactggcatcggaggcaaaatgagtaacggcattgtgatcatcggttcgggcttcgccgcccgccaactggtgaaaaatattcgcaaacaggacgccactattccattaaccctgattgccgccgacagcatggatgagtacaacaaacctgacctcagccatgttatcagtcaggggcaacgtgccgatgaccttacccgccagacggcgggtgaatttgccgagcagtttaatctgcacctgtttccacaaacctgggtgacggatatcgatgccgaagcccgtgtggtgaaaagccagaataatcagtggcaatacgacaagctagtactggcaaccggtgccagtgcctttgtcccgcctgtgcctgggcgtgagttaatgctgacgttaaatagtcagcaagagtatcgcgcctgtgaaacgcaactgcgggatgcccgacgcgtgttgattgttggcggtggtttgattggtagcgaactggcgatggatttttgtcgtgcaggcaaagcggtcacgctaatcgacaacgctgccagtattctggcgtcgttaatgccaccggaagtaagcagccgcttgcagcatcggttgacggagatgggcgttcatctgctgttgaaatctcagttacaggggctggaaaaaacggattctggcattcaggcaacgctggaccgccagcgcaatatcgaagtggatgcggtaattgccgccaccggactgcgcccggaaaccgccctggcacgacgcgccgggctgacgattaatcgcggcgtttgcgtcgatagttatctgcaaaccagtaataccgatatttacgcgctgggcgattgcgcggaaattaacggtcaggtattgccgttcctccagccgattcaacttagcgcgatggtgctggcaaaaaatcttctcggcaataacacgccgctgaaactcccggcgatgctggtgaaaatcaaaacgccggaattaccgctgcatctggcaggcgaaacccagcgtcaggatttacgctggcaaattaataccgaacgccagggaatggtggcgcgcggcgttgacgatgcagaccagcttcgcgcctttgtggtcagtgaggatcggatgaaagaggcatttggattgttgaaaacattgccgatgtaggtgggctactgtgcctaaaatgtcggatgcgacgctggcgcgtcttatccgacctacggggacgcatgtgtaggccggataaggcgtttacgccgcatccggcaatggtgtccaaatgcaacacgttttatccgttctggacttcacccgctaaccaacgcgccgcagcaataaccccctgccccagagacaaaccgccatcacccgccggtaaactctgtggaaagagcaatgtgaaatcagcgagataatgcgccagacgtgcacgcagcaaacggttatgaataaccccgccgctaaataccagcgtagtgataccacgcatcgtggcctgctcacgcatcaacgcggcaaaaccctgcgccagcgcatcatgaaacgcccacgcgcgttgattaaccggtgcctgccagttcagccactgctgccagaaagtggcgagatccagttgattgtccacccgcggcattgtcaccggatgcgtcactccgtggcatgaggctgcgagcgcctccagagcacaagccgcttcaccttcataacttaacgtggctggcgcacagcccagtgccgccgccactgcatcgaaaaaacgcccacacgatgacgccagcggcgcgttaattccacgctcaatggcccgcgccagcacgctccagttttgctgttgcacactcgctgtttcgggataattctgccactccggcacaaagcgcaggcactgcgccagcaggtttcgccacggctgcttcgccgccaaatcgccaccagcaagcgccactgcaggcaagccgcccaggtgctcacattcgcgatagttcacccgcaggcactcgccgccccacaaagcgccattctcccccataccgataccgtcgagcgtcaaagcaatgacatcaccgccatccagcggccactgatgctctgccagacacgccgctgcgtgggcatgatgatgcagcaccgtttgcgtcggcagattcatttcgtgcgcccactggctggagacatagcccggatgtgcgtcatgcacaacgtattgcggggtgaaatcgtagatgttttgcatcaggcgtaacgcttcgcgccactgcatctggatgccatcgtcacttaaatcgcccagatgctgactcaacaccgcttgttcaccgcgcaccaggcagaaggtatttttcagatccgcgccgagacacagcacaggcggaacatttttaaagcccggaggcaaagccagcgcatccggcacatacccgcgtgaacggcgcagcatttcgccgctttcgcgcaccactgaatcatccatccgctgcacgatgtcgcggttatgtattaagaatccgtcggcaatgccctgcaaatccgccagcgcctgttcgttgctgatagccggtggtttaccgctcaggttgccggaggtcatcaccagcgggcattgcagttcctgtaacagcaaatgctggagcgggttcgcaggcaacatcaccccgacttcgttaaggccaggggcgatatcatcacaaagctcaggaacgtattttttatccaccagcacaatcggcgcggcgggcgtggtaagcaactggcgcgcagcgtctggtaaaccgtcagccactggcaacatgaccgccagcggtttcgccggacgatgtttgcgcgcccgaagtgtcgccaccgcgttactgttacgtgcatcgcaggcaagatgaaatccgccaatccctttgatggcgacaatgttgcccatttttaactgtgcgatagccgcctgtaatgccgcctcttgttctgcatgttcaccatgacttacccattcaagatgtgggccacactccgggcaggccaccggctgggcgtggaagcgacgatcgagcgggtcgcggtactctttatcacaggctggacacagcggaaactccgccattacggtaaacgggcggtcgtaaggcatggcgcgaataatggtgaaacgcgggccgcagtgggtacagttgataaacggataacgataacgccgttcgcctggggtattcatttcggcaaggcaagcagggcaagtagcggcatccgggacaatttgcgtattcatggcacctcccgcgctctggcggatagtgaactcggtgggcagttgtgaccagataaacggctcacgctcgacgctatcaatacgcgccagtggcggacagtgctgatgcaattgaacaagaaacgtttccgggtcttccagcagccggacttctacgccatcgccgtcattacagacatcgccgtgaagatttaattgctgtgccagctgccagacaaacggacgaaaaccgacgccctgcactttgcctcgaatacgcagttggacaccgcaagatgtgttttttgccattgagttattcccgccatcatgaattgcgtaacccgccctgccggacacgactgcgtcgtatccggcagtctcaggtcggcgataccgccagctccgtattctacgaatatttccgggaattcctttgatgccagaacagttctataagatttttagaacatcagcgccgtacggcgacgtttttctgcgctcagttgttcaagtttattacgatcgacacaaatcagcgcatgggtcgggcaagccgccatacacgccgggccgtcttcgcgatggttgcacaggtcgcatttattggcttcagctttgtcagcccgtacattcagccccgcgccgctgttgcggatcaccggacgtaccaccacttccat

SEQ ID NO: 200 - DNA, 32353 bp, Escherichia coli
  source 1..32353: mol_type = genomic DNA
tgattattgatttttcgcgaaaccatttgatcatatgacaagatgtgtatccaccttaacttaatgatttttaccaaaatcattaggggattcatcagtgcagagcaggaaaatatgaccctgactgaactgataaaggtcattgccgacatctatcccggtcagacacagttttatgtgattgaatttaaatgtctttaaattgaactcacgcctgttagttgaaatttcgcatttaatttcatgatttttaggagattagtctcaaatcagaatttattttagctaacaggtgttcactggaactattctcagttacgctggagaggtatacatgtgcgtgtacgtttctccggagtaagttatggttcagaagcccctcattaagcagggatattcgctggcagaggaaattgccaacagcgtcagtcacggcattgggttggtgtttggtatcgttgggctggtgttgctactggttcaggcggtggatctcaatgccagcgccacagcgataaccagttacagcctctatggcggcagtatgatcctgctgttcctcgcttcgacgctctatcacgccattcctcatcaacgggcaaaaatgtggctgaagaaatttgaccattgcgctatttacctgttgattgccggaacctacacgccgtttttgctggtggggctggattctccgttagcgcgcgggttgatgattgttatctggagcctggcattgctgggtattctgtttaaactgaccatcgcgcaccgattcaaaattttatctctggtgacctatctggcgatgggctggctgtcgctggtggtaatttatgaaatggcagttaagctcgcggcgggcagcgttaccttactggcggtaggcggcgtggtttattcgctcggggtgattttctacgtctgcaaacgcattccatacaaccatgccatctggcacggcttcgtgctcggcggtagtgtgtgccactttctggcgatctatttgtatattgggcaggcgtaatgggtatgcctttgtaggcctgataagacgcgccagcgtcgcatcaggcgataaatgcctgatgcgataaagagatttactcttcgagcgaatacggcagcggctcgatatgcagtgtattcgcatcgtcgcgtacgcggaagatgctatccggttccatatcgttattcatgacgacctgtaccacgacctgaccatcttccagttttaccgcagccagcaccgtaccggtacgacgccagttctcgcccattttcagctctaagtcttcaccagcttccggcagtcggctggcgctacctgccagcaaccagagcgcacgtttattggcaccacggaattttgctcgcgccaccatctcttgtccggtatagcagccttttttaaagctgataccgcccagcgcctggaggttggtcgcctgtgggataaactgcccgctgttggcggcatcaatcaccgggaaacccgcttcaatgtttaatgccagccactgttggctattgttcagttccgcttcaccgcgcagtttatcggtcagcatattagcagtagcttcatcggttacgatcaggaaacgttctgccgggtgttcaaaccatagcaaagtggtcgcgccttctttaactacctgtttttctttcgaaggcagttcactaaagagatttgccagcgcggcgcgcgcctgaaaaccggcaacaccaagcagcacacgctcgtcgtctggcgcgatggtcactttagagaataccgcatattttttcagttcagtcagctgcggttcacgcacgctgcgccgttcaatccatgcaaagccatcgccgtcgcggaacagacgtaaattgctccacattttacctttggcgtcgcaatgggcggcgagcaggtgctgatcttctgccatctggctgacatctgctgtcacctgaccctgcatatatttttcgctgtccgcgccagtaatggtggcaagcgcccagtcatcaagcgtcatcagcgtcagcggtaaacgggcagaagccgtaggctgacggggaggaaaaggtgtaaaagccataatagagtcctgagttgcttaacggcgtattaatgactaatggtaaaagagctatgaggcaatgcaagtgctttcactacgcgatctgtgccttctgcgaggcgacttccaaaaaaatgaagccattgaattgttgtgaattaatttcgcgatcgcgatggtgtttactgatattcccgtaaaagaaggcgaaaaacacgttacaatagcggggtactggattttcgtgagacaggaagaagatggacattaacaacaaagcccgcattcattgggcatgccgccgtggtatgcgcgaactcgatatttcaatcatgccgtttttcgaacatgagtacgacagcttaagcgatgacgaaaaacgcatctttattcgtctgctggaatgtgacgatccggacctgtttaactggctgatgaatcacggtaaaccggccgatgcagaactggaaatgatggtccgactcatccagacacggaaccgggaacgtggtcctgtggcaatctgatttgcgcgtctcctggcgcgcacagtggctttccttgctgattcatgggctggttgccgctgttattttactcatgccctggccactcagttacaccccgttatggatggtgttactttcgctggtggtgtttgattgcgttcgcagccagcggcgtattaatgctcgccagggggaaattcgcttgttgatggacgggcgtttgcgttggcaagggcaggagtggagcatcgtcaaagcaccgtggatgattaagagcggcatgatgctgcgtttacgttctgatggcggtaaacggcaacatttatggctggcagccgacagcatggacgaagccgaatggcgggatttacggcggattttgttgcaacaagagacgcaaagataaagatgacggcaaagcatatgcgctaagccgtcagtgagatcaggcgtaatgctctgccatttcgttgaggatttgctcgcaccagctctgaatacgctcgtcgctaaggtcatactggttagtttcatccagcgccagacccacgaacagttgcccgtcagcaatcaccggtttcgggctggtaaattcatatccttccgttggccagtagccgacgaacttcacgcctttggtcgagagtttgtcatgcagcataccgagcgcatcgaggaaccactcgccgtatcccagttgatcgccaagcccatacagcgcaacaattttaccttcaaggttcaggtcgtcgagctgatcccagacggcttcccagtcttcttggatttcaccaaaatcccaggtcgggatacccagaatgagcacatcgtactgctccattaatttcggggagtcgtccttgaggttatgtaaggtcaccagttctgggccgataatatcgcggattttttctgccgccatttcggtgtaacaggtgctggaaccgtaaaaaagacccatattcataacgtaagcttctcgattctgctgtggcttttgcggctagtgtatcagaatcgctttagtcacggcacaataaggcataatggatcaaatgagtgaccataaggggcgcaagtgaaacaggatctggcacgcatcgagcagtttcttgatgctctgtggctggaaaaaaatctggctgaaaatacgttgaacgcttaccgtcgcgatctgtcaatgatggtggagtggttgcatcaccgcgggtnnnnnnnnnngcgcaaagtgacgatttgcaggcattactggcagaacggctggagggcgggtataaagccaccagctcagcgcgtttgctgagtgcagtgcgccgattgttccagtatctttatcgcgaaaagtttcgtgaagacgatcccagtgcgcatctcgcttcaccgaaattgccccagcgtttgccaaaagatttaagcgaagcgcaggttgaacgtttattacaggcaccattaattgatcagccactggagctacgcgataaagccatgcttgaagtgttgtatgctaccgggctgcgtgtctctgaactggtcggactgacaatgagtgatatcagcctgcgtcagggcgtagtgcgggtcattggtaaaggcaacaaagagcgcctggtaccgttaggtgaagaggcggtttactggctggaaacctatctggaacatgggcgtccgtggctgctgaatggtgtgtcaattgacgtgttgtttcccagccagcgtgcgcagcagatgacgcgacagaccttctggcaccgcattaaacattatgctgtgctggcgggtatcgacagcgaaaagctgtcaccgcatgtgttgcgtcacgcttttgccacccatttattaaatcatggtgcggatttacgcgtggtgcagatgctactgggccacagcgacctctccaccacgcaaatttatacgcatgtcgctaccgagcgtctgcggcaacttcatcaacagcatcacccgcgggcgtgatgtctgaaaagaacgggaagatttatgaagaaaggttttatgttgtttactttgttagcggcgttttcaggttttgctcaggctgatgacgcggcaattcaacaaacgttagccaaaatgggcatcaaaagcagcgatattcagcccgcgcccgtagctggcatgaagacagttctgactaacagcggcgtgttgtacatcaccgatgatggtaaacatatcattcaggggccaatgtatgacgttagcggcacggctccggtcaatgtcaccaataagatgctgttaaagcagttgaatgcgcttgaaaaagagatgatcgtttataaagcgccgcaggaaaaacacgtcatcaccgtgtttactgatattacctgtggttactgccacaaactgcatgagcaaatggcagactataacgcgctggggatcaccgtgcgttatcttgctttcccgcgccaggggctggacagcgatgcagagaaagaaatgaaagctatctggtgtgcgaaagataaaaacaaagcgtttgatgatgtgatggcaggtaaaagcgtcgcaccagccagctgcgacgtggatattgccgaccattacgcacttggcgtccagcttggcgttagcggtactccggcagttgtgctgagcaatggcacacttgttccgggttaccagccgccgaaagagatgaaagaattcctcgacgaacaccaaaaaatgaccagcggtaaataattcgcgtgaaacaacagatacaacttcgtcgccgtgaagtcgatgaaacggcagacttgcccgctgaattgcctcccttgctgcgccgtttatacgccagccggggcgtgcgcagtgcgcaagaactggaacgcagtgttaaaggtatgttgccctggcagcaactgagcggcgtcgaaaaggccgttgagatcctttacaacgcttttcgcgaaggaacgcggattattgtggtcggcgattttgacgccgacggcgcgaccagcacggctctaagcgtgctggcgatgcgctcgcttggttgcagcaatatcgactatctggtaccaaaccgtttcgaagacggttacggcttaagcccggaagtagtcgatcaggcccatgcccgtggcgcgcagttaattgtcacggtggataacggtatttcctcccatgcgggcgttgaacacgctcgctcgttgggcattccggttattgttaccgatcaccatttgccgggcgaaacattacccgcagcggaagcgatcattaaccctaacttgcgcgactgtaatttcccgtcgaaatcactggcaggcgtgggtgtggcgttttatctgatgctggcgctgcgcacctttttgcgcgatcagggctggtttgatgagcgtggcatcgcaattcctaacctggcagaactgctggatctggtagcgctggggacagtagcggacgtcgtgccgctggacgctaataatcgcattctgacctggcaggggatgagtcgcatccgtgccggaaagtgccgtccggggattaaagcgctgctggaagtggcaaatcgcgatgcgcaaaaactcgccgccagcgatttaggttttgcgctggggccacgtctcaatgctgccggacgactggacgatatgtccgtcggtgtggcgctcttgctgtgcgacaacatcggcgaagcgcgcgtgctggcaaatgaactcgatgcgctaaaccagacgcgaaaagagatcgaacaaggaatgcaagttgaagccctgaccctgtgcgagaaactggagcgaagtcgcgacaggctacccnnnnnnnnnnggctggcaatgtatcaccccgaatggcatcagggcgttgtcggtattctggcttcgcgcatcaaagagcgttttcaccgtccggttatcgcctttgcgccagcaggtgatggtacgctgaaaggttcaggtcgctccattcaggggctgcatatgcgtgatgcactggagcgattagacacactctaccctggcatgatactgaagtttggcggtcatgcgatggcggcgggtttgtcgctggaagaggataaattcgaactctttcaacaacggtttggcgaactggttacagagtggctggacccttcgctattgcaaggcgaagtggtgtcagacggtccgttaagcccggccgaaatgaccatggaagtggcgcagttgctgcgcgatgctggcccgtgggggcagatgttcccggagccgctgtttgacggtcatttccgtctgctgcaacagcggctggtgggcgaacgtcatttgaaggtgatggtcgaaccggtcggcggcggtccactgctggatggtattgcttttaatgtcgataccgccctctggccggataacggcgtgcgtgaagtgcaactggcttataagctcgatatcaacgagtttcgcggcaaccgcagcctgcaaattatcatcgacaatatctggccaatttagcgtcatcttctctataaaaaagagcgtggattgggtacaatcccgctcttatcaccgcattttgactagctcaataaaagaaatcagaccatgtttgaaattaatccggtaaataatcgcattcaggacctcacggaacgctccgacgttcttagggggtatctttgactacgacgccaagaaagagcgtctggaagaagtaaacgccgagctggaacagccggatgtctggaacgaacccgaacgcgcacaggcgctgggtaaagagcgttcctccctcgaagccgttgtcgacaccctcgaccaaatgaaacaggggctggaagatgtttctggtctgctggaactggctgtagaagctgacgacgaagaaacctttaacgaagccgttgctgaactcgacgccctggaagaaaaactggcgcagcttgagttccgccgtatgttctctggcgaatatgacagcgccgactgctacctcgatattcaggcggggtctggcggtacggaagcacaggactgggcgagcatgcttgagcgtatgtatctgcgctgggctgaatcgcgtggtttcaaaactgaaatcatcgaagagtcggaaggtgaagtggcgggtattaaatccgtgacgatcaaaatctccggcgattacgcttacggctggctgcgtacagaaactggcgttcaccgcctggtgcgtaagagcccgtttgactccggcggtcgtcgccacacatcgttcagctctgcgtttgtttacccggaagttgatgatgatattgatatcgaaatcaacccggcggatttgcgcattgacgtttatcgcgcgtccggcgcgggcggtcagcacgttaaccgtaccgaatctgcggtgcgtattacccacatcccaaccgggatcgtgacccaatgccagaacgaccgttcccagcacaagaacaaagaccaggccatgaagcagatgaaagcgaagctttatgaactggagatgcagaagaaaaatgccgagaaacaggcgatggaagataacaaatccgacatcggctggggcagccagattcgttcttatgtccttgatgactcccgcattaaagatctgcgtaccggggtagaaacccgcaacacgcaggccgtgctggacggcagcctggatcaatttatcgaagcaagtttgaaagcagggttatgaggaaccaacatgtctgaacaacacgcacagggcgctgacgcggtagtcgatcttaacaatgaactgaaaacgcgtcgtgagaagctggcgaacctgcgcgagcaggggattgccttcccgaacgatttccgtcgcgatcatacctctgaccaattgcacgcagaattcgacggtaaagagaacgaagaactggaagcgctgaacatcgaagtcgccgttgctggccgcatgatgacccgccgtattatgggtaaagcgtctttcgttaccctgcaggatgtgggtggccgcattcagctgtacgttgcccgtgacgatctgccggaaggcgtttacaacgagcagttcaaaaaatgggacctcggtgacatcctcggcgcgaaaggtaaactgttcaaaaccaaaaccggcgaactgtctatccactgtaccgagctgcgtctgctgaccaaagcactgcgtccgctgccggataaattccacggcttgcaggatcaggaagcgcgctatcgtcagcgttatctggatctcatctctaacgatgaatcccgtaacacctttaaagtgcgctcgcagatcctctctggtattcgccagttcatggtgaaccgcggctttatggaagttgaaacgccgatgatgcaggtgatccctggcggtgccgctgcgcgtccgtttatcacccaccataacgcgctggatctcgacatgtacctgcgtatcgcgccggaactgtacctcaagcgtctggtggtcggtggcttcgagcgtgtattcgaaatcaaccgtaacttccgtaacgaaggtatctccgtacgtcataacccagagttcaccatgatggaactctacatggcttacgcagattacaaagatctgatcgagctgaccgaatcgctgttccgtactctggcacaggatattctcggtaagacggaagtgacctatggcgacgtgacgctggacttcggtaaaccgttcgaaaaactgaccatgcgtgaagcgatcaagaaatatcgcccggaaaccgacatggcggatctggataacttcgactctgcgaaagcgattgctgaatctatcggtatccacgttgagaagagctggggtctgggccgtatcgttaccgagatcttcgaagaagtggcagaagcacatctgattcagccgaccttcattactgaatatccggcagaagtttctccgctggcgcgtcgtaacgacattaacccggaaatcacagaccgctttgagttcttcatcggtggtcgtgaaatcggtaacggctttagcgagctgaatgacgcggaagatcaggcgcaacgcttcctggatcaggttgccgcgaaagacgcaggtgacgacgaagcgatgttctacgatgaagattacgttaccgcactggaacatggcttaccgccgacagcaggtctggggattggcatcgaccgtatggtaatgctgttcaccaacagccataccatccgcgacgttattctgttcccggcgatgcgtccggtgaaataagcattacgttatgctcacaaccccggcaaatgtcggggttttttatttaagctgggtaaatgcagataatcgtattctggcttcgcgatttgtcgcctgcatcaccatccacggactgaacgcccacggcgtggcatcaataccgtgtaatacatcagctaaatcacaccattgataatccatcacttcatcatcgttgatctgtaacgcactggtggtgcgtgcggcaaataccggacacacttcattttccacaatgccactcggatcggtggcgcggtagcgaaagtcaggatagatagattcaggaggcgtaatttccacgccaagctcataacggcaacggcggatcaccgcgtcttcgctgctttctcccagttgtgggtgcccacaaaccgagttagtccacacgccaggccacgcttttttgctcagtgcgcggcgggtaactaataattgccccttggcattaaacagccaactggagaacgcgagatgtaagagggtgtctgccgtgtgtgcggcatacttttccagcgtaccagtgggaactccctgtgcattcaataaaatgacgtgttccgtttgcataatttctcacatgtaattctgatcactcatcattatagataattgaagagtgaaatgattaaccaagtgagcgtttatcgacaaccgcccgttttgagcggatgccgacaggtaaaatccatttaaaaaagtagcatcatatatttgaagcgactttcaatggccattgcaacacagtcagaaatgacaggaatagagagagtaaaaagcaacagcagactgaatatagcgcgcattaaaaaattcatattattctccatgctcatttttcttcagcttgcgcatcagaagccacatacgtactgtcctgacttttaaatctttatcagagacggattccttcaccaggtcagcatgatgctggtagccattaaagaagacattcagcacaacggcgctaagggttgcgagcataatgccgctatgcagcaacggttgcagtacggccggtaacttagaaaagaaatcgtgagagagcgtcggagtcatgccaacgccgagactgatcgccacaatatagaggttgtaacggttggtggtgtagttacagcgcgacagaattcgaatccctgtcgccagtaccatgccgaacatcaccagcccagcaccgcccagcacaaattgcggaatggaggcgaccagcaccgccatttttggcaccatgccaaacaggattaatataattcccgaagaaatacacacccagcggctatgaacgcgcgtcacgctaaccaggccaacgttttgtgaaaatgacgtgtgggggaagctgttaaacgttccgcctatcattgtccctacgccatcgacacgcagcccgcgaataatatcgtgtgaagagagtttacgaccgactatttcacccagtgccaggaacatccccatcgactcgataaacacgatgattaacacggcagtcatggtcagaatggaaacgggatcgaaaatcggcataccaaatgacatcggcgtgacaatcgcaaaccatgaagcatcatgtagcccggataaattgacttcattcatcatccacgaaagtaaaaagccaaatacaatccccagtaatacggcgacgttggacataaatcctttcgcatagcgagtaatgagcaagataaaaattaagacagcaaaggagatacctaaataaacgggattaccatattgcggattccctttacctccggcggcccagtcaatacccacctgaatgatgctaagcccaatagaagtaataaccacaccggtaaccagtggcgggaataaaggcatcaagcgaccgataagtggcgctaataatgtggtgataaaacccgcggcgatagtggcaccaaatatccccagcaggccgatatccgggttcatcccaatggctatcattggtgttacagcagcaaaggtcaccgacataatcaccggcaggcggatccccataaagcggccgataccgatacattgcaataatgtgacgatcccgcagcaaaagagatccgagctaatgagcatcgcaatagcatcttttgagaggcccagtcggtcaccaatcataagaggaacagcgactgcacctgcgtacatgacaaggacgtgttgcagaccgagtatgatcagctttcctggtgataatatgcggtcaacctcatcagttgggcggtcttgcccagaagatgagggaagttgggaatctatggcgctcatcagtgtttctcctttcgcccgccagagtaaaaagcaaccgtttacgttaatgaaactgtctaaacacatgctcgtggagtgccagtttttgcgaggaaggggagttagagacaggaattgcggaggcaatcacataatcgtgcttaaaccacgaaaatgacaagagaacctgacaatggaattatctgtaattttctcatattgatatttcattaatcattctggcatgtcgcactctcgcatttaatcgtttttatctggatagcgctcttttggtcggcaatgttgaaataatgaaagcggcatagattgaggggcaataatttgaactcagtcgcaaaattataattaaaacggtcatgctacctaatatatgcccgtttattgcatcgcgaaatttgagaagacataactcattaaatgaaagggatgcaaatgaataagtttatcgctgctgaagctgcggaatgtataggctgtcatgcttgtgaaattgcctgtgcggtggcacacaatcaagaaaactggccgctgagtcacagtgactttcgaccgcgtatccacgttgtagggaaaggccaggctgcgaatccggtggcctgccatcactgcaacaatgccccttgcgttacggcttgtccggttaatgctctgactttccagtccgatagcgtacaactggacgagcaaaaatgtattggctgtaaaagatgcgcaatcgcttgcccctttggcgtcgttgagatggtcgatacgattgcgcagaaatgcgacctttgtaaccagcgcagttctggcacgcaagcctgtattgaagtctgcccaacacaggcgttacgactgatggacgataaagggttacagcagataaaggtggcccgccagcgcaaaacggcagcaggaaaagcgtcatcagtcgctcagccatctcgcagtgcagcgttgctccccgttaactcgcgtaaaggcgcagataaaatttcagcaagtgaacggaaaaaccactttggcgaaatctattgcgggctggatccactgcaagcgacttatgagagtgaccgctgtgtttattgtgccgaaaaagctaactgcaactggcattgcccgctgcataacgctattccggattacatccgtctggtacaggagggaaagattattgaagcggcagaactttgccaccagaccagttccttaccagaaatctgcggcagggtatgtccacaggaccgtctttgtgaaggcgcatgtactttgaaagatcactctggcgcagtcactatcggtaatctggaacgctacatcaccgataccgcgctggcgatgggctggcgtcccgatgtcagcaaagttgttccccgtagcgaaaaagtggcggtgattggcgctgggccagcagggttagggtgtgctgatattctggcgcgcgcaggagttcaggttgatgtctttgatcgccatccagaaattggcggtatgctgacttttggcattcctcctttcaaactcgataaaacggtattaagccagcggcgagagatattcaccgcaatgggaatcgactttcatctcaactgtgaaattggccgcgatattacctttagcaatttaacttctgaatatgatgcagttttcatcggcgtggggacttacgggatgatgcgagcagatctgccgcatgaagatgcgcccggtgtcattcaggctctaccgttcctgactgcccatacccgccagctcatgggattgccggagtctgaagagtatccgctgacggacgtggaaggtaagcgagtcgtggtattgggcggtggcgatacgacaatggattgtttgcggacttccatccgcctcaatgccgccagcgtgacctgcgcgtatcgtcgtgatgaagtcagtatgccgggctcgcgcaaagaggtggttaatgcgcgcgaggaaggtgtcgagtttcagttcaatgttcaaccgcaatatatcgcttgtgacgaagatgggcgtttaactgcggtgggcctgattcgtaccgccatgggtgagccggggccggatggtcgccgtcgtcctcgtccggtagcgggttcagagtttgaattgcccgccgatgttctgattatggcctttggtttccaggcgcatgccatgccgtggttgcagggcagcggaattaaactcgataaatggggcctgattcaaaccggtgacgtcgggtatttacctacccagacgcatctgaaaaaagtctttgctggtggtgatgcagttcatggcgcggatctggttgtcactgcaatggccgcaggaaggcaggcggcgcgcgatatgttaactctgtttgatacgaaggcatcgtgatgaaatcgttaattatcgttaatccggctgactgtattggctgccgtacttgtgaagtagcctgtgtggtcgctcacccttcagaacaggagttgaatgccgatgtctttttaccccggctgaaggtacagcgactggacagcatcagtgcgccggtgatgtgccatcagtgtgaaaacgccccttgtgttggcgcttgccccgtgggggcgctgacgatgggcgagcaggtggtgcagaccaattctgcccgttgtattggctgtcagagttgcgtcagtgcgtgcccgtttggaatgatcaccattcagtcgttgccgggggatacccgacaacaaattgtgaaatgcgatctctgtgaacagcgggaagaggggccagcctgtgttgaatcttgcccgacacaggcgctgcagttgcttactgaaagagaactcaggcgagtccgccagcagcgtattgttgccagcggtgagaatcctctgtgaaagaaatctccgcgctgaaaggcgcggagaatctattagattgcccaaccacccgcgtaaaatgcgaccagtgcggcagtaatgatcaccgtaccaatattcagcttttgccattcgcgtgcaaagacgcggcctacgaccagtgtcacaaagcccagcataataccggtaacgatattacaagtcagaacgatgaacacggcacacaccaggccagccatagcgtcaataaaatcattgaaatccagcttcgagacgttacttaacatcagcaaacccacgtacatcagagcgggtgcagtggcgtaaccagggatcaaaaatgacagcggtgataagaacagaatcagcaggaataacgcccccactacggttgcggtcaaccctgttttacccccggcggcggttcctgccgctgattcgatataaaccgctgcgggcgctgcgcccaccagaccggagaatattgaacttactgagtcactggtcagggctttgccgccgttgatgatctggttgtctttatccaacaaattcgcctgaccggcgacggcacggatggtgccagtggcgtcgaacactgcggtcatcaccaatgccagtacactcggaagtacagttggctggagtgcgcccataatatcgaggctgaaaatcagagacttaccatcttcgccagtcaggcttggcatcgccaccagaccgtggtatttcaccgctgggtcaaagattaagccgatgatcgaaattgcaataatcaccaacaagatcccgccgggtacgcgacacttctccagaccgaagatgaccgccagccccagtaagctcatcatcaccgggaaggaggtaaacgcaccgagcgccactggcaagccttcaatcgggtttttgataaccattcccacaccgttagcagcaatcagcagcagaaacaggccgataccgatacctgtaccgtgagcgatccccatcggtaaattacgtaagatccaggtacgcacaccggttacggaaatagcggtgaagatgacgcccatcagaaagaccgcgcccagtgcgacaggaacgctaatttgttgcccgagtaccagactgaatgcggtaaacgccgtcaaggaaatcgcgcaaccaatcgccattggcaaattggcccataatcccatcagcaacgagccgaagcccgcgaccagacaggtggcaacaaacacagctgcgggaggaaaacctgctttgcccagcattcccggaacgacgataacggaataaaccatggccagaaaggtcgttaagccagccagtacttcctgacgaacggtactgccacgagcggtaattttaaaataattatccagcgcgccctgtggctttggtgcgtccggtgtttgtaggatgtctccagacataatgatgtcctcacgaggatgttaaagttttattattagttgcgttcgtacaccagacgaccatcaacgtaggtgcggtagatcgaacggtcatcgcccaacgtcatcatcacgaacaatttgtcgactaaagaaacagagttgtcatagcgcagctgctgtagcggagtggcggtgggttccatcaccacgaaatcagcctctttgccaggtaaaaagttgccaatcaaatcgtcaaggcccagagatttcgctccgccgagcgtggccaggtaaaacgcttcatatgccgagaggcgatagccttgtaattgcaacactttgtaggcttcgttcagcgtttgcagcatgttgaaagtggttccggcaccgatatccgttcccatgcccactttaactttcttctgccatgcttttttcaagttgaataagccgctgccgaggtaaaggttggaggtcggacagaaagcaatgctggatttggtttcgctgagacgatcccactctttttcttcgagatggacgcagtgagcaaagacacagtttttaccggtcaggccgtactgatggtaaacatccagataaccatcatggtcaggataaagcgatttcacccaggcaatttcatctttgttttcacagagatgggaatgtacccacgtatccggatattcttctttcaggcgttgcgccatcgccatctgttcaggagatgaggtcggggcgaagcgtggcgtaatcgcatatagcagacgaccatttttgtgccagcgttcaatcagttctttgctttggtgatagctgctttcggcagtgtcgagcagataatccggtgcgttacggtccatcatcaccttaccggcaatcatacgcatattgatatgactggcggcttcaaacagcgcatcaacggattgcggatgaacagtgccaaacaccagcgccgtggtggttccgttacgtaaaagctgcttgatgaagaacgccgacatttcgcgggcgtactctaaatcctcataacgccgttcagtagggaaggtgtgtttattcaaccactccagcaattgctcaccataggcccccaccatttcactttgcggataatggatatgtgtatcgacaaagcccggtactatcagtttgccgcgatagtcgcgcacgcgaatggtgtcaggaatttgatgctttccgttttcccattcgccaaaccattccacttttccctgtttaatgagtaataaaccatcctcaataaaccgcagcgcagaggcaatctcttccgggttatcgaccgtacgggtgacatcaataaaactgcctcgtaccgcttttaacgtgtgttctcctgacatcattgactcctttactgttaatccatctcttccgctgaggtaataccaggcagaacgttttcctgtcggtagccaccagggaggataatatttaataaaatcgcagttaacccgccagcacaaatagggttttcaactaatacataaatagaggctggcaatattttaaaaatttcgggatcgtaggagacgccaagccctaaacctaaagaagtggcgacaataagtgtttcacggcgctttaaaccgttggtgatgatgatgcgaatccctgcgatggcaatcatggaaaacatcaacgtcattgcgcctcccagaactgccgagggaatggtcgtgaagaagccgccaatcatcggaaataagccgaggataaccagcattaccgcgatggttcgcccgacataacgtgaagcgacgccagtcatctgaataaccccattattttgcgcaaacgtggttaatggtaatgaaccgacagcggaggcgataacagaaaccagaccatctgccagcacgccgcctttcagtcgggactgatactcttccccctgaatggggcggcgggaaaccattgccgtggcggtgatatcgccgactgcttccagcacgctaagcagataaatcgtgccaaccaccaggaactgatggaagctaaaactaaagccgtatttgaatggatgtgggatggtgattaacggcaaattgcgcatactgctgaaatccaccatgcccaggcataacgatgcgatatagccgacacatagcccaatagcgatccctcccatgcgtagcaacggactgcgacagcagttaaagccgatcaccacaatcaaaaccaataaaccaacgccgagatgttcgtaattgccgaaggtaccgctgcttttggcagcaaatcctccaccaaaatcaataatgccgactttaatcaggcttaagccgatcatcagtaccacaataccgctgacagtaggcgtaataacccgacgtaaatagggcaggataaaagaagagccgacaaccagaaatgcgccaacgaaggagacgccgagaagcgacgacatgattaactcttcgtgaaaaccgtcgcttttcatgctgctgcccagcgcaatcatgaccgtaacaaatgaaaaattgactgactgaattgagagtaggccagaaccgacgatgccgtagcggtttacttgtaaccaggtaccaataccagaggcgatcatcgccattgaaacaagataggcagttgtttcagcggaaagctgtaaggccgcacccacgattaacgcgggggttaccatcggaacgaaaattgccaacagatgggtaatggcaccaacgagagcctgatgaaagggagggcgatcctccagttcaaatataaggtcagagcctgcatggtttatatcagacatcccttcactccttttaaagtaaatttgatcatctgaattagtaaaataaattcccacgaatttggggcgcaggacgccttgagaacggcttatctcattttcgcagtcactatttagtcatcgttcaaacagagaaacaggccgccgaagcggccatttattacttatattttttccagcgcggtgagtattttctccggtgtgaaatgccattcgcgtaaccagatgccgcaggcatcgtgaattgcggtagcaatcgccggagctgcgccatttacaccgatttccgagatcgatttcgccccgaacgggccgactttatcgtcgctcggcaccagcacagcgcggaaatcacgcggaatgtcaccaattttcggtgcgccgtaactgcgtaaatcacgcgttaacgggtgaccttcggcgtcataaatgatctcttcgctcatactgtggccgatagctcgcagggtagcaccgtagatttgtcccaatgctaattccgggttgaccggtgtaccgcagtccagcaaggcgtagaatttatccaggcggatttcacccgtacgcgtgttgacggcaacttcagcgaagtttgcgccatacgggaaggcgaaatcaggcgtgatataactgccagttcccaccagtgaaccaaagccggtgccggtttcgcctttatgagcaatatccccgaagctgacttcgcctttcttgccgcgcacgacgcccggcgttgccagttgaacatctgccactgcctcacccaacatttgcgcgccgtggaacagaattttctcccgcagattttccgctgccaaacgcgccgcgttacctgagaagcaagtaccggacgaggcatatgcgcctttatcaaacaacgcatgatcggtatcaccggagataacatgcacgtcctgcggtgggcaatgcagcacttctgctgccagtttcgtcaccacagtatccagaccagtaccaatatccgcaccgccagaatgaacgataaaggtgccgtccgattccagtttgatcatgcagttagcctgatcgatatccgggatacccgatttctgcatgataatggcgacgccgcgaccgatgtgccagtcaccattttgcggtttcggtgacgaccattggatcatctcgcgaccctgacgcaggatctcttctagtgcacagctggcggcggaaggaacggaggtcggcgctttaccttcaccgattgcaccgagaattttcagctcttgcccttcgtgtacccggttacgttcgataatttccagttggtcgatctgtaactgttcagccagttccgctaatgccatggtgatagcgaagttacctttcggtgcgccataaccctgataagcaccatttgggcaaatgttgctgtagtaggtggtgacctgaaaatcgacgttatcgcacggatataacggcagcgacagcgccggtccgttacatggtacggtgagtgagtggttgccgtaagggccagtgttggcgcggaaatccatcttcactgctgtcaggcgaccatctcttttcgctcccagtttgacggtgactttcgcgacgtgacgagaggtgttagcaataaactcttcttcacgggtgtagcggaacagtaccggacgcccggtcacgcaggttgcccaggcgcacacttcttccagcaggatgtcctgtttggaaccaaaaccgccgccgactcgctctttaatgacatgaactttatgctgtttcatgcccacgaggcgcgcgacctggcggcgtaagtgccatggtacctgggtggaggcgtggataaccagacgatcgccgtccatacgagtaaagcagatatgtgtttcagtcgggcactgctgcgcttgcgttgagttataggttcgctcaatgatcacatcggcatcggcaaagcctttgtccatatcgccaatatgaccatgaatactggcggcgatatttttgcgggggcgagaaccgatcgggaagttaatgatcatatgctcgccgcgctgggctgcatggctgttatcgtcttccagagtatctggcgcaccagcaacatacaccaccggttcatcgtgcacgacaggcgcatcttccgccattgcttcgtcgatcgacattaccggcttaagcacttcatattcaacgtcgatgagcttcagtgcttcgagcgcaatttcttcactttctgcgaccaccgcagcaacacgatcgccgacgtgacgcattttcttgccgaacatacggcggtcaagcggtgacggttccggtgcgctctgaccccccggggtatagtagatatccgggcaattcaggtgagtaataacgtgaacgacgcccggtaaggcttcagctttgctgacatccagatgagtaatcagtgcgtgagcgtgtgggctacgtaacattttaatgacgcaggcgtcagccgttacgcggtcttcaacatagcagggtttcgcctgcaccattttcgcggcatcagttttaggataatgcttgccaatgacttcaaggtcgtcacggaaagtcggagcgatatcaatggtggcctgcggattatttttacgtgcaaccgccagttcaatgacctgatagtattgttgccagcctgcatcgcggctgaacaaaccagaaagcgcgtcgtcgatctcttcgcgggtaggtgcggcgatgcgatcgagaagatccgtgataatcagagctgcagctggatcgttataaccagactgcaccacgccaacatcaaccattgcctgttgaaccagacttaactcgttccatttgcccagagattctgcggtacgaatatctgccttctctaactgtgcggcaataagcaaggacgcgttaacgatattaccgttaaagattattgcgtcagaaccggcaaacccgaagccatcatcactgttgcgtacagagtgcattcccatgttaaacaacagcttttgcacgttttcgcctggattaacggttagctcctgaggcgcgccatttaaagtaaagtggatgatcatacggcttcctccccagcctgttggcagtcggcatacaggtcggctaccagaactcccgtgatatagcgtttataggccacgctgccccgcaaatcttcctgcgggaaaatggcgttggcgacagcctgttcaagtgcattgccttccagattttgtttttcgacatcgtgcagacgcagtgctttactggcgacgccatccagcgcaattcgcataccgtcgtggtctgtcattgcaacggctgccgtcacgacggttaaacctgcctgagaacggctaattttgcgggtcgcacaggtgcgatacggatctttaatgataatttcggttagcaggcgatcgcatgggctggccaggtagtcctcgattgacagcgtttcgccgttgccaaaaaccagttcagcatccagtgccagcaggacaggaagcagcaccgactcttcctgccgggcggcgatttcaccaccaatggtcgactgattacgaacatggcgtgagtaaacaaaaccgagggcttcacgcagtgctgcaggaataaatcgcgcatcacgcagtggctgcaagcgagacattgcaccaatccgcagtgcaccgttatcccagtcaacccagtccagttccagatcctgtaaggaaatggcaatctttttatcggtacgggttggtgtagcgttgagtttgctgcccccggcgaaccagacggcttcatcctggtagcggcgcttcagttccagcgcctgttcgacagagtcgggcctgaaaaattgttcaatcatcttctttccttatttaaccctcttccctgcgggaagagggcatctgtcatttatgccagcgtatccatccgacgccacatactggcagcggcttttctggcttgtgcataaatggaatcgcaatcaaagttaaactgacggtcttcatagaccatcacgccattgaccatcacgctgtgaacgctgcctgagcccataccgaaagcgatatgcccggcgatattgtctgccagcagcggcgtcggcgagttgtaatcgcaaatggttaaatcggctttgtaaccggcttccagaagaccaaatttcgcggcaaagttgcggctcatcagttcgttaccgttagtcagggctttggcaaaactgtcaggccacagcggaccacccgcatcgcgatgtttaaagaaggcaaatttcatctcttcaaacatgtccgaaccaatgccgtccgttcccaacgccagattgcggatgtcgctaaggtgatggttgtagccgacatggttgttcatgtttgaacgggcgttatgcaccaggaacgcatcgcgctgattgagtagggcgatgtcatctttcgacaagtacagcccatgagcgaccagcgttttgctgtcgatgagatcgaattgcgccagtcgtgccagcaggtctttgccgtaccagtggtgactgtaggaaacgtcgtaaaggtcttccgcagcgtgaatatgcaaaccacgacctgtggctttcacggcttcacgcagcatctccagaccggcatctggcacggtaaacggcgcgtgagcaccgatatgtgcttccaccagatacggctcggttgctgctttcttcgcctcatcaatctgacgggcaaagcggatgttttcttctacaccttcctgcaactctttgatgccgttgttacggtcagtagtttcaaaacaggtcattgcgcgcaggccaacttttaaaaatgcgtcgcgcaatgtggagagcgacccgccgatatacgctggagaggcatggtgatcgataaccgatgtacatccgctcttaatcgcttccagggaacaaatcagcccgctgtaatagagcgactcttcatcaagggcgcgatcgagcnnnnnnnnnnccaccagagatttttcagcgttgagatgaaatccgggcagggggcgatgtttgccataattccgcgggaaagccccgagtaaaaatggttgtgcgagcagacaattcccggcatcacaatccgaccatgcatctctttgtagctggcatcggggtagcgttgcgtcagggcatcgccgatagcgacaatcacatcattttcgatagcgatatcaacggcttcctgcactttcgccgggtgtaactgcactgcggtgacattcttcagaatcaacatgattacacctccacgcggcccagcagataatgatgatgctggtggacatggctgatgatgcggcacatatcgttcagctccggtggtacgttgttgaactgaccttcgctgtcgatgtttaacacccagctttggttattcagacgtactcgtacccggcaatcttccacaaggaagcctgggttgctgctgttatcaaagtcttgcgacaggctgaagacggtgattttgtctttgtatggtttaccgttccacggacagaactgagcgcagttgccgcattcgttacagtaagcgtcgaggtgcagcgtctggaaacggttctggaagcctgggaccgcaatggagacgttggcgcggttcgggcagacatccacgcacttgctgcaaacgtagttacattcaaggcagcgagcagcttcctgcgcgacaaacgcatcacgatcgtcactgttcaccagcgtgatagagatatcgcctttacgttgatagatttccgccggattgacgttgttccagtatttatcgttctggtgggaacggatattttcccgactaaggatggcatcggtcgcccgacgcgcggttccgacagcagcgacaatggaggatggtccgcgctgtacgtcgccgatcataaagacgtcagtcagacgagtttcgccattatggtcgacgtctggccagccgtttttgtccagcggcacgcccatcgcattcagggcttcagtatcctgctgttcaccaatggcggtgatcaggctgtctacatgcagtgttactgtttcgttggtttcaaccggacgacgacgacctttctcatccggttcgccaagcgacataacgcgcaaggttaaggtgccatcagcatcgaaacgttccggattattcaggaaacggaactccacgccgtcgtgcaacgcttcttcatactcttcgcgccatgcgggcatctcttgcagtgaacgacggtaaacgatcgttgctttttttacgcctggaacgcgtaacgccgcacgagcgcagtccattgcggtgttacccgccccgacaacgaccacatgtttgcccagcttgagcgctgtacccttgttgtattcacgcaggaaggggagtgatttccagacattttggttgtcgcccgccagtttcacaccgctatttttatcagtgccggtggcaatcagaacatagtggaagccctgattttttaactgttcaacggtcaaatcgggtgagcagccatactcaaatttcacgccgtgagcggcaacaaaatcgatatcgtgctgaattaactctgcaggaatacggaactgagggatgatatttttcaccacgccgcccgcattggcttcgcgttcaaacagcgtaaccggatggcccgctctggcaaggaagtaacctgcagccagacccgccggacctgcaccaatcacggcaaccggatggcgtgaaccagaaccggctggtttgtgccagcgttgcttatattcatcccaacctttttccagcgcgacttttttcagttcgcggatattcagtgcactgtcgtaatccaggcgggtacagttgtattggcactggtgatcgcaaatatgaccggtaatggcgggcagggcgttgcgttggtagataagttccagcgcgtcggcatagcggtgttcgccaagcagacggatgtattccggaatatcttgcttgatcgcgcaggcagtaacacagggggcaacgtagcagtcggtcagcggcaggtcttctgccacttcaatacgctcttctggcttccagtgtttctgggtgtattccatggttagcgcgtctgctgccagtctgttcagtcgttcgacgtcaacatggtcaagtccccaggcgtcggagccttccagctcgcgcatgcaggcacttaaacgcagatagccaccaggtttcagcaggtcggttgccatagtaatagggcgaatacctgtatcaaaaatatcgcggatagtcagctgactggcaccaccggaataagaaatgggcagtttgccgtcaaaggcgcgagagagaactgctgcaacattgatggagagcgggaacagcgcacggcctgacatatacatctcttcaccaggcagtgcgcctttattgttgatggtgccgagagtgttagtcagttttacgccaaagccgagtgatttttcttttgccagtgccatcaggcgttccagcatttccagtgcttgcgtcagcttgaggtcgtgatcaaatgactcttcttttaagcctatgtaaccgaaaccgcagacatcgaggatctcacgaacacgcgcgtaccccagtaaggtcgggttaagtttcacaaaggtgttgagccctttttcttccagcatgtagcggcaaatggcttcgatttcatgcggaggacagccgtgcatggtggagagggtgacgccatgcaccatactggtggggatgcgagcgggtaaggcttgcaagctttcgcgtttttcctgcaatccgtggcgggctaaaaatgcgtcatcctggagtaatttattcagcgtatcgcgatattgcgcgaatttcggatggtcagatgcgtccatcatattgtcgatgaactgttgcattggcggttgcttaataccttcgaggttgtaaccgacgctcatattaaagatgaacgatttaccggaatcagaaggttggaacatcgcttcgagaaggtgcagggcaaaccaggctttgaggtattcatcccaggctttaagcagggtaaattcggtagaccattcggtgttaaagcactcgtcttcggcatcaatacagggcttttccagctccaggcggtcaagaatttggacggtttttagttcgatgaaacgtccgccagtcagccaggaagtgacaatattttgcgcgagctgcgtgtgcgggccagcggcagggccgacgggagtggcacaggtttcaccgaagacgctaacagttttaccttttacaggtgagtaaaactgttgctcgggaataccaaagattgagcgttgttgttggtattcatcaaatatgcgcgtcaaaagttcctcaaacggaatgggacgcataatatcccccataaccctctccttagcttatacagatatcattgagtgaccggtgttgagaaatccggtggtttagggggatagagcaacaatcgcaccactcttgccaggtttggcgggaaatataaaaaaatgtgaggcggctcgaaacttaagggctttttgtgaatgaactcacaggtgctaaatgagaattaaaatcactcctgaaaattattattgccagcccatatatcactttttctcttttctcaaaatcagtgattccttatcattatgataaagagtgctggagggattaaatatttgaacgcaatcgtttaactacgttttttaaattttagtataccttttttgcgctgtaataaagtcgtccggagtatcaatatctaaaattatttctgcattttctacttcgacggaataatgagctcccataaggagtgcctgacgcatattggtgatattggggcgcttgattgcctgcatcaggcatggttttgacactaaaatcggatggccggggatgccattatggagtggcagtattgcgccatcatttcgtaacgaccagatttttctgaaaatatcgatggtgagggttggcatgtcaccgtgggtgagaaaacaatgttctgtttgcactgcgggtactgcggcctttactgatgttagtaaaccctgcgcataatctgggttgtggataatagtgatattgctctggttcgcataacgttcgtgcagttcattaccacgatagccggtgactaaaataattcggctacaaaactgcaacgcatttttgatacttgtatcaagaattgtcccctgttgccagggtaacatcattttccattgtcccattcttgatgataatccggcagcggtaattatacagtcgatggctgacatagtggttccattatttataggggctaataacgcctgataattgcgttacttcctgatggattaagttggggataatttatcccagagaggtcataaagactcgtgaaaagtatagttgacccatcggcattattcattgatttaggtgcgcagaaacgtcccactgtgatttctgttgttggtgctggggggaaaaccagcttgcttttttggctggcagaactgctccaggctagcggcaggcgtgtgttaatcacgacgacaacacatatgtttatgccaacgtctcactggcccgtggttttctgtcgtgatcccgccatgcttcctcatgcgtctcttacatcccccatttcattttgttttcacagctggaaagcgaaccagggaaaagtgcagggatttacgccagaagcgattgatgcactggtgcaacgaccagagtgtgacgtaattctcattgaagcagatggctcgcgtgcaatgccgttaaaagcgcctgatgagcacgaaccttgcatacccaaaagcagttgctgcgtgattgctgtgatgggaggacatattttgggcgcgaaagtgagcacagaaaatgtccatcgctggtcgcagtttgctgatattaccgggttaacacctgatgcaaccttgcaactgagcgatctcgttgcgctggttcgccaccctcagggggcgtttaaaaacgtaccgcaaggttgtcggcgagtctggttcattaaccgtttttctcaatgtgagaatgcgattgcgcaaagcgagctccttcaaccgctgcaacaacacgacgtagaggcaatctggctgggcgatatacaagaacatcctgcaatcgcgcgcagatttgtgaattagcggcccgggtattccgggttactgaaaggatatccattgaggttggtatgaatattttcacagaggctgcaaaactcgaagagcaaaattgtccgtttgcgatggcgcaaattgttgatagccgaggctcgactccccgccattctgcacaaatgttagtgcgcgccgatggttctatcgtcggtacaattggtggcggaatggttgagcggaaggtgattgaagagtcacttcaggcattgcaggagcgtaagccgcgattattccatggacgtatggctcgtaacggtgcggatgctgtcgggtcagattgtggaggtgcaatgtcagtatttatcagcgtccatggtatgcgtccacgtctggtgttgattggcgcggggcatgtcaaccgggcgatagcccagagtgcggcgctattaggatttgatattgccgttgccgatatttatcgcgaaagcctcaatcctgaactattcccaccatcaaccacgcttctccatgctgagtcgtttggtgcggcagtggaagcactggatattcgccctgataattttgtcctgattgccacgaataatcaggatcgtgaagccctcgacaaactcattgaacagcccattgcatggttggggttgctggcaagtcgtcgcaaggttcagcttttcctgcgtcaattgcgtgagaaaggcgtggctgaagaacatattgcccgtttacatgcgcccgttggttacaacataggtgcggaaacgccgcaggagatcgccatcagcgtgctggcagaaatattacaggtgaaaaataacgcgccgggtgggctgatgatgaaaccttctcatccttccggacaccagctggtggtgattcgcggtgcgggagatatcgccagtggtgtggcgctacgtctgtatcatgcgggttttaaagtgatcatgctggaagtggaaaaaccgacagtgattcgttgtaccgtggcgtttgcccaggccgtgttcgatggcgaaatgacggtcgaaggcgtcactgctcgcctggcaaccagctctgcggaagcgatgaaacttaccgaacgcggattcatccctgtgatggtagatcccgcctgttcattgcttgatgaactgaaaccgctttgcgtggtggacgctattctggcgaaacagaatttggggacgcgggcagatatggcaccagtaacaatcgcgcttgggccgggctttattgcagggaaggattgtcatgcggtaattgaaacaaatcgcgggcactggctcggtcaggtgatttactctggttgtgcgcaggagaataccggtgttcctggcaatattatggggcataccacccgacgggtgatccgtgctcctgctgcaggcattatgcgatccaacgtgaaattaggcgatctggtgaaagagggcgatgtgattgcctggattggtgagcatgaaattaaagcaccgttgacggggatggtgcgtggcttgttgaacgacggcctggcagtggttggtggttttaaaattggtgatatcgatcctcgtggtgaaaccgctgatttcaccagcgtttctgataaagcccgggcgattggcggcggcgtacttgaggcgttaatgatgttgatgcatcagggcgtgaaagcgacaaaagaagtgctggaagtggcttaaatgaaaatggccggatggtattacccacccggccttaaaattactgacaaatcaccgttccggttttgccttcaatcccttctttcgctttgctcaatacggtaatcagtgcttcacgacctgcgcgagagcgagcaaacgaggcggcagcttccactttaggcagcatagaacctttcgcaaaatgaccttcttcgataaagcgttcagcatcacttaatgacaggcgatcgagccactgttcattctctttaccgaagttaatggccactttttctaccgcagtcagaatgatcagcatatcggcatcaatcatttctgctaaacgggcgctggcccagtctttatcgataaccgcgctggcaccacgcagatggttaccttcacgaataacagggataccaccaccgccaacggtgatcaccacctggcctgcatctaccagagctttaaccgtttcttgttcaatgatatcaaccggttttggcgaggcaacaacacggcgatagccgcgaccagcatcttctttcagagtgtaaccctgttttgtcagttgctctgcttcttgctcggtaaagaacgaaccgatcggcttggtcgggttgaggaatgccggatcgttagcgtcgacttcgacctgagtaaccagcgttgctacaggtttattaatgccccgagaaagcagttcttctcttaacgcgttttgtagatcgtaaccaatataaccctggcttaaggcaacacagacagacatcggcagcattggcgagtgtgcttcagtttttgcggcagcttcaaaggcctggttaatcatgcccacctgtggcccgttaccgtgagtgacgatgacctcatgtccctgggcaattaaatcaacaattgcctgagaagtaatttttaccgctttcatttgcccggccagatcatcgcccagcgcattcccgcccagggcgagaacaattttcttactcatttttcctcactcatcattcttgattgtgtatagatccctggcagtggttagagcacgggagggacaaacggtttgcgtcgcaggaaacgacctcgcccggctttgcctgtaaaggtgccgtcacagaaaatcgtttcaccacgggataaggttctgacaatcgcgccctgacaggtaaaaccctcccatggcgagtagtcggcgttgtcgtggagatggcgatgctgaatttgttggctctgacgtgggtcgataatcaccacgtcgccatcggaaccgggcgctaataatcctttttgcggccacaggccaaacagcctggcgggcattgcgctggttaattcaacaaagcgttccggtgttatacgtcccgtcatcacgccactggaaaacagtaactgcatgcggttttccacgccgggtaagccatttgggcagcgactgaaatcgcctttagaaatttgcaggcgttgagccattgagaacgtgcagtgatcggtcgccaccacgtcaatcgcaccatcgctgatgccacaccacagtttgtcctgctcgcgtatgttacgcagcggtgggctaagaatgaacttc

SEQ ID NO: 201 - DNA, 32109 bp, Escherichia coli
  source 1..32109: mol_type = genomic DNA
ctataactcaatgttatataagaaattaataattcactgttttcaaaacatcggtttccctgctcaattgctttcattaaaccgcacgagtattttatttttaccgccggacggtaccctaaaaataaaataaggataatttatgcggcttagtgattattttccagaatcatcaatctcagttatatattcagcaaaagattggcaggaagctatcgatttctcgatggtatcattgctggataaaaactatatcagcgagaattacattcaggcaattaaagattccaccattaacaatggcccttattatattctcgcaccaggcgtggcaatgcctcatgcgcgaccggaatgtggggcgcttaaaaccgggatgtctttgacattacttgaacaaggtgtttattttccggggaatgacgaaccaattaaattactcatcggactctctgctgccgatgccgattcgcacattggcgctattcaggcgttaagtgaattactgtgcgaagaagaaatactcgaacaactcttaacagcatcatcagaaaaacaattagcggacattatcagccgcggataattactctctcctctacaggataatattatggaaaacaagtctgctcgtgcaaaggtccaggcttttgggggctttttgactgcaatggtcatccccaatattggtgcttttattgcctggggcttcataactgcgttatttattcccaccggttggctgccgaatgaacatttcgccaaaattgtcggcccgatgattacctatttattgcccgtgatgattggttctactggtggtcatctggtcggcggtaaacgcggggcggtcatgggcggaataggtactattggtgtgatcgttggcgcagagatcccgatgttccttggctcaatgatcatggggccgctcggtgggttggtcataaaatatgtcgataaggcactggaaaaacgcatacctgccggttttgagatggttatcaataacttctcattaggtatcgcggggatgctcctttgtctgctgggttttgaagtgatcggcccggcggtgttaattgccaatactttcgtcaaagagtgtatcgaggcgctggtacatgcgggttatctgcctctgctgtcagtcatcaatgaaccggcgaaagtgcttttccttaataatgcgatcgatcagggcgtctattatccgctgggaatgcaacaggcttcggttaacggtaaatccatcttctttatggtggcctctaacccaggtccgggcctggggctgctgctggcgtttaccttgtttggtaaagggatgagtaaacgttctgcgcccggggcgatgattattcacttcctcggtgggatccacgaactgtatttcccatatgtgctgatgaagccgctgactattattgccatgattgcgggcggtatgtctggtacctggatgtttaacttactggacggtggtctggtggctggcccaagtccggggtctatctttgcttacctggcactgacgccgaaaggctcgttcctggcgacaattgccggtgttacggtaggtaccctggtgtcctttgctattacttcgctgatactgaagatggaaaaaacggtggaaacggagagcgaagatgagtttgctcagtcagccaatgcggttaaggcgatgaaacaagagggtgcattctcgttaagcagggttaagcgtatcgcctttgtttgcgatgcggggatgggctccagtgcgatgggcgcgaccaccttccgtaaacgcctggaaaaagcggggctggcaatagaagtaaaacattacgcgatagaaaacgtgcctgcggatgccgatatcgtcgttactcatgccagtctggaagggcgcgtgaaacgtgttacggataaaccgctgatattgattaataactatattggcgatccaaaactcgacactttatttaatcaattaaccgccgaacataaacactgattacagaggtaaaaatgaaaaccaaagttgctgctatttatggcaagcgggatgtccgtctgcgcgaatttgaactgccagaaattaccgataatgaactgttagtgagtgtaatttctgacagcgtctgtttatcgacctggaaagcggcgttactcggtagtgaacataaacgcgtacccgacgatttagaaaatcatccggtcattaccgggcatgaatgtgccggggttattgtcgaagtgggtaaaaatctcactggcaaatataaaaaaggccagcgttttgtattgcaaccggcgatggggttaccaagcggatattcagcaggctacagctacgaatattttggcggtaacgccacctatatgattattcccgaaatcgccattaatttgggctgcgtattaccgtatcacggctcttattttgctgcggcgtcgctggcagagcctatgtgctgcattattggtgcttatcatgccaattatcacaccacgcaatatgtttatgagcatcgcatgggcgtcaaacctggcggcaatattgcactgctggcgtgtgcgggtccgatgggcattggcgctatcgattacgccattaacggtggcatacaaccgtcacgggtggtggtggtcgatatcgacgacaaacgcctggcgcaggtgcagaagctgctgccggtggatctggcggccagtaaaggcattgagctggtgtatgtgaataccaaagggatgagcgatccggtccagacgctgcgggcgctgacaggagatgtcgggttcgatgacatttttgtttatgcggcggtgcctgctgtcgttgagatggctgacgaattactggcggaagatggctgtctgaacttctttgccgggccgacggataaaaacttcaaagtgccgtttaatttctacaacgtccattacaacagcacgcacgtagtcggtacatccggcggttcaacggacgacatgaaagaggcgattgcgttaagcgccacggggcagttgcagccgtcctttatggtcacgcatatcggtgggctggatgcggtgccagataccgtgctcaatctgccggatatccctggcggtaaaaaactcatttataacggcgtgaccatgccgctcactgccattgccgattttgccgaaaaaggcaaaaccgatccgctgtttaaagagttggcgcggctggttgaggaaacgcacggcatctggaatgaacaggccgagaaatatctgctggcacaatttggcgttgatatcggggaggccgcgcaatgatgtccctggcgtggccattatttcgcgttacggaacaggcagcgttggctgcctggccgcaaaccggatgtggcgacaaaaataaaattgatggcctggcggtcaccgcgatgcgccaggcattaaacgacgtcgcttttcgtggacgagtggttatcggcgaaggagaaattgaccatgcgccgatgctgtggattggcgaagaggtgggcaaaggcgatgggccagaagtcgatatcgcggttgacccgattgaaggcacgcggatggtagcgatggggcagagcaatgcgctggcggtcatggctttcgcccctcgagatagcctgttacatgcgcccgatatgtatatgaaaaagctggttgttaatcgactggctgccggggcgattgatctgtctttgcctctggcggacaacttgcgtaacgtggcgcgggcgttaggtaaaccgctggacaagctgcgcatggttacgctggataaaccgcgcctgagtgccgcgattgaagaagcaacacagctgggcgtgaaggttttcgctctgccggatggcgatgtcgccgccagcgtgctgacctgctggcaggataatccttacgacgtgatgtacaccatcggcggtgcgccagaaggcgtgatttctgcctgtgccgttaaagcattaggtggggatatgcaggccgagctgattgacttttgtcaggctaaaggggattacacggaaaatcggcagattgcagagcaggagcgcaagcgttgtaaggcaatgggcgttgacgttaaccgtgtgtactcgctcgatgaactggtgagggggaacgatatcctctttagcgctacgggcgtgacgggcggcgagttggtgaacggtatccaacagacggcgaatggggtgcggacgcagacattactgatcggcggcgcggaccaaacgtgtaatataatagactccctgcattgatggtgatctatcggaagaccaatggcgacgctgacagaagatgatgtgcttgagcaactggatgcacaggacaatttattttcatttatgaaaactgcgcattctattttgctccaggggatacgccagtttctgccgtcgctgtttgtcgataacgatgaagagatcgtcgaatatgcagtgaagccgttactcgcccaaagcggcccgcttgacgatattgatgttgcgctgcgtttgatttatgcgctggggaaaatggataaatggctgtatgccgatatcacgcacttttcccagtactggcattacctgaacgaacaggatgaaacgcccggatttgccgatgacatgacctgggattttatcagcaacgtcaatagcataacctgcaatgcgacgctctatgacgcgttaaaagcgatgaagttcgccgatttcgccgtctggtcagaggcgcgttttagcggaatggtcaaaacggcgctgacgctggcagtaacgaccaccttaaaggaattaacgccgtgaaaattgaattaacggtgaatgggctgaacgtgcaagcgcagtaccatgatgaagagatagaacgcgtgcataaaccgttgctgcgtatgctggcggccttacagacggtaagtccgcagcgacgtacggtggtttttctttgcgctccgccggggacgggtaaatctaccttaactaccttctgggaatatctcgcgcaacaagaccctgaattacccgctatccagacgctcccgatggatggttttcaccattacaatagctggctggatgcgcatcaattgcgccccttcaaaggcgcaccagagacatttgacgttgcgaaactggcggaaaatctgtgccaggtagtggaaggggattgtacgtggccgcagtatgatcgacaaaagcatgatcctgttgaagatgcgttgcacgttaccgcaccactcgtcatcgtcgaaggaaactggttgttgctggacgacgagaagtggtgccagcttgcgcaattttgtgatttctcgatctttatcaacgcgccagctactgcgttgcgggaacgactggtagggcgcaagctggcgggaggggtatcgctggcagacgcagaagctttttatgaccgtaccgacgggccgaatgttcgccgggtgctggaagagagtctgcctgcaaatttgaccttaatgatgaccgctacgggtgaatatcgtctggtggattaacgttcctgattagaccatcttccagtcgcaccacacgagagaaatgacgccgggtaaatgcggcgtcatgactgattgctacgacgctcgtgcctcgctggccgcacttctccagccagctttcaaacacgctcaaccaattttcgtcaaaatcccgactcggctcgtccagcagcaatagtggcggagagagtgcttccaggcaggcgacggcgaccatccgtcgctgcgcactatgcagatccaacgggtgcgagttggcagtgtctgctaactgacaacattgcagggcagcatgggtacgttgagtgatttcatccgccgggcatttttgcagtttcaaaccaaatgcgatctcgtcagcgacggtgctgtgaaaaagttggttttccgcttcctgaaacagtacgccaacctttgccgcgcgctggcggtttttcaggtttttcatcgcctgttgttgcagcataaccgtaccggctgtgggcgtaagaagacctgccattactcgtaacagcgtcgattttcccgcgccattgtcgccggtcagcgccaaccattcaccttgtttgagttgcagagaaatgtcgcaaagacaatccgttgccgcgccaggccagcgataagatatcttatttaacgttaacatagtggctggagcgctccgttttgcaattgccacgcttgctggcagtagttcaggaaaggtgtgcgatgacgttcaaaaagaataatcagcgaaccacgttcaaacgcccagtgttgtaagcgctgcaacagcatttcgctggcctgcggagtcaggcggctaaaggcttcatcaagaattaagagctttggctgcatcgcgatggcgcaggcgatgaccacgcgctgtgtctctccaccggagagtgttgccgggtgacgatggcgcaacggctggcactcggtcagagtcagggcggcatcaatccgcgccataatctctgcttcagcaagacacagattttctggcccaaaggcaacttcttcttccacgctaaaggtacagccggagagctgcaaatagggcgattgctggacgagctggatggtggcggattgttcattaagcgggagatgcccaatgggcgtaccgaggagcgtccccgtgcctgttatctctcctggcagaaagtccggataccagcccgccatcagctgtgccagcgtacttttgccactgccgttgtcaccaaagatggcgaccatccccggtttgacatagtgaaagtcataacagaacggaggatgcgttgagtgtgtcgggcaataacggaactgttctaacgtaaccatatccacgctccgaattctgtcagcatcagcaagatcatggtgtaacgcgctacgcgttgtagggtgctatcggctggtgcccacaacgttgttcgtcggttgtggatccgaaatgcccgcatatccagcgccgcaccacggacagccagatcgttaagcgcattgtgtgttagcggaataattaacgcgggcatcgcacgtaaacgctgataccagccctcatccagcggcacgccgcgggcacgctgcgcttcatgaataatcgctaattgccgttttaactgctcaacgaccaataacggcccggcaaacagataagcgacgcctggcggcaggcgagaagcaaacagagcgcgaataaaacattgcacggggacgtactgcatccacaactgtgaggttgaaacaatcgccagaatccgcaaccagagcgtaatagcatgcgaccaccgttctggcgaacgcggcgtgccgcttagccattctgttagccagccaccgtgtaccagccacagcccggctcccagcgagaacatcagccagacgacatattttgcccgccgccgcgtggcctttagcgcaataaggcaaaaaaaggtcgccgcgctatagatcggcaaaatggtctgcgcgggcaggataagcgtggtgcaggccgccaatgcccatagtgttaatgaggtaaatggatgcatttagcgcacggcagccattgccggaaaatggcgcgtggtgcgaatcggcagctggcgcagtaaaagccagacaatcaccgctgtaagaattttatcgaccaggttcgcgcctatcaccgtaatcgccaccgactccaccaggttttgccccatagagtgcatccaggcaacgaacaaatcggctccgctaccggtgacaccgccgaacagcgcagtacgcagcggtacagcgacgaccgttaccgcaagcgtaataatcacgccgctgacaacgacttttggcagggtgcgaaaccaacccgctcgcgccagccaaccggcgaccaggccgatgaccatcgcgacgggggcaaatgcggcggcgatcgggtcggtcagcaatccccagagtaaattggtcagtaagccggttagcatcccgatcaccggaccaagcagtaccgcgctaataagggtgccgatggagtcgagaaatataggtaatttgaccatgctggccagttgcccgccgatcatattgatggcgatagatataacgatcaacaccagtgcctgactggaaaagtggctacgcgccataagaaaacctctctgaaagtagttatttaacgggggaaatatgcaactcgtcgtaaccagaaagcgcgcaaggttggcggctaaacgccagttcctcaaggctaccgatcactagttcaagcgtggtccgcacggtacagccgggcatcatatgaccgccaagcatcgtgccgtgtggatcggaaacgcagagatgaagatgctcaccactctgttccagcgtgccgtttagtgagatcacttcgaatgtaccgttcaggagcgtggtgccttcttgcccggcatagcgcaaggcgacgtcagtcaggctaccggtacagcctgcaatccaggcggcatgaagttgctgctgctgtgcaaaagcgtgtagctgggaaaaaacttcctgcccggggagcaggcgcagtgcgtaaaagcgtgcggaggaagaatatgggtagggcaatgtcatcattggagtactccgaaactcggacgtattgcggataatatcgacgctgcatcagtcatattctgatataagtcagggtttgtgacggcacaacgaaaagattttgctacgcttattcgtgattctgcaaagtggaataaattccacaggggcggggctgaaaacgtgacgtaagtcagatatttgttttctttgactggacaatcattccttttattccacgtttcgcttatcctagctgaagcgtttcagtcgattaaatgttcgacaattaaccaatcagtcgcagtttgcgacaggtaaggtttccccggacgatttgctggattactctgtctggcaaatttgctcagggaaaaccttgcaggagatctatgaccgtacgcgtagcgataaatggcttcggtcgcatcgggcgtaatgtggttcgtgctttgtatgaatcaggacgccgtgcggaaattaccgtggtggcaatcaacgaactggcggatgctgcgggcatggcgcatttgttgaaatatgacaccagtcatggccgttttgcatgggaagtacgacaggaacgcgatcaactttttgttggtgatgacgccatccgcgtattgcatgaacgttcactgcaatcgctcccctggcgtgaacttggcgttgatgtagtcctcgactgcaccggcgtatatggctcccgcgagcatggcgaagcgcatattgccgccggggccaaaaaagtgctcttttcacatcctggcagtaacgatctcgacgcgaccgttgtttacggcgtcaatcaggatcaacttcgtgcggaacaccgcatcgtttctaacgcttcctgtaccacgaattgcataattcccgtcatcaaattgttagatgatgcgtacggtattgagtccggcactgtgaccacaattcactccgccatgcacgatcaacaggttattgatgcataccatcctgacctgcgtcgcacccgggcagccagccagtcgatcattccggtcgatactaaactggccgccggtatcacacgattttttccgcaatttaacgatcgctttgaagcgattgcggtacgtgtgccaaccataaatgtgacggcaatcgatttaagcgtgacggtgaagaaacctgtaaaagccaatgaagtcaacctgttgctgcaaaaagcagcacaaggtgcatttcatggtatagttgactatacggaattgccgttggtctctgtagattttaaccacgatccgcacagtgccattgtcgatggcacccaaacccgggtcagtggcgcacacctgatcaaaacgttggtctggtgcgataacgaatggggctttgctaaccgaatgctcgacacgacgttagctatggctactgttgctttcaggtaagacgcaagcagcgtctgcaaaacttttagaatcaacgagaggattcaccatgtctgtaattaagatgaccgatctggatcttgctgggaaacgtgtatttatccgtgcggatctgaacgtaccagtaaaagacgggaaagtaaccagcgacgcgcgtatccgtgcttctctgccgaccatcgaactggccctgaaacaaggcgcaaaagtgatggtaacttcccacctgggtcgtcctaccgaaggcgagtacaacgaagaattctctctgctgccggttgttaactacctgaaagacaaactgtctaacccggttcgcctggttaaagattacctcgacggcgttgacgttgctgaaggtgaactggttgttctggaaaacgttcgcttcaacaaaggcgagaagaaagacgacgaaaccctgtccaaaaaatacgctgcactgtgtgacgtgttcgtaatggacgcattcggtactgctcaccgcgcgcaggcttctactcacggtatcggtaaattcgctgacgttgcgtgcgcaggcccgctgctggcagctgaactggacgcgctgggtaaagcactgaaagaacctgctcgcccgatggtggctatcgttggtggttctaaagtatctaccaaactgaccgttctggactccttgtctaaaatcgctgaccagctgattgttggtggtggtatcgctaacacctttatcgcggcacaaggccacgatgtgggtaaatccctgtacgaagctgacctggttgacgaagctaaacgtctgctgaccacctgcaacatcccggttccgtctgatgttcgcgtagcaaccgagttctctgaaactgcaccggctaccctgaaatctgttaacgatgtgaaagctgacgagcagatcctggatatcggtgatgcttccgctcaggaactggctgaaatcctgaagaatgcgaaaatcattctgtggaacggtccggttggcgtgttcgaattcccgaacttccgcaaaggtactgaaatcgtggctaacgctatcgcagacagcgaagcgttctccatcgctggcggcggcgacactctggcagcaattgacctgttcggcattgctgacaaaatctcctacatctccactggcggcggcgcattcctcgaattcgtggaaggtaaagtactgcctgcagtagcgatgctcgaagagcgcgctaagaagtaaaaaatcacagggcagggaaacctgcccttgtttcagcgcgcttttagagcacgcattttttcatactctaaataattcgagttgcaggaaggcgacaagagagtgaatccccaggagcttacataagtaagtgactggggtgagcgaacgcagacgcagcacatgcaacttgaagtatgacgagtataaggcccgacgatacaggacaagagacatgtctaagatttttgatttcgtaaaacctggcgtaatcactggtgatgacgtacagaaagttttccaggtagcaaaagaaaacaacttcgcactgccagcagtaaactgcgtcggtactgactccatcaacgccgtactggaaaccgctgctaaagttaaagcgccggttatcgttcagttctccaacggtggtgcttcttttatcgctggtaaaggcgtgaaatctgacgttccgcagggcgctgctatcctgggcgcgatctctggtgcgcatcacgttcaccagatggctgaacattatggtgttccggttatcctgcacactgaccactgcgcgaagaaactgctgccgtggatcgacggtctgctggacgcgggtgaaaaacacttcgctgctaccggtaagccgctgttctcttctcacatgatcgacctgtctgaagaatctctgcaagagaacatcgaaatctgctctaaatacctggagcgtatgtccaaaatcggcatgactctggaaatcgaactgggttgcaccggtggtgaagaagacggcgtggacaacagccacatggacgcttctgcactgtacacccagccggaagacgttgattacgcatacaccgagctgagcaaaatcagcccgcgcttcaccatcgcagcgtccttcggtaacgtacacggtgtttacaagccgggtaacgtggttctgactccgaccatcctgcgtgattctcaggaatatgtttctaagaaacacaacctgccgcacaacagcctgaacttcgtattccacggtggctccggttctactgctcaggaaatcaaagattccgtaagctacggcgtagtgaaaatgaacatcgataccgatacccaatgggcaacctgggaaggcgttctgaactactacaaagcgaacgaagcttatctgcaggggcagctgggtaacccgaaaggcgaagatcagccgaacaagaaatactacgatccgcgcgtatggctgcgtgccggtcagacttcgatgattgctcgtctggaaaaagcattccaggaactgaacgcgatcgacgttctgtaagatattcctttctgcttatctcaaggcccgctctgcgggtctttttttcgccaaaagcaaaattgcctgatgcgctacgcttatcaggcctacacgtatcctgcaatatattgaatttgcaggtttttgtaggccggataaggcgttcacgccgcatccggcatgacaaagcgcacattgatatctgtctgagccccgctctgcggggattttttcgccaaaagcaaggtgattcagatgagaaatctgtgatctatttggcaaaattatgctttattgtttacccttgtcagactgcccgtcataaggcggcggagtgtatttctccattttgagtcagttgaaaaggaatattgaatggaagatttgaatgttgtcgatagcataaacggcgcgggaagctggctggtagctaaccaggcgctgctgctaagttatgcagtaaacatcgtggcggcactcgcgatcatcatcgttggtttgattatcgcgcggatgatttccaacgcggtgaatcgcctgatgatctcccgtaaaatcgatgccactgttgctgattttctttctgcattagtccgttacggtattatcgcctttacgctaatcgctgccctgggacgcgtgggtgtacaaacagcgtcagtcattgctgtactcggtgccgcaggcttagctgttggtctggctttgcaggggtcactttctaacctggccgctggcgtgttacttgtcatgttccgcccgttccgtgccggagaatatgttgacctcggcggcgtagccggtactgtgctgagtgtgcagattttctccaccaccatgcgtactgcagacggtaaaattatcgttattccgaacggtaaaattattgccggaaatattattaacttctcccgcgagccagttcgccgtaacgaatttattattggcgtggcgtatgattccgatatcgatcaggttaagcagatcctgaccaatattatccagtctgaagatcgcattttgaaagatcgcgaaatgactgtgcgcctgaacgaacttggtgcatcgtcgattaatttcgtggtccgcgtctggagcaacagcggcgatctgcaaaacgtgtactgggatgtgctggagcgtattaaacgtgaatttgatgccgccggtatcagcttcccgtacccgcaaatggatgtgaactttaagcgggtgaaagaagacaaagctgcgtaatcaacgctgaggccagataatactctctggcctctctcttattagttattctgattgccaattaatattatcaatttccgctaataacaatcccgcgatatagtctctgcatcagatacttaattcggaatatccaacgtgttttcttattactttcaaggtcttgctcttggggcagctatgattctgccgctcggcccacaaaatgcttttgtgatgaatcagggcattcgtcgtcagtaccacattatgattgccttactttgcgctatcagcgatttggtcctgatttgcgcggggatttttggtggtagcgcgttattgatgcagtcgccgtggttgctggcgctggtcacctggggcggcgtagtcttcttgctgtggtatggttttggcgcttttaaaacagcgatgagtagtaatattgagttagctagtgccgaagtcctgaagcaaggcagatggaaaattatcgccaccatgttggcagtgacctggctgaatccgcatgtttacctagatacttttgttgtactgggcagccttggcgagcagcttgacgtcgaaccaaaacgttggtttgcgctcgggacaattagcgcttctttcctgtggttctttggtctggctattctcgcagcctggctggcaccacgcctgcgcacggcaaaatcacagcgcattatcaatctggtagtgggatgtgtcatgtggtttatagccttgcagctggcgagagacggtattgctcatgcacaagccttgttcagttaggcgctatctgatggaaaaataaaacagaggcgctaagcttgcctccagaggtcctgaattttgggcaagtcaattaacacggagagactaacgtgaagttcaaagttatcgccctggcggcattaatgggtattagcgggatggcagcgcaggctaacgaattgccggatggaccgcatattgtcacctccggtacggcaagtgtggatgcggtgccagacattgccactcttgcgattgaagttaacgtggccgcgaaggatgccgctacagccaagaaacaggcagatgagcgcgtcgcacaatacatttccttccttgaactcaatcagatcgcgaaaaaagatatcagctcagcgaatttacgcacccagccagattatgattatcaggatggtaaaagtatcctgaaaggctaccgcgctgtgagaacggtggaagtcacgctccgtcagttagacaaactgaattccttgctggatggcgcgctgaaggcgggtcttaacgaaattcgttcagtgtcgctgggcgtggcgcagccggatgcctataaagacaaagcgcgtaaggcagcgattgataacgcgattcatcaggcgcaggaactggcgaacggctttcatcgtaaactggggccggtatatagcgtgcgctaccatgtttccaactatcagcccagcccaatggtgcggatgatgaaagccgatgccgcgccggtgtctgcccaggaaacttacgagcaggccgctattcagtttgatgatcaggtcgatgtggtcttccagttagaacctgtggatcaacaacccgctaaaacacctgcagcacaataatacttgtagcccgacgtattcgtcgggctaatgcctttacccgatattgcctcctttttctgtaattttctgtaaaaccatgacgtaatcacctatctttgctcgcggtttcatcaaggataggctgactgaaacggttaagcggacaaggatgcggggaggggggatggacatttttatttcgaaaaagatgcgcaatttcattttattagcgcaaaccaataatattgcccgggcggcagaaaaaatccatatgacggcttcgccatttggtaaaagcattgccgcgctggaagaacaaattggctatacgctatttacccgcaaagataataatatcagcctcaataaagccggtcaggaactgtatcaaaaactgttcccggtttatcaacgactttctgcgattgataatgaaatccataactcagggcgtcgttcacgagaaattgtgattggcatagataatacttatccgacaattattttcgatcagttgattagtctcggagataagtatgaaggcgtgaccgcccagccagttgagttcagcgaaaacggcgttatcgataatctttttgaccgtcagttagattttattatctccccacagcatgtatctgcacgagttcaggaactggaaaacctgactatcagtgaattaccaccgctgcgattgggctttctcgtttctcgccgttatgaagggcgtcaagagcaagagctgcttcaggagctgccctggctacaaatgcgctttcaaaaccgggctaacttcgaagcaatgattgatgcgaatatgcgaccttgtgggatcaatcccaccattatttatcgtccctacagttttatggccaaaatcagcgccgtggagcgcggacattttctgacggtgatcccgcattttgcctggcgactggtgaatccggcaacgctgaaatattttgatgctccgcacaagccgatgtatatgcaggaatatctttattcaatcagaaatcatcgttataccgccacgatgcttcagcatattgctgaagatcgtgacgggacgagtcattaacccagcatcgagccggttgcaattaaattacggtgtaagtcgaagacgtggctaagatcgtggtgaatatgtccgccaggcgcattttccagatagcgatgcagataatcctgatacataggatgtgcacaattatcaatgatagtgcgggcgcgttgaagcggggaaagaccgcgcagatcggcgatcccttgttcggtgatgatcactttgacgctgtgttcgctgtgatcaacatggctgcacattggcacgacggttgagatcttgccttctttagcaatcgacggggccataaagatcgacagatacgcgttgcgttcaaaatcaccgctgccaccgatgccgttcatcagatcgaccccggctacgtgcgttgagttggcatgcccgtaaatatcaaactccaggccgacgttcagagcgatgacgcccagacgacggatgatttccgggttattggaaatctcctgcggacgcaacacaatgcggctggcaaagtaatccatattgtcgtaaatcttgcgcagggaatcggccgagattgtcaggctggaggcgctggccccgctgattttgccggtttccagtaaatgcaccaccgattcctgtagcacttccgaatacatcataaacggaggaatttccgggttttcccccagacgcgccattaccgcattattgatattgcccacgccactttgcagcggcagaaattccggcggaatacgcccatgcgccatttcctgcaacaagaacgtgaccacgttatcggcaatctgctggcacatgggattttgcttatccagcatattaccggcgtcgggcaagttggtttccacgacggcgacaatctttttcggatcgatttgcacatagcgggtaccgacgcgatccattgcatggaagatcgacacgctattgcgccgcggtggcgcgccaggaatcacaatatccgccagttctgcaacgcgcggatcgtgatagtgattgagttcaatgatcactttcttcgcccgcagcagccaggtcggcgcattaccgatcccgctggttaaccagactcgaccatccggtgccagtgccgatgcttcaatgacggcaacatcaatgtcgccgaagaaaccgtaattgaccatttgcgccacttcgctcaaatgcaggtcaacgaaactcaccgcgccctgattgatctttttacgtaaaccggacgatgtttgatatggcgcacgccaggaaacagcatcggcgtcagaaagtacatcgtcagcggcggcgctgattgacgcacccgtcagaaggcgaatttgatacggctttttggcctcatgctgttcgttagctctgcgggcaatcgcggtgggtagggctttcggcgaatccgccggggtaaagccgctaaatgccaccatgtcgttatgctggataatttctgccgcttcattggcggtcatccttgtccactgagtttccatttttactccttcgttcgcagggattaatgaccaacgaaattaggtttacgtttttcgaggaaagcgttcatcccttcctggtaatcttcgctgtcatacaccgcgcggcgcatcccctgaatacgttcaaattcatcggagttcatggtgtgtgcttcgcccagtacacgcagctcttctttgataacggcaatggctaacggcgcttnnnnnnnnnntgcgccatttgtaaggtgaaatcttccagttcttccacttccacaacatggttgaggatgccgacagccagcgcgcgctgggcggtgattggcgaagcggtaaaaatcagctctttgacaatgtggaagcccgcgtcgcgggtcaggttgtgaatgccgaccaggttatacgggacgccgaggtttacaggcgtcattgagaaggttgaggtactggcggcgatgatcagatcggaactcatgatcatttcaaatgcgccaccccaaacactaccttccaccatcgaaatgatcggtttcgggaatttttggatcatgcgggtgatttgacgcaatggatcatcataggagagcggatcgcgaccgccagacggcagttcgtgaatatcgtggcctgcggagaagactttggatccactcggcgcgcgcaaaatgatacannnnnnnnnngcgaatttccggccggttgagatcgcttaatgcctgcataagatcatcaataaagactttacttaaggcattaagtttgcggccatagttaaactcaatgaccgccactttgttgatagtgacaacgttaacatactgataagacataaaaattcctttaatcaaaatattgcgtctggataaattcactgagctgccgcaggccggtgcgcggtgagagcgtattgtttttgaccgctaaaagcgtctggcggtaatagcgatcgaaatcttcattcgcgaacaggtgattcagtacttcttcttcggtctgcttacgcagccattccaccgattgttgttgccgcacttgttgtaaacgaccactggcagttagcgcggttttgaagttgatgatggcgtgccagatctcatcgattccacgtttttccagtgcgctacaagtcagaacccgtggctgccattcgtcgtatttacgtcgcagaatatgcagggcactctcgtacatatgccgggcaatggcgacattggtatggttatcgccattgtctttgttgataacgagcagatcagccacttccatcagcccttttttaatgccctgcagatcatcgccgccaccggcaatttgcaacgagataaaacagtccaccatgcgggcgacttccgtttccgactgcccgacgccaaccgtttcgacaatcactacgtcataacccgccgcttcgcataacagcattaattcccgcgctcgctgactggcaccgcccagatgaccggaggatggtaccgggcgaataaacgccgcttcggcacgcgccaggtcattcatgcgggttttatccccgagaatgctaccgccagtgaccgggctgctgggatcgaccgcaataaccgcgacctttaatccctctcgaatcaacaacatgccaaaggcctcaagaaaggtacttttccccgcgccgggggtgccggtaacgcccagtcgcagggtgttaccgcagtacggcataatggtatcaagcagctgcgtacttagtgcctgatgacgcgggtgacggctttccaccagcgtcatggcctgggcgagtgtggcacgctcaccctgacgtaagcggcgaatactttctgccagcgtggcttcattaatcatgatgctggcttatcagattcagtacgtcgcgcacactgtcgagcataggtgtacctggaccataaatcgccgccacgccgcgctcttgcaggaaggcgtaatcctgcggcggaatgacgccacccgcgaccacgcagatatcttcgcgtccccattttttcagcgcttcgaccagttccgggatcagcgttttatgaccggcagccagtgaggatgcgcccactacgtgaacgtcgttttctacggccaggcgggcgatctcttcaggtgtagagaacatcgggcttaaatctacgtcgaaaccgagatcggaataggcgctggcgatcactttcgcgccgcgatcgtgtccatcctggcccatcttagcgatcagaatgcgcgggcgacgaccattgtcggcaaggaactgctccgtttgcgcaacaatggcatcgaactcggaggccgatttctccgactgatgatagctttgcgcaattacgccggtaacacactggcttggcaccagataacggtcgaaagcggcttccagcgcatcggaaatttcacccagggtggcgcgaacgcgagcggcattaacagcggcagccagcaggttttcgttatgctgtgcggcgtgagtcagggcgttcaacgcggcggttacggcggcatcatcacgggtggcgcgaatgcgttccagcgaagcaatttgctcgttacgcaccatcacgttgtcgatctcaagtacatcggtttcgtcttcgtgatccagtttgtacttgttgacaccaacgatgacacgcttgccctggtcgatcagcgactgttcgcgcgctgaggcctcttcgatcattcgttttggcagacctgcttcgatcgctttcgccatgccaccggcttcgtcgatctgttggataatagctctggcttgtttgacgatttgatcggtcagcgactcaatgtaataggatccggccagtggatcgacggtgcggcagagttctgattcttcctggatgatgatctgggtgttgcgggcaatgcgtgctgagaaatcggtaggcaaaccaagcgcttcgtcaaaggcgttggtatgcagtgactgagtaccgcccagcgtcgcagccagcgcttcaatggtggtgcggataacgttgttatacggatcctgttcagtcaggctccagcctgaggtctggcagtgggtacgcagcgccagtgatttcgggtcctgtgcgccaaatccactgacctcttcgctccataaataacgtgccgcacgcaacatggcgacgttcataaacagatccatgccgatgccgaagaagaacgacaggcgaggagcgaagtcatcaattttcagtccggcagagattgctgctttgatgtactcaatcccatcagcgagcgtaaatgctacctgctgcacgcagttggcacccgcttcacccatgtggtaaccgctgatactgatggtattaaatcgcggcatgttgccggaacaccaggcgatgatgtcggcgataatgcgcattgacggttttggcgggtaaatataggtgttgcggcagaggtactctttgagaatatcgttttgaatggtgccggtcagtttatcaggtgtaacaccttgctcttctgcggcgacgatataaaacgccagtactggtagcactgcgccattcatggtcatcgaaaccgacattttatccagcgggatctggtcgaacaggactttcatatcttccacggtgtcgatagcgacgcccgctttgccgacgtcacccgccacgcgtgggttatcggagtcgtagccacggtgggtggcaaggtcaaacgcaacggaaagacctttttgcccggcggccaggttacggcgataaaaagcgttggactcttttgctgttgaaaaaccagcatactgacggatggtccacggttgggcggtatacatagtggcacgcgggccacgaacgtagggcggcaaaccaggaagggtacctgtcaccttcagattatcgagatcggcttcggtatacagcggcttgatggcgatcccttccgcggtttgctgaaccagcgagtcgacagttttctcccgacggctcaattccttgttggcaagctgttgccactcctgctcgttagacattatttgctccgtaaaacgcaatcaaaatgagggtatttgcgcttacggtgagctttttacgtgggtttgtcgccagcaaaaaaaatgcattcagacgtcgttttttgccgcctgagatttgtctattttgtgatgtgattcaaggaatacaaaaagaagtgaggacaacgcctgatatgtgctatcaggcattatttgatggattaatcctgacgaaggactttgtgaccataatcgagtaacgcatcagtgactttacgcatcatgcggctttcaggagcaaagcggtgccagtagagcatccgtcgttgaaatagcccaggcgttaagtcaatcagttcaccgctggccagctctttctcgatttgcaggtgcgggatcatacagcaggtggtgccctggcgagcaagttgtacgaacgcttctgaagaattaacgatatggcagggcacgctgcctggaggcagatcgaagttttgctgcaaaaaggcctggtgcatatcgtcaagatggtcaaacgcgaccactggcgctttcagtaatgccgaacgcgttacgccgttagggaaatatttttcggcaaagggttttgagctgacgaacagatagtcgagcgcaccaagtttatcgacaagacaactcggcagcgcctgatgttgaatactcaccgcgccgaccacttcgccgcggcgcagacgttcctgagtgcgggtttcatcttctacctgcaagttgaggcggataggcgaatcagccaacacaggagccagtgcaggaagcaaccacgtcgccagactgtcggcgttgaccgccagtgaaagcagcagcggagtcgaaccggtttgttcatcgcccagccactcttcttccagcaactccacctggcgcagcagtgccagcagtttttgcccttgttccgtcgggcgcggcggtacggtacgcaccaacagcggctgcccgaacatattttccagttgcttaatgcgctgtgagacggctgattgtgtaatgcacagcttttgtgccgcgcgctcaaatcctcgttcacgtatcaccgcatccagtgcctgtaatgttctgtagtccgggcgtttcattgctgttgtctgctcctggtaaatgctttttcctgcactatgacacaattttgtgtcaggttgcatataccgaagccgtcggcgggtaacatttgtattcgtggttaaacgcgcagcttaaaagatcagggatttgcgctaatgcatttcgctcagcgagttcgcgccctggttgtgttgaatggcgtggcgttattgccccaatttgcctgtaaacaggggcttgcgaacggtgaactggtgcgcctgtttgcaccgtggagcggcatacccagattgttatatgccttatttgcggggcgaaaggggatgcctgccattgcgcgatattttatggatgagttaaccacgcggcttgccaacggggtctgaatcgctttttttgtatataatgcgtgtgaaatttcataccacaggcgaaacgatcatgacgcaggatgaattgaaaaaagcagtaggatgggcggcacttcagtatgttcagcccggcaccattgttggtgtaggtacaggttccaccgccgcacactttattgacgcgctcggtacaatgaaaggccagattgaaggggccgtttccagttcagatgcttccactgaaaaactgaaaagcctcggcattcacgtttttgatctcaacgaagtcgacagccttggcatctacgttgatggcgcagatgaaatcaacggccacatgcaaatgatcaaaggcggcggcgcggcgctgacccgtgaaaaaatcattgcttcggttgcagaaaaatttatctgtattgcagacgcttccaagcaggttgatattctgggtaaattcccgctgccagtagaagttatcccgatggcacgtagtgcagtggcgcgccagctggtgaaactgggcggtcgtccggaataccgtcagggcgtggtgaccgataatggcaacgtgatcctcgacgtccacggcatggaaattcttgacccgatagcgatggaaaacgccataaatgcgattcctggcgtggtgactgttggcttgtttgctaaccgtggcgcggacgttgcgctgattggcacacctgacggtgtcaaaaccattgtgaaatgatctgacgggggaacctcccccgttaaaaaaattctcttcattaaatttggtgacatgtgtcacgcttttaccaggcaattgtcgattgctctaaataaatcctctaaaccagcatattcatccaagaattacctttgcgtgatatttcctcaacatcgcgacgcaaacgttcatattgccgcaatattattttttgatatgttgaaaggcggatgcaaatccgcacacaacatttcaaaagacaggattgggtaaatggcaaaggtatcgctggagaaagacaagattaagtttctgctggtagaaggcgtgcaccaaaaggcgctggaaagccttcgtgcagctggttacaccaacatcgaatttcacaaaggcgcgctggatgatgaacaattaaaagaatccatccgcgatgcccacttcatcggcctgcgatcccgtacccatctgactgaagacgtgatcaacgccgcagaaaaactggtcgctattggctgtttctgtatcggaacaaaccaggttgatctggatgcggcggcaaagcgcgggatcccggtatttaacgcaccgttctcaaatacgcgctctgttgcggagctggtgattggcgaactgctgctgctattgcgcggcgtgccggaagccaatgctaaagcgcaccgtggcgtgtggaacaaactggcggcgggttcttttgaagcgcgcggcaaaaagctgggtatcatcggctacggtcatattggtacgcaattgggcattctggctgaatcgctgggaatgtatgtttacttttatgatattgaaaacaaactgccgctgggcaacgccactcaggtacagcatctttctgacctgctgaatatgagcgatgtggtgagtctgcatgtaccagagaatccgtccaccaaaaatatgatgggcgcgaaagagatttcgctaatgaagcccggctcgctgctgattaatgcctcgcgcggtactgtggtggatattccggcgctgtgtgatgcgctggcgagcaaacatctggcgggggcggcaatcgacgtattcccgacggaaccggcgaccaatagcgatccatttacctctccactgtgtgaattcgacaacgtccttctgacgccacacattggcggttcgactcaggaagcgcaggagaatatcggcctggaagttgcgggtaaattgatcaagtattctgacaatggctcaacgctctctgcggtgaacttcccggaagtctcgctgccactgcatggtggtcgtcgtctgatgcacatccacgaaaaccgtccgggcgtgctaactgcgctgaacaaaatcttcgccgagcagggcgtcaacatcgccgcgcaatatctacaaacttccgcccagatgggttatgtagttattgatattgaagctgacgaagacgttgccgaaaaagcgctgcaggcaatgaaagctattccgggtaccattcgcgcccgtctgctgtactaattccccttctctgaaaattaacgggcaggtcactgacttgcccgtttttttatcccttctccacaccgttgccgcgttgcgcattctactttgcgagtctgctccagaaaataaatcaaagtcagatcaatgcgttgtgtttatttaatggggatttacgatggcgggacagcatggggctgtaacggtaaagccctcaccgaagcgagggcttaaaggagaagggttatgatgcgacttgtcatcatactgattgtactgttactgataagtttcggagcttattaacagtcagtctcaggggaggagtcatcctcccttacccttactcactaaattaggtcaaagaatcaacgatgtcaatcagggcgatgcggggtgcatcgccctgaaccgaactttttgatagccacttcatcgcccacgtttactgccgtaatagatcctttttcccaaaaattatctctgttttgcatggggtttttcgagcacgctcgaagaaaagatttaaaggtagatcaatgcgttgtggttatttaaagagagcttacgatagctgggcagcatggggctgtaacggtaaagccctcaccgaagcgagggcttgaaggagaagggttatgatgcgacttgccatcatactgattgtactgttactcataagtttcccagcttattaacagtcagtcacaggggaggagcaatcctcccttacccttactcactaaattaggttaaagaatcaacgatgtcaatcagggcgatgcaggtgtatcgcccttaccactcccagactttcgacggtgtaaccaccgcaggaagagggatatcccactcttcaacggggagtttttccaccaactgacaatcatgcgcataacccaccggttgcgttttatagtgctgccagttttgtaaggtccgatcataaaaaccaccgcccattcccaggcgctgaccgtactcatcaaaggcgaccagcggtgtgatcagcacgtctaatcgggaaaggggtagcacgtcacgcacatccagttttggctcatggattttcaacctgttcatcaccagttcgctttgcggatggtaattcaggaacagcaaattaccggcactaaagggatgcaaaactggaagataaacgcgcttaccggcgcgccagagttgttctatgagtggctgggtgtcgagttcgccatcaaaagagaggaatacagcgaccgtatgtgccatcaccaccgggggataagtcatcatccgggtagcggcttgttgacccatttcttgctgttgttccggcgttaacgcacgacgacgttgccgaatcattttgcggatttcttgtcgggataatgtcagtgggagttctggtagttgcgtcatggctggtgccagataagaagggaatctccgagatgccgccgcaggctgtaacccttgaacccttggttcaaggtgaatgtgtcgtcgcagttttaaggcttctcggacggaccgagcatgctcaccaaccgcggagcgccacattcttgtggtatgaaatatcggctcaggggactggcccgcttgcgaacatctcagagaaattttgtcttcacggttactctaccacagtaaaccgaaaagtgtcattcaaagttttggttagttttttcggtgatgcgaccttgttcaagtaacgcttgttctatggtctgctgcagcatccgaatacgctgttccatacttgccgcgtagtcacgagtctttgctttttcttgcgctaactcatagctgatattcaatgcggcaatgaagaccaactgttcagtatttgtgactctagtgcgttctttcagatcttgcaaccgttggttcagatcgtccgctgcctgattcaacgcatccctttggtcaggcgggcagttcacacgcagtgaacggccaaaaatttggatatcgacgggttgtgcagacatgccaccttcctgctgattgactgcgctgccttcgtctttagacccatggtctgcgaaggggcgacactatagctaccctgatgagaagagacaagcccttttctggtccaccagggcccaaagtggtagcatatcatgaatattcctccctttgacgacgaatgcttatgtctatacagaacgaaatgcctggttacaacgaaatgaaccagtatctgaaccaacaagggacgggtctgacccctgctgagatgcatggtttaatcagtgggatgatatgtggcggtaacgatgacagctcatggctaccgctacttcacgacctgacgaacgaaggcatggctttcggtcatgagctggcacaggcactgcgtaaaatgcactctgccaccagcgatgccctgcaggatgacggcttcctttttcagctttatctgcctgatggcgatgatgtcagcgttttcgatcgggctgatgcattggcaggttgggtcaatcacttcctgcttggtcttggcgttacgcaaccgaagctggataaagtgaccggcgaaaccggtgaagctatcgacgatctgcgtaacattgcgcaactgggttacgacgaagacgaagatcaggaagagcttgaaatgtcgcttgaagagatcatcgaatacgttcgtgttgccgcgctgttatgccacgacacctttactcatccgcaaccgaccgcgccagaagtacaaaaaccgactctacactaaaaacaaaaaacgtaaggagagtgttatgagtgagatatcccggcaagagtttcagcgtcgccgtcaggccctggtggagcaaatgcaacccggcagcgccgcgctgatttttgctgcaccagaagtaacacgtagcgccgacagcgaatacccctatcgtcagaacagtgacttctggtacttcaccggctttaacgaaccggaagcggtgctggtgctgattaaaagcgatgacactcataaccacagcgttctgtttaaccgcgttcgcgacctgacggcggagatctggtttggccgtcgcttaggccaggatgccgcgccagagaaactgggcgttgaccgcgcactggcattcagcgaaatcaatcagcaactttatcaactacttaacggcctggatgtggtttaccatgcccagggcgaatatgcatatgctgatgaaatcgtgaacagtgcgctggaaaaactgcgtaaaggttcgcggcaaaatctcaccgcaccggcaacgatgatcgactggcgtcctgttgttcatgaaatgcgcctgttcaaatcgccagaagagattgccgtactccgccgcgcgggagaaatcaccgccatggcacatacacgggcgatggaaaaatgccgtccgggaatgttcgagtaccatctggaaggcgaaattcaccacgaatttaaccgccacggtgcgcgctatccgtcctataacaccattgtcggcagcggtgaaaacggctgcattctgcactacaccgaaaacgagagtgaactgcgcgacggtgacctggtgttgattgacgcgggttgtgaatacaaaggttacgcgggcgatattacccgcaccttcccggtcaacggcaaattcacccaggcccagcgtgaaatctacgacattgtgctggagtctctcgaaaccagcctgcgcctgtatcgtccgggaacttccattctggaagtcactggtgaagtggtgcgcatcatggttagcggcctggtaaaactcggcatcctgaaaggtgatgttgatgaactgatcgctcagaacgcccatcgtcctttctttatgcatggccttagccactggttaggactggatgtccatgacgttggcgtttatggtcaggatcgctcgcgcattctggaaccggggatggtactgaccgtagagcctggtctgtatatcgcgccggatgcggatgtgccagaacaatatcgcggtatcggcattcgtattgaagacgacattgtgattaccgaaaccggcaacgaaaacctcaccgccagcgtggtgaaaaagccggaagaaatcgaagcgttgatggcagctgcgagaaagcaatgagcgtaatcatcgtcggtggcggcatggcgggcgcgacgctggcgctggctatttcccggttaagtcacggggcgctgccggtacatttgattgaagcgaccgcgccagagtcacatgctcatccgggctttgatggacgagcgatagcgctggcggcgggtacctgtcagcaactggcgcgcatcggcgtctggcaatctctggcggattacgcaaccgccatcactaccgtgcatgtcagcgatcgtggtcacgctggatttgtcaccctcgccgcagaagattaccaactggcggtgctgggacaggttgtcgaattgcacaatgtcgggcaacggctgtttgcattgctgcgtaaagcacctggcgtaacgctgcattgccctgatcgcgtggctaacgttgcccgtactcagagtcacgttgaagtggcgctggagagtggcgagacgctgacgggccgcgtgctggtagcagctgatggcacccattcagcgttagccaccgcgtgcggcgttgactggcagcaggagccttacgaacaactggccgtgattgccaacgttgcgacttccgttgcgcacgaaggccgcgcttttgaacgcttcacgcaacatggcccgctggcgatgttgccgatgtctgacggacgctgttcgctggtctggtgtcatccactggaacggcgcgaagaggtgctgtcgtggagcgacgagaagttttgccnnnnnnnnnngaactccagtcggcctttggctggcgacttggaaaaattacccacgccggtaaacgcagtgcttatccgctggcgttaacccgcgccgccagagctattacccatcgtaccgtgctggtgggcaatgcggcgcaaactctgcacccgattgccgggcaagggtttaacctcggtatgcgagatgtcatgagccttgcggaaaccctgactcaggcgcatgagcgcggagaagacatcggtgattacggcatattgtgccgctatcagcagcgtcgacagagcgatcgcgaagcaaccatcggcgtcacggacagcctggtacatctttttgccaaccgttgggcaccgctggttgtcgggcgcaacatcggactgatgacgatggaattattcaccccggcacgcgatgtgctggcgcagcgcaccctcggttgggtggcgcgttgaaggcggttttaaggaataaacaatgcaaagtgttgatgtagccattgttggtggcggcatggtggggctggcggttgcctgcggcttacaggggagcggcttacgcgttgccgtactggagcagcgcgtaccggaacctctggcggcggatgcaccaccacaactgcgcgtttcggctatcaatgccgccagcgaaaaattactcacccgtcttggcgtctggcaggacattctctctcgtagggccagttgttatcacggtatggaagtgtgggacaaagacagttttggtcacatttcgtttgacgatcaaagcatgggctatagccatcttgggcatatcgttgaaaactcagtgattcactacgcgctgtggaacaaagcgcagcagtcgtcagataccactctgttggcccccgcagaattacagcaggtcgcctggggagaaaacgaaaccttcctgacgctgaaagatggcagtatgttaacggcgcgtctggtgattggcgcggacggcgctaattcctggttgcgcaacaaagccgatattccgctgactttctgggattatcagcatcacgcgctggtagcgaccattcgcacggaagaaccgcatgatgcggtggcgcggcaggttttccatggcgaaggcattctggcctttttaccgcttagcgatccgcatctttgctcgattgtctggtcactgtcgccagaggaagcgcagcgtatgcagcaggcaggggaagacgaatttaatcgcgcgttaaatatcgcttttgataatcgcctgggcttatgcaaggttgagagcgcgcgtcaggtgttcccactgacggggcgttatgcgcgccagtttgccgcgcaccgtctggcgctggtgggcgacgccgcgcataccattcacccgctggcggggcagggggtaaatctcggctttatggatgctgcagagctggttgctgaactgaaacggttgcatcgtcagggtaaagacatcgggcagtacatttatctgcgtcgctatgagcgtagccgcaagcacagtgcggcgatgatgctggctggtatgcagggattccgcgatctgttttccggtaccaatccggcgaaaaaactgctgcgtgatattggtctgaaactggccgacacgcttcctggcgttaaaccacaacttatccgccaggcaatgggattaaacgatttgcctgaatggctgcgttaaaaatttctcttctgctgtttatttgatacccatcacactttcatctcccggttttttcgccgggagattttcctcatttgaaataaactaatttcacctccgttttcgcattatattttctaatgtcacgaatttttgatttagtgttttttgacattttttcagctcttaatattgtcttattcaaattaactttctcatcacatcatc

SEQ ID NO: 202 - DNA, 32108 bp, Escherichia coli
  source 1..32108: mol_type = genomic DNA
atggtagagactataacaagaaaacctgcttccccatcgttaaaaaagataataagaaaggcaaaaatgaaatttattaaaataaatgaaaatatatatcggcgtctggaaatcttaccgttagatgttgggataaacatacgtaacataaattttacatccttgtgtgagtctcctgtcagcatggcaatatgcccactctcatacaagagtcggcatattttttcagaatatatttattttttatttggacgttctacgctgcgtataaatcgcatccatcacaaaaattgccagcgccacccaaataaaggcgaaagtcaccatcttatcggcacccggtttttcaccataaaacgtcacagccagcaggaacatcagcgtcgggccaatgtactggaaaaagcctaacgttgagagacgcaggcgcgtggcagcggcagtaaaacacaacagcggtacggtagtgacaataccggcggcgatcagcagtaaattcagcgacatcgggttttgccccatatggctggttgagctgtcggcaatagcaaacaggtaaatcgccgccacgggcagcagccacatggtttcaattaacatgccggtttgtgcttctaccgcaatcttcttgcgcaccaggccgtagaaggcaaaactaaatgccagccccagcgcgataataggtagcgaaccaaaagtccacagctggactaacacgccacatatcgccagaatcaccgccagccattgcatccggcggaatcgctcgccgaggaaaatcatccccagcacaatgttcaccagcgggttaataaagtaaccaaggctcgcttccagcatatggtgattgttcaccgcccagataaacagtagccagttgccaccaatcagcacggcagagactgccagcataaaaattttctgtggcgtctgaatcagcgtttttaaataggaccactggcggcaaatgctcatcagcaccaccataaagaaaaacgaccagatcacgcgatgcgtcaggatttcatcggcgggcacgtagtaaatcaacttgaagtacgctggcgctataccccaaataaaataagcggcaagagcgagtaatacgccctgccgcgtttgttttgcatccatcgggaatactcatttttaattggtaacagcagtttacctgcttttatgtcttcaacctaccatataggtggcggtggcactggcaatataaagctgttcttcattgtgtaattcaacgcgggcgacggcgactttattgcctgcacgcaacaggctactggtagcagtaaaacgctcgcccctgcctgggcgcagataatcaacgcgaagatcaatggtccccatccgcgatagccgctggcgtagttcatcttcactgatggtttcgtggcgggttaaggtacttcccacgcacaccagaccggcggcgacatccagcgccgacgcaatgactccgccgtgcaaaatgctttgcgcccagttacccaccatcatcggctgatttttaaaggccagctgtgcgaactctttttcgtaacgctccagctccatccctaacgcgcggttaaatggcatgtgataaacaaacatctcacccactaatttcagggcttgttcagcggtcagtacggcagacatatcatccttatacttcattggttaatgaaatgttgattttatgcttctttgttgttggtttctactttaggaagggataactaacggcaatggagttaagtatgtaaaatagcccgcagaaaaacattcaccttatcaataattcgttacggagaacacgaccgatgcggactctgcagggctggttgttgccggtgtttatgttgcctatggcagtatatgcacaagaggcaacggtgaaagaggtgcatgacgcgccagcggtgcgtggcagtattatcgccaatatgctgcaggagcatgacaatccgttcacgctctatccttatgacaccaactacctcatctacacccaaaccagcgatctgaacaaagaagcgattgccagttacgactgggcggaaaatgcgcgtaaggatgaagtaaagtttcagttgagcctggcatttccactgtggcgtgggattttaggcccgaactcggtgttgggtgcgtcttatacgcaaaaatcctggtggcaactgtccaatagcgaagagtcttcaccgtttcgtgaaaccaactacgaaccgcaattgttcctcggttttgccaccgattaccgttttgcaggttggacgctgcgcgatgtggagatggggtataaccacgactctaacgggcgttcagacccgacctcccgcagctggaaccgcctttatactcgcctgatggcagaaaacggtaactggctggtagaagtgaagccgtggtatgtggtgggtaatactgacgataacccggatatcaccaaatatatgggttactaccagcttaaaatcggctatcacctcggtgatgcggtgctcagtgcgaaaggacagtacaactggaacaccggctacggcggcgcggagttaggcttaagttacccgatcaccaaacatgtgcgcctttatactcaggtttacagcggctatggcgaatcgctcatcgactataacttcaaccagacccgtgtcggtgtgggggttatgctaaacgatttgttttgatgaacggttgagtggttggcaaatctggaatccagcatccaggattaccctctcagagactaaaagcattgcagtttctcgcgcaggcgctgaaaatagcgcctgtttttatttcaggcaatcggggtgaatgtggcgcaggcggaagtgttgaatctggagtccggagctaaacaggttttacaagaaacctttggctaccaacagtttcgccccggccaggaagaaattatcgacactgtgctttccggtcgcgattgcctggtcgtcatgcccaccggtggcggaaaatccctttgctatcaaattcctgccttattgctaaacggccttaccgtggttgtttcaccgctgatttcgttgatgaaagatcaggtggatcaactgcaagccaacggcgtggcggcggcgtgccttaactcgacgcaaacccgcgagcagcaacttgaagtgatgacaggctgtcgcaccgggcaaatccgcctgctttatatcgcgccggaacgcctgatgctggataactttcttgagcatctggcgcactggaatccggtgttattagccgttgatgaagcgcactgtatctcccaatggggccacgatttccgcccggaatatgccgcgctcggtcagttgcgccagcggttcccgacgctgccgtttatggcgctgaccgccacagccgacgacaccacgcgccaggatatcgtgcgcctgctggggctgaacgatccgctgattcaaatcagcagttttgaccgtccgaatattcgctacatgctgatggagaaattcaaaccgctcgatcagttgatgcgctacgtgcaggaacagcgcggtaagtccggcattatctactgcaacagccgggcgaaagtagaagacaccgctgcgcgcctgcaaagcaagggtattagcgcggcggcctatcatgccgggctggaaaataatgtccgcgccgacgtgcaggagaaattccagcgcgatgacctgcaaattgtggtggcgacggtggcgttcggcatgggcatcaataaaccaaacgttcgcttcgtggtccactttgatattccgcgcaatatcgaatcctattatcaggaaaccggtcgcgccgggcgtgatggcctgcctgcggaagcgatgctgttttacgatccggctgatatggcgtggctgcgccgttgtctggaagagaagccgcaggggcagttgcaggatatcgagcgccacaaactcaatgcgatgggcgcgtttgccgaagcgcaaacttgccgtcgtctggtattgctgaactattttggcgaagggcgtcaggagccgtgcgggaactgcgatatctgcctcgatccgccgaaacagtacgacggttcaaccgatgctcagattgccctttccaccattggtcgtgtgaatcagcggtttgggatgggttatgtggtggaagtgattcgtggtgctaataaccagcgtatccgcgactatggtcatgacaaactgaaagtctatggcatgggccgtgataaaagccatgaacattgggtgagcgtgatccgccagctgattcacctcggcctggtgacgcaaaatattgcccagcattctgccctacaactgacagaggccgcgcgcccggtgctgcgcggcgaatcctctttgcaacttgccgtgccgcgtatcgtggcgctcaaaccgaaagcgatgcagaaatcgttcggcggcaactatgatcgcaaactgttcgccaaattacgcaaactgcgtaaatcgattgccgatgaaagcaatgtcccgccgtacgtggtgtttaacgacgcaaccttgattgagatggctgaacagatgccgatcaccgccagcgaaatgctcagcgttaacggcgttgggatgcgcaagctggaacgctttggtaaaccgtttatggcgcttatccgcgcgcatgttgacggcgacgacgaagagtagtcagcggcataaaaaagtgccaggatgaagactccgtaaacgtttcccccgcgagtcaaatgtatgttgatgttatttctcaccgtcgccatggtgcatattgtggcgcttatgagccccggtcccgatttcttttttgtctctcagaccgctgtcagtcgttcccgtaaagaagcgatgatgggcgtgctgggcattacctgcggtgtaatggtttgggctgggattgcgttgcttggcctgcatttgattatcgaaaaaatggcctggctgcatacgctgattatggttggcggtggcctgtatctctgctggatgggttaccagatgctacgcggtgcactgaaaaaagaggctgtatctgcgcctgcaccacagattgagctggcgaaaagcgggcgcagtttcctgaaaggtttactgaccaatctcgctaatccgaaagcgattatctactttggctcggtgttctcattgtttgtcggtgataacgttggcactaccgcgcgctggggcatttttgcgctgatcattgtcgaaacactggcgtggtttaccgtcgttgccagcctgtttgccctgccgcaaatgcgccgtggttatcaacgtctggcgaagtggattgatggttttgccggggcgttatttgccggatttggcattcatttgattatttcgcggtgatgccagacgcgtcttcagagtaagtcggataaggcgtttacgccgcatccgacattatttttcacgcatgcctcgccgatgctaacagcgctcccaccagcataaacaacgagccgaaaatcttattcagcgccttcatctgctttggtcctttaatccatagagcaatccgttgagcaagggtggcgtaaccgatcatcacaataatatcgactacaatagtggtgacgccgagcacgatatactgcatcagttgcggctgctgtggcatgatgaattgcggaaatagcgccgccagaaacacaatacttttgggattggtgagattcacaaaaactgcgcgctggaacaaatgtcgacgcgattgagtagaggccagcgatttaaggtcaattgcaccagcggcgcgccactgctggattcccagccaaatcaagtaagccgcgcctgcccacttcaacacttcaaacgcaatcactgaacgggaaaatagcgtccccaaccccacgccaaccagcacaatatgaatcgccagtccggtctgaagcccagcaatagacgccaccgcgccgcgataaccgtggttgagcgaggtggtcatagtgttgattgcaccagagcctggcgacaggcttaaaatgatcgatgtcagcaggtaggcaaaccaccattctaaggtcatgatgaactcccggtgtgtctatttttgtgccacaatacgctactgtcgcagcgttgtgtcaggcacgctaaaaaaaacgattttacgtggtttaagaggcagattacccgatgtttcagcagcaaaaagactgggaaacaagagaaaacgcgtttgctgcttttaccatgggaccgctgactgatttctggcgtcagcgtgatgaagcagagtttactggtgtggatgacattccggtgcgctttgtccgttttcgcgcacagcaccatgaccgggtggtagtcatctgcccggggcgtattgagagctacgtaaaatatgcggaactggcctacgacctgttccatttggggtttgatgtcttaatcatcgaccatcgcgggcagggacgttccggtcgcctgttagccgatccgcatctcgggcatgttaatcgctttaatgattatgttgatgatctggcggcattctggcagcaggaggttcagcccggtccgtggcgtaaacgctatatactggcacattcgatgggcggtgcgatctccacattatttctgcaacgccatccaggtgtatgtgacgccattgcgctaactgcgccaatgtttgggatcgtgattcttatgccgtcatttatggcacggcagatcctcaactgggccgaagcgcatccacgtttccgtgatggctatgcaataggcaccgggcgctggcgcgcgttgccgtttgctatcaacgtactgacccacagcagacagcgatatcgacgtaacttacgcttctatgctgatgacccaacgattcgcgtcggtgggccgacctaccattgggtacgcgaaagtattctggctggcgaacaggtgttagccggtgcgggtgatgacgccacgccaacgcttctcttgcaggctgaagaggaacgcgtggtggataaccgcatgcatgaccgtttttgtgaactccgcaccgccgcgggccatcctgtcgaaggaggacgaccgttggtaattaaaggtgcttaccatgagatcctttttgaaaaggacgcaatgcgctcagtcgcgctccacgccattgttgattttttcaacaggcataactcacccagcggaaaccgctctacagaggtttaaatttcttatgtaccaggttgttgcgtctgatttagatggcacgttactttctcccgaccatacgttatccccttacgccaaagaaaccctgaagctgctcaccgcgcacggcatcaactttgtgtttgcgaccggtcgtcaccacgttgatgtggggcaaattcgcgataatctggagattaagtcttacatgattacctccaacggcgcgcgcgttcacgatctggatggcaatctgatttttgctcataacctggatcgcgacattgccagcgatctgtttggcgtagtcaacgacaatccggacatcattactaacgtttatcgcgacgacgaatggtttatgaatcgccatcgcccggaagagatgcgcttttttaaagaagcggtgttcaaatatgcgctgtatgagcctggattactggagccggaaggcgtcagcaaagtgtttttcacctgcgattcccatgaacaactgctgccgctggagcaggcgattaacgctcgttggggcgatcgcgtcaacgttagtttctctaccttaacctgtctggaagtgatggcgggcggcgtttcaaaaggccatgcgctggaagcggtggcgaagaaactgggctacagcctgaaggattgtattgcgtttggtgacgggatgaacgatgccgaaatgctgtcgatggcggggaaaggctgcattatgggcagtgcgcaccagcgtctgaaagaccttcatcccgagctggaagtgattggtactaatgccgacgacgcggtgccgcattatctgcgtaaactctatttatcgtaatcgttctttatttggtcagttgtcaacctgatacttcgctacaatggatactcgttaatcaaagagttttccattgtggcgctacttatcatcaccacgattctgtgggccttctcctttagcttttatggcgagtaccttgcggggcacgtcgatagctattttgcggtgctggtgcgcgttggcctggcggcactcgtttttctgccgtttctgcgtacccgtggcaatagcctgaaaacagtcggcctgtatatgctggtgggcgcgatgcagctcggcgtgatgtatatgctgagtttccgcgcttatctctacctgacggtttccgaactgctgctgttcaccgtactgacgccgctctacatcacgctgatttatgacatcatgagtaagcgccgtctgcgctggggatatgcttttagtgccttgttggcggtgattggtgccgggattattcgctatgatcaggtcaccgaccatttctggactggcttgttgctggtgcaactctccaatatcacttttgccatcggcatggtgggttacaaacgcctgatggaaactcgcccgatgccgcagcataacgcctttgcgtggttctatcttggcgcgttcctggtggcggtaattgcatggttcttgctgggaaatgcgcagaaaatgccgcaaaccacgttgcaatggggcattctggtgtttcttggcgtggtggcttccgggattggctactttatgtggaactacggcgcgacgcaggtggacgccggaacgctgggcattatgaataatatgcacgttccggcagggctgctggtaaacctggctatctggcaccaacagccgcactggccaacgttcattacaggcgcgctggtgatcctggcctcactgtgggtgcatcgtaagtgggtcgctccgcgctcttcacaaacggcagatgatcgcaggcgtgattgcgcgctgagcgaataaatgcttctgtaatcggctgacgctgctcgccatcgcgcacggcggcgtacagtcggctccacaagccttcgcccagggttttggtcaccaccagaccctggcgctcaaaactctctactacccaatgcggtagcgcggcaatacccatccgcgcggcaaccatctgaatcaacaataaggtgttatcgacgcttttcagtgacgggctgacgcctgccggctgaagaaaatgccgccagacatccagtcgactacgctgcaccggataaatcaacagcgtctcgctggcgagatcttccggtgtaattcgcgttttcgccgccagtggatggtcaggtgctaacaccagacgcacttcatagtcgaacatcggcgaataatgcaggccactgcgcggcaggatatcggaggtcatcaccagatccagctcgccctgttgcaacgcgggctgcgggtcaaacgtcacgcccgatttaaaatccatctctacctgcggccagttcttatggaaattttctaacgcgggcgtcagccactgaatacagctatggcactcaatggcaatgcgcagacgcgtctgctgcggttcattgcaggcttgcagtgcctggctaatttgcggcagcacctggtttgccagttgcaacaggatttctccctgcggtgtaaagcgtagcggctggctcttacgcacaaatagccggaagccaaggcgttgttccagatcgctaaactggtgagacagggcggattgcgtctgatgcaacgtcgccgcagcggctgcgagagagccgcagttccgcaacgcttgtagcgttttcaggtgttttacttcgatcatgaaagtccttcacttcggcatgaataatttgcgcttgaggaatatacagtaaccgccaattatggatgtgtaaacatctggacggctaaatactaaaaattccataaggggcatataatgacaattcttaatcacaccctcggtttccctcgcgttggcctgcgtcgcgagctgaaaaaagcgcaagaaagttattgggcggggaactccacgcgtgaagaactgctgacagtagggcgtgaactgcgtgctcgtcactgggatcaacaaaagcaagcgggtatcgacctgctgccggtgggcgattttgcctggtacgatcatgttctgaccaccagtctgctgctgggtaatgttccgccacgtcatcagaacaaagacggttcggtagatatcgacaccctgttccgtattggtcgtggacgtgcgccgactggcgaacctgcggcggcagcggaaatgaccaaatggtttaacaccaactatcactacatggtgccggaattcgttaaaggccaacagttcaaactgacctggacgcagctgctggaggaagtggacgaggcgctggcgctgggccacaacgttaagcctgtgctgctggggccggttacttacctgtggctggggaaagtgaaaggtgaacagtttgaccgccttagcctgctgaacgacattctgccggtttatcagcaagtgctggcagaactggcgaaacgcggcatcgagtgggtacagattgatgaacccgcgctggtactggaactaccacaggcgtggctggacgcatacaaacccgcttacgacgcgctccagggacaggtgaaactgctgctgaccacctattttgaaggcgtaacgccaaatctcgacacgattactgcgctgcctgttcagggtctgcatgttgaccttgtacatggtaaagatgacgttgttgaactgcacaagcgcctgccttctgactggctgctgtctgcgggactgatcaatggtcgtaacgtctggcgcgccgatcttactgagaaatatgcgcaaattaaggacattgtcggcaaacgtgatttgtgggtggcatcttcctgctcgttgctgcacagccccatcgacctgagcgtggaaacgcgtcttgatgcagaagtgaaaagctggtttgccttcgctctacaaaaatgccatgaactggcactgctgcgcgatgcgctgaacagtggtgacacggcagctctggcagagtggagcgccccaattcaggcgcgtcgtcactctactcgtgtacataatccggcggtagaaaagcgtctggcggcgatcaccgcccaggacagccagcgtgcgaatgtctatgaagtgcgtgctgaagcccagcgtgcgcgttttaaactgccagcgtggccgaccaccacgattggttccttcccgcaaaccacggaaattcgtaccctgcgtctggatttcaaaaagggcaatctcgacgccaacaactaccgcacgggcattgcggaacatatcaagcaggccattgttgagcaggaacgtttgggactggatgtgctggtacatggcgaggccgagcgtaatgacatggtggaatactttggcgagcacctcgacggatttgtctttacgcaaaacggttgggtacagagctacggttcccgctgcgtgaagccaccgattgtcattggtgacattagccgcccggcaccgattaccgtggagtgggcgaagtatgcgcaatcgctgaccgacaaaccggtgaaagggatgctgacggggccggtgaccatactctgctggtcgttcccgcgtgaagatgtcagtcgtgaaaccatcgccaaacagattgcgctggcgctgcgtgatgaggtggccgatctggaagcggcagggattggcatcatccagattgatgaaccggcgctgcgcgaaggtttaccgctgcgtcgtagcgactgggacgcctatctccagtggggcgtagaggccttccgtatcaacgccgccgtggcgaaagatgacacacaaatccacactcacatgtgttattgcgagttcaacgacatcatggattcgattgcggcgctggacgcagacgtcatcaccatcgaaacctcgcgttccgacatggagttgctggagtcgtttgaagagtttgattatccaaatgaaatcggtcctggcgtctatgacattcactcgccaaacgtaccgagcgtggaatggattgaagccttgctgaagaaagcggcaaaacgcattccggcagagcgcctgtgggtcaacccggactgtggcctgaaaacgcgcggctggccagaaacccgcgcggcactggcgaacatggtgcaggcggcgcagaatttgcgtcgggggtaaatccaaaccgggtggtaataccacccggtcttttctcattacagcgacttcttcccaccatactgcttaaaccactccagcatacgctgccagccatctttcgcagattcggcatgatagctcgggcgataatcggcgttgaatgcatgcccggcatccgggtagacgataatctctgctttcgcattagcagcccgcagcgcctggcgcatggtttcaacgctctcctgcggaatgctgttatcctgaccaccatataagccgagaaccggcgcgttaagatcggttgcgatatcaacaggttgtttcggtgaattcagcgacttgtcgcccgtcagtttgccgtaccacgccactgcagcttttagctgtggattatgcgcggcatacagccaggtgatacgtccaccccagcagaatccggtgatcattaaacgatgaacatcgccgccgttgcgggaagcccaactggcgacatgatcgagatcggccagcacctgcgagtcaggcacttttgctaccagaccgctaagcaacgtggggatatcggcaaaatcattcggatcgccttcgcggaagtaaagttcaggtgcgatagccagatacccctccagcgccagacggcgacaaatgtcgcggatatgttcatgcacgccaaaaatttcctgcactacaatgaccactggcagtgggccatcgctttgctttggtctggcatggtaagcaggcatgttatccccttgtgaagggatagaggtgaagcccgccacaatcgcgtcgtccggggtctgaacgatggtcgaagcgagaggcgatgcagcaggtgcaaatccagattgttgtgttgttgccatggtattctccgtacccttataaaaatgttgcgcaatgttaactatagtcagcatgcaacaaatcacattgcctgaatcggctcatcttttatgcagtcctgcagaatgaagagtgatttatgtgatttgaatcacttttggtgggtaaatttatgcaacgcatttgcgtcatggtgatgagtatcacgaaaaaatgttaaacccttcggtaaagtgtctttttgcttcttctgactaaaccgattcacagaggagttgtatatgtccaagtctgatgtttttcatctcggcctcactaaaaacgatttacaaggggctacgcttgccatcgtccctggcgacccggatcgtgtggaaaagatcgccgcgctgatggataagccggttaagctggcatctcaccgcgaattcactacctggcgtgcagagctggatggtaaacctgttatcgtctgctctaccggtatcggcggcccgtctacctctattgctgttgaagagctggcacagctgggcattcgcaccttcctgcgtatcggtacaacgggcgctattcagccgcatattaatgtgggtgatgtcctggttaccacggcgtctgtccgtctggatggcgcgagcctgcacttcgcaccgctggaattcccggctgtcgctgatttcgaatgtacgactgcgctggttgaagctgcgaaatccattggcgcgacaactcacgttggcgtgacagcttcttctgataccttctacccaggtcaggaacgttacgatacttactctggtcgcgtagttcgtcactttaaaggttctatggaagagtggcaggcgatgggcgtaatgaactatgaaatggaatctgcaaccctgctgaccatgtgtgcaagtcagggcctgcgtgccggtatggtagcgggtgttatcgttaaccgcacccagcaagagatcccgaatgctgagacgatgaaacaaactgaaagccaagcggtgaaaatcgtggtggaagcggcgcgtcgtctgctgtaattctcttctcctgtctgaaggccgacgcgttcggccttttgtatttttgcgtagcgcctcgcaggaaatgcctttccaactggacgtttgtacagcacaattctattttgtgcgggtaagttgttgcgtcaggaggcgttgtggatttctcaatcatggtttacgcagttattgcgttggtgggtgtggcaattggctggctgtttgccagttatcaatatgcgcagcaaaaagccgagcaattagctgaacgtgaagagatggtcgcggagttaagcgcggcaaaacaacaaattacccaaagcgagcactggcgtgcagagtgcgagttactcaataacgaagtgcgcagcctgcaaagtattaacacctctctggaggccgatctgcgtgaagtaaccacgcggatggaagccgcacagcaacatgctgacgataaaattcgccagatgattaacagcgagcagcgcctcagtgagcagtttgaaaacctcgccaaccgtatttttgagcacagcaatcgccgggttgatgagcaaaaccgtcagagtctgaacagcctgttgtcgccgctacgtgaacaactggacggtttccgccgtcaggttcaggacagcttcggtaaagaagcacaagaacgccataccctgacccacgaaattcgcaatctccagcaactcaacgcgcaaatggcccaggaagcgatcaacctgacgcgcgcgctgaaaggcgacaataaaacccagggcaactggggcgaggtagtattgacgcgggtgctggaggcttccggtctgcgtgaagggtatgaatatgaaacccaggtcagcatcgaaaatgacgcccgctcgcggatgcagccggatgtcatcgtgcggctgccgcagggaaaagatgtggtgatcgacgccaaaatgacgctggtcgcctatgaacgctattttaacgccgaagacgactacacccgcgaaagcgcgctacaggaacatatcgcgtcggtgcgtaaccatatccgtttgctgggacgcaaagattatcaacagctgccggggctgcgaactctggattacgtgctgatgtttattcccgttgaacccgcttttttactggcgcttgaccgccagccggagctgatcaccgaagcgttgaaaaacaatatcatgctggttagcccgactacgctgctggtggcgttgcgtactattgccaacctgtggcgttatgagcatcaaagccgcaacgcccagcaaatcgccgatcgtgccagcaagctgtacgacaagatgcgtttgttcatcgatgacatgtccgcgattggtcaaagtctcgacaaagcgcaggataactaccgccaggcaatgaaaaaactctcttcaggtcgcggaaatgtgctggcgcaggcagaagcgtttcgcggtttaggagtagaaattaaacgcgagattaatccggatttggctgaacaggcggtgagccaggatgaagagtatcgacttcggtcggttccggagcagccgaatgatgaagcttatcaacgcgatgatgaatataatcagcagtcgcgctagcccattaggggtagttaagccgggtagaaatctagggcatcgacgcccaatctgttacacttctggaacaattttttgatgagcaggcattgagatggtggataagtcacaagaaacgacgcactttggttttcagaccgtcgcgaaggaacaaaaagcggatatggtcgcccacgttttccattccgtggcatcaaaatacgatgtcatgaatgatttgatgtcatttggtattcatcgtttgtggaagcgattcacgattgattgcagcggcgtacgccgtgggcagaccgtgctggatctggctggtggcaccggcgacctgacagcgaaattctcccgcctggtcggagaaactggcaaagtggtccttgctgatatcaatgaatccatgctcaaaatgggccgcgagaagctgcgtaatatcggtgtgattggcaacgttgagtatgttcaggcgaacgctgaggcgctgccgttcccggataacacctttgattgcatcaccatttcgtttggtctgcgtaacgtcaccgacaaagataaagcactgcgttcaatgtatcgcgtgctgaaacccggcggccgcctgctggtgcttgagttctcgaagccaattatcgagccgctgagcaaagcctatgatgcatactccttccatgtgctgccgcgtattggctcactggtcgcgaacgacgccgacagctaccgttatctggcagaatccatccgtatgcatcccgatcaggataccctgaaagccatgatgcaggatgccggattcgaaagtgtcgactactacaatctgacggcaggggttgtggcgctgcatcgtggttataagttctgacaggagaccggaaatgccttttaaacctttagtgacggcaggaattgaaagtctgctcaacaccttcctgtatcgctcacccgcgctgaaaacggcccgctcgcgtctgctgggtaaagtattgcgcgtggaggtaaaaggcttttcgacgtcattgattctggtgttcagcgaacgccaggttgatgtactgggcgaatgggcaggcgatgctgactgcaccgttatcgcctacgccagtgtgttgccgaaacttcgcgatcgccagcagcttaccgcactgattcgcagtggtgagctggaagtgcagggcgatattcaggtggtgcaaaacttcgttgcgctggcagatctggcagagttcgaccctgcggaactgctggccccttataccggtgatatcgccgctgaaggaatcagcaaagccatgcgcggaggcgcaaagttcctgcatcacggcattaagcgccagcaacgttatgtggcggaagccattactgaagagtggcgtatggcacccggtccgcttgaagtggcctggtttgcggaagagacggctgccgtcgagcgtgctgttgatgccctgaccaaacggctggaaaaactggaggctaaatgacgccaggtgaagtacggcgcctatatttcatcattcgcacttttttaagctacggacttgatgaactgatccccaaaatgcgtatcaccctgccgctacggctatggcgatactcattattctggatgccaaatcggcataaagacaaacttttaggtgagcgactacgactggccctgcaagaactggggccggtttggatcaagttcgggcaaatgttatcaacccgccgcgatctttttccaccgcatattgccgatcagctggcgttattgcaggacaaagttgctccgtttgatggcaagctggcgaagcagcagattgaagctgcaatgggcggcttgccggtagaagcgtggtttgacgattttgaaatcaagccgctggcttctgcttctatcgcccaggttcataccgcgcgattgaaatcgaatggtaaagaggtggtgattaaagtcatccgcccggatattttgccggttattaaagcggatctgaaacttatctaccgtctggctcgctgggtgccgcgtttgctgccggatggtcgccgtctgcgcccaaccgaagtggtgcgcgagtacgaaaagacattgattgatgaactgaatttgctgcgggaatctgccaacgccattcagcttcggcgcaattttgaagacagcccgatgctctacatcccggaagtttaccctgactattgtagtgaagggatgatggtgatggagcgcatttacggcattccggtgtctgacgttgcggcgctggagaaaaacggcactaacatgaaattgctggcggaacgcggcgtgcaggtgttcttcactcaggtctttcgcgacagctttttccatgccgatatgcaccctggcaacatcttcgtaagctatgaacacccggaaaacccgaaatatatcggcattgattgcgggattgttggctcgctaaacaaagaagataaacgctatctggcagaaaactttatcgccttctttaatcgcgactatcgcaaagtggcagagctacacgtcgattcaggctgggtgccaccagataccaacgttgaagagttcgaatttgccattcgtacggtctgtgaacctatctttgagaaaccgctggccgaaatttcgtttggacatgtactgttaaatctgtttaatacggcgcgtcgcttcaatatggaagtgcagccgcaactggtgttactccagaaaaccctgctctacgtcgaaggggtaggacgccagctttatccgcaactcgatttatggaaaacggcgaagcctttcctggagtcgtggattaaagatcaggtcggtattcttgcgctggtgagagcatttaaagaaaaagcgccgttctgggtcgaaaaaatgccagaactgcctgaactggtttacgacagtttgcgccagggcaagtatttacagcacagtgttgataagattgcccgcgagcttcagtcaaatcatgtacgtcagggacaatcgcgttattttctcggaattggcgctacgttagtattaagtggcacattcttgttggtcagccgacctgaatgggggctgatgcccggctggttaatggcaggtggtctgatcgcctggtttgtcggttggcgcaaaacacgctgattttttcatcgctcaaggcgggccgtgtaacgtataatgcggccttgtttaatcatcatctaccacagaggaacatgtatgggtggtatcagtatttggcagttattgattattgccgtcatcgttgtactgctttttggcaccaaaaagctcggctccatcggttccgatcttggtgcgtcgatcaaaggctttaaaaaagcaatgagcgatgatgaaccaaagcaggataaaaccagtcaggatgctgattttactgcgaaaactatcgccgataagcaggcggatacgaatcaggaacaggctaaaacagaagacgcgaagcgccacgataaagagcaggtgtaatccgtgtttgatatcggttttagcgaactgctattggtgttcatcatcggcctcgtcgttctggggccgcaacgactgcctgtggcggtaaaaacggtagcgggctggattcgcgcgttgcgttcactggcgacaacggtgcagaacgaactgacccaggagttaaaactccaggagtttcaggacagtctgaaaaaggttgaaaaggcgagcctcactaacctgacacccgaactgaaagcgtcgatggatgaactacgccaggccgcggagtcgatgaagcgttcctacgttgcaaacgatcctgaaaaggcgagcgatgaagcgcacaccatccataacccggtggtgaaagataatgaagctgcgcatgagggcgtaacgcctgccgctgcacaaacgcaggccagttcgccggaacagaagccagaaaccacgccagagccggtggtaaaacctgctgcggacgctgaaccgaaaaccgctgcaccttccccttcgtcgagtgataaaccgtaaacatgtctgtagaagatactcaaccgcttatcacgcatctgattgagctgcgtaagcgtctgctgaactgcattatcgcggtgatcgtgatattcctgtgtctggtctatttcgccaatgacatctatcacctggtatccgcgccattgatcaagcagttgccgcaaggttcaacgatgatcgccaccgacgtggcctcgccgttctttacgccgatcaagctgacctttatggtgtcgctgattctgtcagcgccggtgattctctatcaggtgtgggcatttatcgccccagcgctgtataagcatgaacgtcgcctggtggtgccgctgctggtttccagctctctgctgttttatatcggcatggcattcgcctactttgtggtctttccgctggcatttggcttccttgccaataccgcgccggaaggggtgcaggtatccaccgacatcgccagctatttaagcttcgttatggcgctgtttatggcgtttggtgtctcctttgaagtgccggtagcaattgtgctgctgtgctggatggggattacctcgccagaagacttacgcaaaaaacgcccgtatgtgctggttggtgcattcgttgtcgggatgttgctgacgccgccggatgtcttctcgcaaacgctgttggcgatcccgatgtactgtctgtttgaaatcggtgtcttcttctctcgcttttacgttggtaaagggcgaaatcgggaagaggaaaacgacgctgaagcagaaagcgaaaaaactgaagaataaattcaaccgcccgtcagggcggttgtcatatggagtacaggatgtttgatatcggcgttaatttgaccagttcgcaatttgcgaaagaccgtgatgatgttgtagcgcgcgcttttgacgcgggagttaatgggctactcatcaccggcactaacctgcgtgaaagccagcaggcgcaaaagctggcgcgtcagtattcgtcctgttggtcaacggcgggcgtacatcctcacgacagcagccagtggcaagctgcgactgaagaagcgattattgagctggccgcgcagccagaagtggtggcgattggtgaatgtggtctcgactttaaccgcaacttttcgacgccggaagagcaggaacgcgcttttgttgcccagctacgcattgccgcagatttaaacatgccggtatttatgcactgtcgcgatgcccacgagcggtttatgacattgctggagccgtggctggataaactgcctggtgcggttcttcattgctttaccggcacacgcgaagagatgcaggcgtgcgtggcgcatggaatttatatcggcattaccggttgggtttgcgatgaacgacgcggactggagctgcgggaacttttgccgttgattccggcggaaaaattactgatcgaaactgatgcgccgtatctgctccctcgcgatctcacgccaaagccatcatcccggcgcaacgagccagcccatctgccccatattttgcaacgtattgcgcactggcgtggagaagatgccgcatggctggctgccaccacggatgctaatgtcaaaacactgtttgggattgcgttttagagtttgcggaactcggtgttcttcacactgtgcttaatctctttattaataagattaagcaatagcatggagcgagcctcaccatcgggttcggtgaaaatggcctgaaagccttcgaacgcgccttcggtaataatcaccttatcacccggataaggggttgccggatcgacaatgtctttcggtttatataccgatagctgatgaatcaccgccgatgggactatcgctggcgacgcgccaaagcgcacgaagtggctgacaccgcgggtcgcgttgatagtcgtggtatgaatcacttctggatcaaattcgacaaacaggtagttgggaaacaatggctcactgactgcagtacgttttccacgcacgattttttccagggtgatcatcggtgccaggcaattcacagcctgtctttcgaggtgttcctgggcacgttgaagttgcccgcgcttgcagtacagtaaataccaggattgcataatgactcttatccgtttaatcggggcgcaaggatagcaaaagctttacgctaagttaattatattccccggtttgcgttataccgtcagagttcacgctaatttaacaaatttacagcatcgcaaagatgaacgccgtataatgggcgtagattaagaggctacaatggacgccatgaaatataacgatttacgcgacttcctgacgctgcttgaacagcagggtgagctaaaacgtatcacgctcccggtggatccgcatctggaaatcactgaaattgctgaccgcactttgcgtgccggtgggcctgcgctgttgttcgaaaaccctaaaggctactcaatgccggtgctgtgcaacctgttcggtacgccaaagcgcgtggcgatgggcatggggcaggaagatgtttcggcgctgcgtgaagttggtaaattattggcgtttctgaaagagccggagccgccaaaaggtttccgcgacctgtttgataaactgccgcagtttaagcaagtattgaacatgccgacaaagcgactgcgtggtgcgccctgccaacaaaaaatcgtctctggcgatgacgtcgatctcaatcgcattcccattatgacctgctggccggaagatgccgcgccgctgattacctgggggctgaccgtaacgcgcggcccgcataaagagcggcagaatctgggcatttatcgtcagcagctgattggtaaaaacaaactgattatgcgctggctgtcgcatcgcggcggcgcgctggattatcaggagtggtgtgcggcgcatccgggcgaacgtttcccggtttctgtggcgctgggtgccgatcccgccacgattctcggtgcagtcacccccgttccggatacgctttcagagtatgcgtttgccggattgctacgtggcaccaagaccgaagtggtgaagtgtatctccaatgaccttgaagtgcccgccagtgcggagattgtgctggaagggtatatagaacaaggcgaaactgctccggaagggccgtatggcgaccacaccggttactataacgaagtcgatagtttcccggtatttaccgtgacgcatattacccagcgtgaagatgcgatttaccactccacctatactggtcgtccgccggatgaacccgcggtgctgggtgtcgcactgaacgaagtgtttgtgccgattctgcaaaaacagttcccggaaattgtcgatttttacctgccgccggaaggctgttcttatcgtctggcggtagtgacgataaaaaaacagtacgccggacacgcgaagcgcgtcatgatgggcgtctggtcgttcttacgccagtttatgtacactaagtttgtgatcgtttgcgatgatgacgtcaacgcacgcgactggaacgatgtgatttgggcgattaccacccgtatggatccggcgcgggatactgttctggtagaaaatacgcctattgattatctggattttgcctcgcctgtttccgggctgggttcaaaaatggggctggatgccacgaataaatggccgggggaaacccagcgtgaatggggacgtcccatcaaaaaagatccagatgttgtcgcgcatattgacgccatctgggatgaactggctatttttaacaacggtaaaagcgcctgatgtgcgtttgttttgccctatttatcgatccgacagagaaagcgcatgacaaccttaagctgtaaagtgacctcggtagaagctatcacggataccgtatatcgtgtccgcatcgtgccagacgcggccttttcttttcgtgctggtcagtatttgatggtagtgatggatgagcgcgacaaacgtccgttctcaatggcctcgacgccggatgaaaaagggtttatcgagctgcatattggcgcttctgaaatcaacctttacgcgaaagcagtcatggaccgcatcctcaaagatcatcaaatcgtggtcgatattccccacggagaagcgtggctgcgcgatgatgaagagcgtccgatgattttgattgcgggcggcaccgggttctcttatgcccgctcgattttgctgacagcgttggcgcgtaacccaaaccgtgatatcaccatttactggggcgggcgtgaagagcagcatctgtatgatctctgcgagcttgaagcgctttcgttaaagcaccctggtctgcaagtggtgccggtggttgaacaaccggaagcgggctggcgtgggcgtactggcaccgtgttaacggcggtattgcaggatcacggtacgctggcagagcatgatatctatattgccggacgttttgagatggcgaaaatagcccgtgacctgttttgtagtgagcgtaatgcgcgggaagatcgcctgtttggcgatgcgtttgcatttatctgagatataaaaaaacccgcccctgacaggcgggaagaacggcaactaaaactttattcagtggcatttagatctatgacgtatctggcaaaccatgcccgatgcgacgctgtcgcgtcttatcgtgcctacaaatagtccgaaccgtaggccggataaggcgtttacgccgcatccggcaagtggttaaacccgctcaaacaccgtcgcaataccctgacccagaccgatacacatcgtcgccagaccaaactgaacgtctttgcgttccatcagattcagcagcgtggtgctgatacgcgcaccggaacagcccagcggatgacccagcgcgatcgcaccaccattgaggttgatcttctcgtcaatctgctccattagcccgagatctttaatgcacggcaggatctgcgcggcaaaggcttcgttcatctcaaacacgccgatatcgctggcagaaagccccgcttttttcagcgccagcttcgaggccggaaccgggccgtaacccataatcgatgggtcacaaccaacgaccgccatcgaacgcacacgagcgcgcggcttaagacctaattcatgggcgcggctttcactcatcaccagcatggcagctgcgccatcggaaagtgcagaagatgtgcccgccgttaccgtaccgtttactggatcaaacgccggacgcagcgtggcgagggcttccacggtggtttccgggcgaatcacttcgtcgtaattaaactgcttcaggacgccgtcggcatcgtgaccaccagttgggatgatttcatttttaaatgcggccgactgcgtggcggcccaggcgcgggcgtgtgaccgcgcggcaaaggcatcctgcatttcacggctgataccgtgcatacgcgccagcatttctgctgttaagcccatcatgcccgccgctttggcgacattgcggctcaggccggggtgaaaatcgacgccgtgactcatcggcacatggcccatatgctccacgccgccaaccagacatgcctgcgcatcgccggtcatgatcattcgtgctgcgtcatgcagtgcctgcatggatgaaccacacaagcgattgacggtaaccgccgggacagagtgcggcacttctgccagcagcgccgcgttacgggcgatgttaaaaccctgctccagcgtctgctgcacacaaccccagtaaatatcgtcgagggccgccgcttccagcgccgggttacgcgccagcaggctacgcattaaatgagcggagagatcttccgcacgcacgttacgaaaagcaccgcccttcgaacggcccatcggggtgcgaattgcatcgacaatgacaacctgttccattgtgactccttaagccgttttcaggtcgccaaccggacgggctggctcaaccgggggatagtacggttcgttatgacgtgctttattacgcagaccttccggcacttcgtacagcgggccgaggtgctgatattgctgtgccatatcgaggtattttgcgctaccgagggtgtccagccagcggaacgcgccgccgtggaacggagggaagcccaggccgtagaccagcgccatatccgcttccgccggagtggcgataatgccttcctccagacagcgcaccacttcgttgaccatcgggatcatcatgcgggcgataatctcttcttcgctgaaatcgcgcttcggctggctcacttctgccagcaggtcttcaacggcggcgtcttcttctttcttcggcttacctttgctgtcttctttataacgccagaaaccgaggccgttcttctgaccaaagcggttggcatcaaacagcgcgtcgatggcatcgcggtaatctttctgcatccgctgcgggaagcctgctgccatgacagcctgagcgtgatgcgcggtatcaatgcccacgacatccagcagatatgccggacccataggccagccaaactgtttttccatcactttgtcgatcttgcggaaatccgcgccgtcgcgcagcagctggctgaaaccggcgaaatacgggaacagcacgcggttaacaaagaagccggggcagtcgttaaccacaatcggcgtcttgcccatcttgctcgcccaggcgacaactttcgcgatggtttcgtcggagcttttctcgccgcgaataatttctaccaacggcatccggtgtaccgggttaaaaaagtgcattccgcagaagttttccgggcgttccagcgcgttggccagttcgctgataggaatggttgaagtgttagacgccagcacggtatccgggcgtactttttgttcggtttctgccagtacggcttttttcactttcgggttttcgacaaccgcttctaccacaacatccacgcggtcaaacccggcgtagtcgagcgttgggtggattgtggagatcacgccagccagtttcagaccatcgatcttgccgcgctcaagctgcttgttcagcagtttcgcggcttcggtcatgccgagggttaacgacttgtcgttgatatctttcatgacaaccggcacgcctttccacgcagactggtaagcgatgccgccgcccataatgcctgcacccagcaccgcggcctgtttcggggtttcaacgtctttggtgagtttcttcgctttgccttttacatattgatcgttaaggaaaatgccgaccagtgcgcgggcttcgttggtatgcgccagcgggacaaaacttttgttttccaggtttaaggcttcttcacgaccaaaacgggccgcagcttcaatggtttttactgcggtgatgggggccggataatgtttccccgctgtttgtgcgaccatccctttagcgatggtgaagctcatggtggcttcaatcttgctcagttttagtggttccagcttcggctgacgttttgctttccagtcgaggtcgccgttaatggcctggcgtaaaaccgcctttgcgccttcaaccagtttttctgctttgactacgccatccaccagaccgattttcagcgcctgatccgcgccgacatctttaccggcggcaatgatttccagcgcactgtcagcgcccagcatacgtggcatacgtacagaaccgccaaagcccggcatgatacccagtttggtttccggcagaccgatgcgcagatccggcgtcgccagacgataatcggtcgccagcacgcattcgcagccaccgcccagcgcatagccgttgacggcagcaatggtcggcaccggcagatcttccaggcgattaaacacgctattggcaaattgcagccactgacttaactgttcttcaggaacgaggaacagggacaaaaattcggtgatatcagcaccgacgataaaggctgctttgttcgaacgcagcagcagcccttttagatctgattgctgttccagcacgccgatggcctcgccgaggctggcgacggtcgcagtgtcgagtttattaactgaacctggggcatcaaataccagttcggcaatgccatcttccagccagtcaaggtacagggtgtcgcctttgtaaagcatgtcagtctcctgaatccgcaaggtgatctggtcgtaccagatgagtcgaagtgtgtattttgtgttaaaaatatgcaaacaaaagattaaagaaatgccgatctgatcacgctcggcagaaatcacgctctggatgaacgatgtgctaagatgcggagacttaaggtcaaaaaaacagaagggtaaaaaatggaatcactggcctcgctctataaaaatcatatagctaccttacaagaacggactcgcgatgcgctggcgcgcttcaagctggatgcgttacttattcactccggcgagctgttcaatgtttttctcgacgatcatccctatccgtttaaagtgaacccgcaattcaaagcgtgggtgccggtaactcaggtgccaaactgctggttgctggtggatggcgtgaacaagccgaaactgtggttttatctgccggttgattactggcacaacgtcgaaccgctgccgacctccttctggactgaagatgtggaagtgatcgcgctgccgaaagccgatggcattggtagcctgctgcctgctgcgcgcggcaatatcggttatatcggtccggtgccggagcgtgcgctgcaactgggtattgaggccagcaacatcaacccgaaaggggttatcgactacctgcattactatcgctccttcaaaaccgagtacgaactggcctgtatgcgtgaagcgcagaaaatggcggtcaacggtcatcgtgcggcagaagaagcgttccgttctggcatgagcgagttcgatatcaacattgcctatctgaccgcgaccggtcatcgtgataccgacgtaccttacagcaacattgtggcgcttaacgaacacgctgcggtgctgcattacaccaaactggatcatcaggcgccggaagagatgcgcagcttcctgctggatgccggggccgaatataacggctatgcggctgacctgactcgtacctggtcggcaaaaagcgacaacgactacgcacagctggtgaaagacgtaaatgatgaacaactggcgctgatcgccaccatgaaagcaggcgttagctatgtggattaccacatccagttccatcagcgcatcgccaaactgctgcgtaaacatcaaatcatcaccgatatgagtgaagaagcgatggtcgaaaacgatctcaccggaccgtttatgccgcacggtatcggtcatccgctgggcctgcaggtgcatgacgtagccggttttatgcaggatgatagcggtacacacctcgcggcaccggcaaaatatccgtacctgcgctgcacccgtattctccagccgggcatggtgttaaccatcgaaccgggtatctacttcattgaatcgctactggcaccgtggcgtgaagggcagttcagcaagcacttcaactggcagaaaattgaagcactgaaaccgttcggcggcattcgtatcgaagacaacgtggtgatccacgaaaacaacgtggaaaacatgacccgggatctgaaactggcgtgatggaaagctggttaattcctgcggcaccggtcacggtcgttgaagagatcaaaaagagccgcttcataacactgttggcgcataccgatggtgttgaggcggcgaaagcgtttgttgaatcggtgcgggcagaacaccccgatgcccgccaccattgcgtggcgtgggtggcgggtgcgccggatgattctcaacagctgggtttctctgacgacggggagccggcaggaacggcaggtaaaccgatgctcgcccagctaatgggcagcggcgtcggggaaattaccgctgtggtagtgcgctactacggtggcatattgcttggcaccggtgggttagtgaaagcgtatggcggcggcgtgaatcaggcgctgcgccagctaacgacccaacgcaagacgccattaaccgaatatactttgcaatgtgaatatagtcagttaaccggcattgaagcgttgctggggcagtgtgacggcaaaattatcaacagtgattatcaggcattcgttctgctgcgggtggcgcttccggcggcgaaagtggctgaattttccgcaaagctggcggattttagccgtggttcattgcaattgttagcgattgaagaataatccccacttcgttttgcagaactaaggaagcggcagagatgcattttcgcgccattacccgaatcgttggactactggtcatcttattttcagggaccatgattatccctgggctggtagcactcatctaccgggatggagcgggccgcgcttttacccagaccttttttgtcgccctcgccattggttctatgctgtggtggccgaaccgtaaagagaagggcgaactgaaatcccgtgaggggtttctgatagtggtgctgttctggaccgtgctgggtagtgtcggtgcgctcccttttatcttctcggaaagcccgaacctcacgattaccgatgcgttttttgaatctttctctggcctgaccaccaccggggccactacgctggtggggctggattcgctccctcacgcaatcctcttttatcgccagatgctgcaatggtttggcgggatggggatcatcgtgttagcggttgcgatactgcctatcctcggcgtgggtgggatgcagctctatcgcgcagaaatgcccggcccgctgaaagataacaaaatgcgcccgcgaattgcggaaacggcgaaaaccctgtggttgatttatgtcttgctgaccgtcgcctgtgcgctggcgttgtggtttgccggaatggatgcctttgatgccatcggccatagctttgcgactatcgctattggcggcttctcgacacatgatgccagtatcggttatttcgacagcccgactattaacactatcattgctatcttcctgctgatctccggctgtaactacggtctgcacttttcactgttaagtgggcgtagtctgaaggtttattggcgcgatccggaatttcgcatgtttatcggcgtacagtttacgctggtggttatttgtaccctcgtactgtggtttcacaatgtctacagttcggcgctgatgacaattaaccaggcgtttttccaggtggtgtcgatggcgacaaccgccgggtttacgactgacagcattgcccgctggccgctctttttgccggtactgcttttatgttcagcttttatcggcggttgtgccgggtcaacgggcggtggcctgaaagtgatccgcatcctgctgctgtttaagcaggggaaccgtgagctgaaacgactggtgcatccgaacgccgtctatagcattaagctggggaatcgcgcactgccggaacgtatcctcgaagccgtttggggatttttctccgcctatgcattggtgtttattgtcagtatgctggcgattatcgccacgggcgtggatgacttttctgcttttgcctcggttgttgcgacattgaataacctggggccggggcttggcgtggttgctgataactttaccagtatgaacccggtggctaaatggatcctgattgccaacatgctgtttggtcgtctcgaggtctttacattgctggtgctctttaccccgactttctggcgtgaatgatggagtaatacgtgaaaacattaattcttttctcaacaagggacggacaaacgcgcgagattgcctcctacttggcttcggaactgaaagaactggggatccaggcggatgtcgccaatgtgcaccgcattgaagaaccacagtgggaaaactacgaccgtgtggtcattggtgcttctattcgctatggtcactaccactctgcgttccaggaatttgtcaaaaagcatgcgacgcggctgaattcgatgccgagcgccttttactccgtaaacctggtggcgcgtaaaccggagaagcgcactccacagaccaacagctacgcgcggaagtttctgatgaactcgcaatggcgtcccgatcgctgcgcggtcattgccggggcgctgcgttacccacgttatcgctggtacgaccgttttatgatcaagctaattatgaagatgtcaggcggtgaaacggatacgcgcaaagaagttgtctataccgattgggagcaggtggcgaatttcgcccgagaaatcgcccatttaaccgacaaaccgacgctgaaataagcataaagaataaaaaatgcgcggtcggaaaattattttaaatttcctcttgtcaggccggaataactccctataatgcgccaccactgacacggaacaacggcaaacacgccgccgggtcagcggggttctcctgagaattccgacagagaaagcaaaaataaatgcttgactctgtagcgggaaagcgtattatgcacaccccgcgccgctgagaaaaagcgaagcggcactgctctttaacaatttatcagacaatctgtgtgggcactcgaagatacggattcttaacgtcgcaagacgaaaaatgaatacc

SEQ ID NO: 203 - DNA, 31888 bp, Escherichia coli
  source 1..31888: mol_type = genomic DNA
aagcccaacatcaacccacaatgacataatggggggcgggggaatgtcatatgcctatgaatatgatgtaaaatataatatatgtcatttgagaaaaaagagcagaatgaggtaaaaatctttggctgtgtattcagtctggtaatcatccaaggaaagcttatcagaagggtgatgactccaattagtagaacatatattttcgataaaagcaccgatgactttttcatgaagttctacagaacgcgagaaacagatggttctgcgggccagacgtttgattcgggttctcagggtcagattgttacgctcaatgtgctgagtaaaaatcttaccagtcagatgcttctccttcggtaactctctagcgtaactaccccattcgtcagtggtcaacatgccgatggtaaaagggtaagcagcgcccgcaattcacgacaggtttcgtcagcccgggggccaaaagtgtaggccagaacaccaccagttttcgtgttgtacacgtaccagagccagtgctgtcgcgctttactgccgacaaagctccattgctgactaagtttgcagatgagtgccacatcagcatgagcgaccggggatgacgttattcttcgtggcgagagttttttaaagttcggatgactgtattaatgccgattttcagcgtacgggcagtatcgcgaaccccggcaccgttgaaagtcatttcagcgatttggtctttaactcccggtttacggggctcgtaacagtaactgagctgaaatacccggtgacagtcacggccgcggaatcgatcatgtctttttgggttctgcccgtgacggtaaacctgaacggactggcaacgggggcaatgaaggttaactgtgaccatgaaacaaccttaaaagcgagtattatatccttaattcaactaattggaggcatcaccgtttaccggagcgacagcttgcggaaaggtcgtgcaactacaaagcaacaaacagactacggcgggaattatttttttcatcatccattaccacgaaaacagcggccactctttggcaaccgtggtgagttgtggcgcgtcgaaaacggcttgtggtgaaactaccgtttcctcaagcggaatatttttgccgtagcgttctttgagcttcgcctggaccagcgggttgctgagatcgaactctttcaacttctgctgctcgcccacgcgcattcccagcgcgttctggtaaaccttccacaccacttccgaacagtactggcgatcgtcgctccatgagaagctgaaatcatacggtttaccgagataacgttttgccgtttgcgccagtttttgctgttgttcaacactcagtccgccttcaacgcggcgaacaacgtacttacccttttcaccatgggcgatccactgcttgagcggggtgtattttaccgggccgaccgcttcaaaaacgtagggctttttgttgcgtatcaccagcataccggtgtggctgtaatcggaatgggtcgccagttggatcgctttactttgcgatgagcgagagatctgaaagatgatgtcgccggtttgcggctgccaggcaaaggcaggtacagaaaccagcaggctgaggatcagcagcctgtttttcatagttaaacgtccatgtataaaaagcggtgggtcgcagacaacgtgctcgttgtttatgccggatgcggcgtgaacgccttatccggcctacaagttcgtgcaaattcaataaattgcaatatgacgtaggcctgataagcgtagcgcatcaggcgattccactccgcgccgctcttttttgctttagtattcccacgtctccgggttaatccccatctcacgcatgatctcttttgccgcttccgggatttcgtcgctgcgctctttacgcagatcggcatcatccggcagaggttgcccggtaaaggcatgcagaaacgcttcgcacagcagctcgctgttggtagcgtgacgcaggttgttcacctgacgacgcgtgcgttcatcggtgaggatttttaacaccttaagaggaatggaaaccgtaatctttttgacttgttcactcttcttgccgtgctcagcgtatgggctgatatattcgccgctccattcagccatgagatacttaatcctcttcgtcaataaattgagaccagaccacacaatttatgtgggtactgaccgtaaacccgcatagtttaccgtacaggcgttaccgtgacatcgtgtaatgcacctgtcggcgtgataatgcatataattttaacggctatttgggatttgctcaatctatacgcaaagaagtttagatgtctagatgtattgacgtccattaacacaatgtttactctggtgcctgacatttcaccgaccaagcccagggaacttcatcacatgacgcgtaaacaggccaccatcgcagtgcgtagcgggttaaatgacgacgaacagtatggttgcgttgtcccaccgatccatctttccagtacctataactttaccggatttaatgaaccgcgcgcgcatgattactcgcgtcgtggcaacccaacgcgcgatgtggttcagcgagcactggcagaactggaaggcggtgctggtgcagtacttactaataccggcatgtccgcgattcacctggtaacgaccgtctttttgaaacctggcgatctgctggtagcgccgcacgactgctacggcggtagctatcgcctgttcgacagcctggcgaaacgtggttgctatcgcgtgttgtttgttgatcaaggcgatgaacaggcattacgggcagcgctggcagaaaaacccaaactggtactggtagaaagcccaagtaatccattgttacgcgtcgtggatattgcgaaaatctgccatctggcaagggaagtcggggcggtgagcgtggtggataacaccttcttaagcccggcattacaaaatccgctggcattaggtgccgatctggtgttgcattcatgcacgaaatatctgaacggtcactcagacgtggtggccggcgtggtgattgctaaagacccggacgttgtcactgaacttgcctggtgggcaaacaatattggcgtgacgggcggcgcgtttgacagctatctgctactacgcgggttgcgaacgctggtgccgcgcatggagttggcccagcgtaacgcgcaggcgattgtgaaatatctgcaaacccagccgttggtgaaaaaactgtatcacccgtcgctgccggaaaatcaggggcatgaaattgccgcgcgtcagcaaaaaggctttggcgcaatgttgagttttgaactggatggcgatgagcagacgctgcatcgtttcctgagcgggatgtcgttgnnnnnnnnnntgtcgttgtttacgctggcggaatcattagggggagtggaaagtttaatctctcacgccgcaaccatgacacatgcaggcatggcaccagaagcgcgtgctgccgccgggatctccgagacgctgctgcgtatctccaccggtattgaagatggcgaagatttaattgccgacctggaaaatggcttccgggctgcaaacaaggggtaaaaatgagtgtgattgcgcaggcaggggcgaaaggtcgtcagctgcataaatttggtggcagtagtctggctgatgtgaagtgttatttgcgtgtcgcgggcattatggcggagtactctcagcctgacgatatgatggtggtttccgccgccggtagcaccactaaccagttgattaactggttgaaactaagccagaccgatcgtctctctgcgcatcaggttcaacaaacgctgcgtcgctatcagtgcgatctgattagcggtctgctacccgctgaagaagccgatagcctcattagcgcttttgtcagcgaccttgagcgcctggcggcgctgctcgacagcggtattaacgacgcagtgtatgcggaagtggtggggcacggtgaagtgtggtcggcacgcctgatgtctgcggtacttaatcaacaagggctgccagcggcctggcttgatgcccgcgagtttttacgcgctgaacgcgccgcacaaccgcaggttgatgaagggctttcttacccgttgctgcaacagctgctggtgcaacatccgggcaaacgtctggtggtgaccggatttatcagccgcaacaacgccggtgaaacggtgctgctggggcgtaacggttccgactattccgcgacacaaatcggtgcgctggcgggtgtttctcgcgtaaccatctggagcgacgtcgccggggtatacagtgccgacccgcgtaaagtgaaagatgcctgcctgctgccgttgctgcgtctggatgaggccagcgaactggcgcgcctggcggctcccgttcttcacgcccgtactttacagccggtttctggcagcgaaatcgacctgcaactgcgctgtagctacacgccggatcaaggttccacgcgcattgaacgcgtgctggcctccggtactggtgcgcgtattgtcaccagccacgatgatgtctgtttgattgagtttcaggtgcccgccagtcaggatttcaaactggcgcataaagagatcgaccaaatcctgaaacgcgcgcaggtacgcccgctggcggttggcgtacataacgatcgccagttgctgcaattttgctacacctcagaagtggccgacagtgcgctgaaaatcctcgacgaagcgggattacctggcgaactgcgcctgcgtcaggggctggcgctggtggcgatggtcggtgcaggcgtcacccgtaacccgctgcattgccaccgcttctggcagcaactgaaaggccagccggtcgaatttacctggcagtccgatgacggcatcagcctggtggcagtactgcgcaccggcccgaccgaaagcctgattcaggggctgcatcagtccgtcttccgcgcagaaaaacgcatcggcctggtattgttcggtaagggcaatatcggttcccgttggctggaactgttcgcccgtgagcagagcacgctttcggcacgtaccggctttgagtttgtgctggcaggtgtggtggacagccgccgcagcctgttgagctatgacgggctggacgccagccgcgcgttagccttcttcaaggatgaagagtcgttgttcctgtggatgcgcgcccatccgtatgatgatttagtggtgctggacgttaccgccagccagcagcttgctgatcagtatcttgatttcgccagccacggtttccacgttatcagcgccaacaaactggcgggagccagcgacagcaataaatatcgccagatccacgacgccttcgaaaaaaccgggcgtcactggctgtacaatgccaccgtcggtgcgggcttgccgatcaaccacaccgtgcgcgatctgatcgacagcggcgatactattttgtcgatcagcgggatcttctccggcacgctctcctggctgttcctgcaattcgacggtagcgtgccgtttaccgagctggtggatcaggcgtggcagcagggcttaaccgagcctgatccgcgtgacgacctctccggcaaagacgtaatgcgcaagctggtaattctggcgcgtgaagcgggttacaacattgaaccggaccaggtacgtgtggaatcgctggtgcctgctcattgcgaaggcggcagcatcgaccatttctttgaaaatggcgatgaacttaacgagcagatggtgcaacggctggaagcggcccgcgaaatggggctggtgctgcgctacgtggcgcgtttcgatgccaatggcaaagcgcgtgtgggcgtggaagcggtgcgtgaagaccatccgctggcatcactgctgccatgcgataacgtctttgccatcgaaagccgctggtaccgcgataatccgctggtgatccgtgggcctggcgctgggcgcgacgtcaccgccggggcgattcagtcggatatcaaccggctggcacagttgttgtaatttcagaaatttaataatgcccggtactcatgttttcgggtctatggtttctaatgaaatatattgaattatcataggattaggccggatgaagcgtttacgacgaatccggcaagaagcaataagtacatggttagtttatatttgcagtccggtttgctttgcataccggattttctttttcttaccatcctgaagttttttcatcttccctgatttttcctcaccatcattggtcatttttcggttgacgcccttcggcttttccttcatctttacatctggacgtctaaatggatagatgtgcacaacacaacatataactacaagcgattgatgaggtaaggtatgagcttttttcacgccagccagcgggatgccctgaatcagagcctggcagaagtccaggggcagattaacgtttcgttcgagtttttcccgccgcgtaccagtgaaatggagcagaccctgtggaactccatcgatcgccttagcagcctgaaaccgaagtttgtatcggtgacctatggcgcgaactccggcgagcgcgaccgtacgcacagcattattaaaggcattaaagatcgcactggtctggaagcggcaccgcatcttacttgcattgatgcgacgcccgacgagctgcgcaccattgcacgcgactactggaataacggtattcgtcatatcgtggcgctgcgtggcgatctgccgccgggaagtggtaagccggaaatgtatgcttctgacctggtgacgctgttaaaagaagtggcagatttcgatatctccgtggcggcgtatccggaagttcacccggaagcaaaaagcgctcaggcggatttgctcaacctgaaacgcaaagtcgatgccggagccaaccgcgcgattactcagttcttctttgatgtcgaaagctacctgcgttttcgtgaccgctgcgtatcggcgggcattgatgtggaaattattccggggattttgccggtatctaactttaaacaggcgaagaaatttgccgatatgaccaacgtgcgtattccggcgtggatggcacaaatgtttgacgggctggatgacgatgctgaaacccgcaaactggtgggagcgaatattgccatggatatggtgaagattttaagccgtgaaggagtgaaagatttccacttctatacgcttaaccgcgctgaaatgagttacgcgatttgccatacgctgggtgttcgacctggtttataaatagtgtggcttttgtgaaaatcacacagtgatcacaaattttaaacagagcacaaaatgctgcctcgaaatgagggcgggaaaataaggttatcagccttgttttctccctcattacttgaaggatatgaacctaaaacccttttttataaagcatttgtccgaattcggacataatcaaaaaagcttaattacgatcaatttgatctacatctctttaaccaacaatatgtaagatctcaactatcgcatccgtggattaattcaattataacttctctctaacgctgtgtatcgtaacggtaacactgtagaggggagcacattgatgagcacgtcagacgatattcataacaccacagccactggcaaatgcccgttccatcagggcggtcacgaccagagcgcgggggcgggcacaaccactcgcgactggtggccaaatcaactccgtgttgacctgttaaaccaacattctaatcgttctaacccactgggtgaggactttgactaccgcaaagaattcagcaaattagattactacggcctgaaaaaagatctgaaagccctgctgacagaatctcagccgtggtggcctgccgactggggcagttacgccggtctgtttattcgtatggcctggcacggcgcgggtacttaccgttcaatcgatggacgcggcggcgcgggtcgtggtcagcaacgttttgcaccgctgaactcctggccggataacgtaagcctcgataaagcgcgtcgcctgttgtggccaatcaaacagaaatatggtcagaaaatctcctgggccgacctgtttatcctcgcaggtaacgtggcgctggaaaactccggcttccgtaccttcggttttggtgccggtcgtgaagacgtctgggaaccggatctggatgttaactggggtgatgaaaaagcctggctgactcaccgtcatccggaagcgctggcgaaagcaccgctgggtgcaaccgagatgggcctgatttacgttaacccggaaggcccggaccacagcggcgaaccgctttctgcggcagcagctatccgcgcgaccttcggcaacatgggcatgaacgacgaagaaaccgtggcgctgattgcgggtggtcatacgctgggtaaaacccacggtgccggtccgacatcaaatgtaggtcctgatccagaagctgcaccgattgaagaacaaggtttaggctgggcgagcacttacggcagcggcgttggcgcagatgccattacctctggtctggaagttgtctggacccagacgccgacccagtggagcaactatttcttcgagaacctgttcaaatatgagtgggtacagacccgcagtccggctggcgcaatccagttcgaagcggtagacgcaccggaaattatcccggatccgttcgatccgtcgaagaaacgtaaaccgacgatgctggtgaccgacctgacgctgcgttttgatcctgagttcgagaagatctctcgtcgtttcctcaacgatccgcaggcgttcaacgaagcctttgcccgtgcctggttcaaactgacgcacagggatatggggccgaaatctcgttacatcggaccggaagtaccgaaagaagatctgatctggcaagatccgctgccgcagccgatctacaacccgaccgagcaggacattatcgatctgaaattcgcgattgcggattctggtctgtctgttagtgagctggtatcggtggcctgggcatctgcttctaccttccgtggtggcgacaaacgcggtggtgccaacggtgcgcgtctggcattaatgccgcagcgcgactgggatgtgaacgccgcagccgttcgtgctctgcctgttctggagaaaatccagaaagagtctggtaaagcctcgctggcggatatcatcgtgctggctggtgtggttggtgttgagaaagccgcaagcgccgcaggtttgagcattcatgtaccgtttgcgccgggtcgcgttgatgcgcgtcaggatcagactgacattgagatgtttgagctgctggagccaattgctgacggtttccgtaactatcgcgctcgtctggacgtttccaccaccgagtcactgctgatcgacaaagcacagcaactgacgctgaccgcgccggaaatgactgcgctggtgggcgggatgcgtgtactgggtgccaacttcgatggcagcaaaaacggcgtcttcactgaccgcgttggcgtattgagcaatgacttcttcgtgaacttgctggatatgcgttacgagtggaaagcgactgacgaatcgaaagagctgttcgaaggtcgtgaccgtgaaaccggcgaagtgaaatacacagccagccgtgcggatctggtatttggttctaactctgtcctgcgtgcggtagcggaagtttacgccagcagcgatgcccacgagaagtttgttaaagacttcgtggcggcatgggtgaaagtgatgaacctcgaccgtttcgacctgctgtaatctgaccttcttcagcgactgtctttcaggcagtcgctgaagtttctttaccggcgtatagtgtccacaggaaaactacacactggatctctcatgtctgccgcaggaaagagcaacccactggcaatcagtggcctggttgtgctcacacttatctggagttatagctggattttcatgaagcaagtcaccagttacatcggtgccttcgacttcaccgccttacgctgcattttcggcgctctcgttttattcatcgtccttttattacgtggtcgcgcaatgcgcccgacgccgtttaaatacaccttagctattgccctgttacaaacctgcggaatgattggcctggcacaatgggcgttggtcagcggaggtgcggggaaggtggcgatcctgagctataccatgccgttctgggtggtgattttcgccgcgttgtttctcggtgaacgcctgcgacgtgggcaatatttcgcgatactgattgccgctttcggcttatttttggtgttgcagccgtggcaactcgatttctcttcgatgaaaagtgccatgctggcaattctctccggtgttagttggggggcgagcgcgattgttgctaaacgtctgtatgcccgtcatccgcgcgtggatttattgtcgttaacatcctggcagatgctgtatgcggcgctggtgatgagtgtggtcgctttactggtgccacaacgtgaaattgactggcagcccactgtgttctgggcgctggtctacagtgcgattctggcgacggcgctggcgtggagcttatggttgtttgtattgaaaaacttgcctgccagtattgccagcttaagcacactggccgttcccgtttgcggcgtactcttttcctggtggctgctcggcgagaatcctggcgtggttgaaggtagcggtattgtgctgattgtgctggcactggcgctggtgagccgtaagaaaaaagaagctgtcagtgtaaaaagcatctgaattttttcttcatgtggggcgatcgcttatttaacaaaataccgataatgccccaccatccgccagctaaacagtacatcttcttcctgcgcgcctgcgccaatgttatgtatcaccagcggcgtaccgtcgcgggcgaagccatctgacaccaccccaatatgcgccagcccgttatctaatcgccaggagacaatatcgcccgcttgatagtcaccggcatttttactgatggggcgtgttttgttgtggcggctaaaccaggtttccagattaggcacccgacggtgatcgatgttgctgtccgggcgctttaacttccatttttgcgggtactcggcaaaattcttcgccatatcttcgtgaaccagtttctgcaaatcgaccttctggctgcgcagggcgcggatcaccacatcggaacataccccgcgttcttgcgggacatcaccgccaggataggtaagctgcatatacgccggatcgtaaaatagcgtgctgccgatttgctgtctggcaccgtctgcgatggcaaggttggtattggcctggatttgtaccacggttggtggaacggcgggagattttaaggagtggctggtaaatgccgttagcaggctgagcagcgccagtgaagctttcatctggttcgtccgtgaaaataagagtcacagattcgaccttccgggctaacgattgttctgtggagaaaatgtccagaagcggataaaaaactcctgaacaacgtgggagtttcagattactggcacagagtgccggatgcggagtgaacgccttatccggcctacaaaagcacgcatattcaatatattgcagagatttcgtaggcttgataaacgtagcgcatcaggcaattttgcgttcaaactcccggacaagccgggagtttggagtaggttattcccactcttgcaggaaacgctgaccgtactggtcggctaccagcagagcggcgtaaacctgatctggcgtcgcgccgccaggcatgttgtgaatggtttcaccttctgcacatgccgcttctgccacaattcgcattttcgccgggacatcttctttaatatccagttgagcgagagttattggcaaacctaccgcatggctaagtgcagctacggtttcgatttcctcaaccggtgcgttttccagaaccagctgcgtcagcgtaccaaatgccactttttcaccgtgataatagtgatgcgcgtccgggatagcggtcaggccgttatgcaccgcgtgagccgccgccagcccgccgctttcaaaaccaacgccgctcaaataggtgttcgcttcaatcacgcgctccagcgccggggttactacatgctgttcggcggcaagcatcgctttttcgccttcttccagcagggtgttgtagcacagttcagccagtgccagcgccgcctgggtgcacttgccgcccgccatggtggtcgcgccgctacgagagcaagcacgcgcttcaaaccaggttgccagcgcatcgccgatacccgctgctaacagacgtgcaggtgcgcccgcgacgattttggtgtcgacaatgaccatattcgggttatttggcaacagcagatagcggtcaaactcaccctcatcggtgtagataacagacaatgcgctgcacggtgcatcggtagaggcgatagtcggtgcgatcgctaccggaacacccatgaaatgtgccagtgctttggcagtatcgagggtttttccgccaccgataccgagaattgcgccacactgcgcagtctccgcgatgccacgcagacggtcgatctcattttgcgaacattcaccgccaaacggcgcaatttctactaccagtccagcatctttaaagcttttctcgacagtggattgagcaaaacctaaaacaaatttgtcacccaccactaaccagcgttctgccagcggcttcaggtattcgcccagacgattaatcacatcagcgccctggatgtatttacccggtgattgaataatgcggtccataattgctcctttagagatgagtagtgccaaatgcggcattccagtcgtgttcgaacttctctatagctgactctaccgcaggggtgttgagcatttgttgcgctacatctaagggcagggtgatggattcacatcctgccagtaaacagtccagcgcctgacgcggcgttttaaagctggccgccagcaccatgctttctggtgcgtgcatttctaacagcgcttgcagctcctgaaccgtacgaatgccgtccccgccctgggcatctacgcggttaacatacggagcaacgtattttgcccctgccagcgcggccagtaacccttgtgcagcactgtacactgcggtgccaagcgtagtaataccctcttttttcagcatcttaatggcggccagaccttcggaagtcaccgggattttcaccacaatgcccggaatggcgtcgcgcaggcgcttcgcttcttccaccataccctgcgcgtcacgactcatagtctgagcaaacagaatgccctcatcaccaatcgctttttgcagacgcggcagaacttcccatatggactccttgctggcagcgataatgctcgggttagttgtcaccccggcaatggggaatatgcgtgccagacgttcgacttctgcgacgttagcggtgtccagatacagttccatgatgtttccttttacagttccagttcatgttgcagcaggctggcgatagcgtcggcagaggcggcgttaaccagcgcgttacggaattcttcgtgcatgatgcggcgagcgaggcgcgagaaaatgcgcatgtgctgatcgcccgcagcgtgtttgttcagggttaacataatgatgaattgcgcttcatcatcgccccagcgcaccggcgcttgcagacgcgccacgctgatggtggattgctcaatgtgttctgatttgctgtgtggaatggcaaaactaaagcccagaccggtagagaaaacggcctcgcgcgcccataagtcggcttccagtttacgcggatagcggcagcggcccgccagcagcaggttatcggtcatgcctttgagcacttcttctttgctgcgccagtcactttccagcgtgatgcactcggcggtgaccagcggtgcgtcctgttgggtcatgcggaattgcgccagcaggtgttccacttccagcgaagtacggcaggccattgcctggttgagcaacttgcggcactcacggctatcaagttgcgccatccgcgctttcgccgccggaattgatggtgcgctcatgctgagttcatccagccctaagccgaccagcaacggcagcacggaacctttcgctcccagctcaccgcacagaccaatccatttgccctggcgatgcaccgcctgcacggcgtaatcgagcgcccgcaagaatgccggattcaggctgttgtagtgacgagtaaccttagcgttatcgcgatccactgccagcagatattgcgtcaggtcattactaccaatactaaagaaatcaatctcttcgcagcattgatcgatgatgaacatcaccgacggtacttccagcataatgccaagctggatcttctcatcaaacggaatgtgttcgttacgcagttgctgtttggcttccgccagtttttctttcacccataagatctcttccattgaggagatcatcgggatcatgattttcaggctgccgtgagcggaggcgcgcaggatcgaccgtagttgtgtggtgaacagcgaggcgtattcttcataaatacgcacagcgcgataaccgaggaacgggttagcttctgccggaatgttcagataatcaacgggtttgtcgccgccaatgtccatagtgcgcacaataatgctgcgtccgttggcagactccagcgcctgacaaaaaatgttgtacagctcgctttcgcccggtgcactggtgcgatccatatagagcatttcagtgcggaacaaaccaacgccttccgcaccattgccgaatgcggcctgcgcttccacggagtgagcgatgttagcggcaatttcaatgcggataccgtcagcggtacgggcttgttgggtcagccagacacgctgttgctcacgcagggcgtcctgtacgcgggcttcttgctgataataacgagctacagcttctcctggctcaaccacaatcgccccagcgttgccgtcgatataaatcgtttgatgctgccacggagtaagggcatcaatatctacaccaaccagtgtcggaatgttgaacgaacgggcaagaattacggtatgtgaggtggtgccgccacttttcagtaacagacctttgaggtgatttttatccagttcgaggaactggctgggagtcagttcatcagccatacaaatggcgggctgcgtcagtttgcccggtgccgggaagcgttgctcaccgtagatttgctggagtaactggaagcagacgtcgcgtacgtccagggcacgttcttgcaggtagctgctgctggaacgggcgaactcttcgcaaaagtgattcgcactggtgacaatcgcttcggcgcagcttaatccggcgctgacgcctgccagtaaatgttcgcgcagggaagtatcgccagccagggatcggtgcgcttccagaatcgcgctggtggcaccgtcgctatccagcagacgaaactcaatgtttttcagtaccagcgtcaggccgttttccagtgcggattgctcggcgtcaacgcctttggctgcgggaagattacccagcgcattgagatctaaagaagagatcggcgtcagaatgccgcctgcactaccgctgcacacggtgcgggcgcggataatttgcggattcagattggtcagtgaaaccggcagtggttccagttcgtcagatttaacttccgccagcggcgcatcgcagtgggggaattcatcgcgcagccattggcttaaacgctggtgcgcttcctgttcgtcggccccggaaatcagtaactggcagttatcgcccgccagcgtatcggtgccaatcagcgcaagggcgcttttggcgttgcccttgcggtcagtgcgcaggttatgccactcaatttgtgatgaaaaagtattacacagcgtttcaacgtggcttgccggacgtgcatgtacgccgttaggtagctcacaaataaattccacaatcagggccattgcctctctcccggtacggttttctgtttacaggataagagcgcacggcaacggcctgccatgtgacaaatctgccaaaagctggacaaatgtaatgtaaccgtcaatttgcgacgcgtctcacaagacgctgttttgcggcatgcttccggtttatcgcaagttatgaggcggatcgcatttttgtactgatattacaaaagtccagtaaatggcctttttatccactgtttgctccgcctgcgattgcctattgtttcctccatcaaaaatatggacatgggctttcgcaagcccgggagcagcttatgaatgagttggtgcagatcctgaaaaatacccgtcagcatttaatgacgggcgtttcacacatgattcccttcgtggtatcgggcggtattttgctggcggtttccgtcatgttgtatggcaaaggcgcagtgccggatgccgtagccgatccaaatctgaaaaaactgtttgatatcggcgttgcgggcttgacgctgatggtgcctttcctcgcagcgtacatcggttattccattgcagagcgttctgcgctggctccgtgcgctatcggtgcctgggttggtaacagctttggtgcgggcttctttggtgcactgatcgccgggattatcggcggcatcgtggtgcattacctgaagaaaattccggtgcataaagttctgcgctcggtgatgcctatcttcattattcctatcgtcggcacactgattaccgcaggcatcatgatgtggggcttgggcgagcctgtaggggcgttgaccaacagcctgactcagtggcttcaggggatgcagcagggcagcattgttatgctggcggtgatcatgggtctgatgctggcgttcgatatgggcggtccggttaacaaagtggcctatgccttcatgctgatttgcgttgctcagggtgtttataccgtggtggccatcgctgccgtgggtatttgtatcccgccgctggggatggggctggcgacgctgattagtcgtaaaaatttctccgcagaagagcgcgaaaccggcaaagcggcactggtgatgggctgtgttggcgttactgaaggggcgattcctttcgccgctgccgatccgctgcgtgtcattccttccatcatggtcggttcagtttgtggtgcagtaactgcggcgctggtcggtgcgcagtgctatgcaggctggggtggtctgattgtgctgccggtggttgaaggcaagctgggttatatcgcagcagtggctgtcggagcagtggtgacggctgtttgtgtgaacgtgctgaaaagtctggcgcgtaaaaatgggtcttcgactgatgaaaaagaagacgacctggatttggattttgaaattaattaattgaggaacgagccatgacgaaaattattgcagtaaccgcatgtccttcaggtgttgcccatacctatatggcagcagaggcgctggaaagtgccgcgaaagcgaaaggctgggaagtgaaagtagaaacccaggggtcaattggtctggaaaatgaactgactgcggaagatgtggcgagcgctgatatggtgattctgaccaaagatatcggcatcaagtttgaagagcgttttgctggcaagaccatcgtgcgcgtcaacatcagcgatgcagtaaaacgtgctgacgccattatgagcaaaattgaagctcacctggcgcaaaccgcttaagttcttctcccgctcgcaagggcgggttcgctttcccacaggagttcctcatgacgaatcgtatctctcgcctcaaaactgcactgtttgccaatacccgtgaaatctcgctggagcgggcgctgctttataccgccagccatcggcaaaccgaaggcgaaccggtgatattgcgccgggcgaaagcaacagcgtatatccttgaacatgttgaaatttcgattcgtgatgaagaactgattgccggtaaccgcaccgtaaaaccgcgcgctgggattatgtcgccggaaatggacccttactggctgctgaaagagctggatcaattcccgacgcgtccgcaggaccgctttgctatcagtgaagaagataaacgtatctaccgtgaagagttgttcccgtactgggaaaaacgttcgatgaaagatttcatcaacgggcagatgacagatgaagtaaaagccgcgaccagcacgcagattttcagcatcaaccagacagataaaggccaggggcacattattattgattacccacgcctgctgaatcacgggctgggggagctggtggcgcagatgcagcaacattgtcagcaacagccggagaatcacttttatcaggccgcgctgttactgctggaagcctcgcagaaacacattctgcgttacgctgaactggcggaaacaatggcggcaaactgcacagatgcccagcgtcgcgaagaactgctgactattgcggagatctcccgccataacgccgaacataagccgcagacgttctggcaggcgtgccagttattctggtacatgaacatcattctgcaatacgaatccaacgccagttcgctatcgttggggcgcttcgaccagtatatgttgccgttctatcaggcatctttaacccagggcgaagatccggcgttcctgaaagaactactcgaatctttatgggtgaaatgcaacgacatcgtgctgttgcgctccaccagcagcgcgcgttatttcgcaggtttcccgaccggctataccgcactgctcggcgggttaaccgagaacggacgtagcgcggtgaacgtgctttcgttcctttgccttgacgcttatcaaagcgtgcaattaccgcaaccgaacctcggcgtgcgcactaacgccttgatcgacacgccgttcctgatgaaaaccgccgaaaccattcgcctcggcaccggtattccgcaaatctttaacgatgaagtggtggtaccagcgttcctcaaccgtggcgtttcgctggaagatgcgcgcgactattccgtagtgggctgtgtggaattatctattcccggcagaacctacggcttgcatgacatcgcgatgtttaatctgctgaaagtgatggaaatctgcctgcatgaaaatgaaggcaatgctgcgctgacttatgaaggtttactggagcagatccgcgccaagatcagccactacatcaccctgatggttgagggcagcaatatttgtgatatcggccatcgcgactgggcacctgtaccgctgctctcgtcttttatcagcgattgtctggaaaaaggtcgcgatattaccgatggcggcacgcgttataacttctccggcgtacaggggatcggtatcgccaacctgagcgattctctccatgcgttgaaagggatggtttttgagcaacagcgtttaagttttgacgaattgctgtcggtattaaaagccaactttgcaacgccagaaggcgaaaaagtccgtgctcgcttaattaaccgcttcgagaaatacggtaacgatatcgacgaggtggataacatcagcgccgaactgttacgccactactgcaaagaagtggaaaaataccagaacccgcgcggtggttacttcacgccgggatcgtataccgtttctgctcacgtcccgttgggatcggtggttggcgcgacgccagacggtcgttttgccggggaacaactggcagacggcggcttgtcacctatgctgggccaggacgcacaagggccaacagcggtactgaagtcagtcagtaagctcgataatacgctgctgtctaacggtacgttgctgaacgtgaaattcactccggcgaccctggaaggtgaagcgggattacgcaaactggccgacttcttacgggcgtttacccagcttaagttgcagcatattcagtttaacgtggtgaacgccgacacgttgcgggaagcgcaacagcgcccacaagattatgccgggctggtggtgcgcgttgccggatacagcgccttctttgtcgaactgtcgaaggagatccaggatgacatcatccgccggacagcgcatcagctgtaacgttgtggaaacgcgccgcaatgatgtggcgcgcattttcaacattcagcgttattcactgaatgacggcgagggcattcgtacggtggtcttttttaaaggctgtccgcatctttgcccatggtgtgctaatccggagtcgatctccggcaaaatccagacggtacgcagagaggcgaaatgtctgcactgtgcgaaatgtttgcgtgatgcggatgaatgcccctccggggcgtttgaacggattggtcgcgatatcagccttgacgcgctggaacgggaagtgatgaaagatgacattttctttcgcacgtccggcggcggcgtcacgctttctggcggcgaagtgttaatgcaggcggagtttgctacccgttttttacagcggctgcggttgtggggcgtgtcatgcgccattgaaactgccggagacgcgccagccagcaagctgttaccactggcgaaattgtgcgatgaagtgctgttcgatttaaaaattatggacgcgactcaggcgcgggatgtggtgaagatgaacctgccacgcgtgctggagaatctgcgtttgctggtgagtgagggtgtcaacgtgatcccgcgtttaccgttgatccctggtttcacgctcagccgggagaatatgcagcaggcgctggatgtactgatcccgctgaaaatcaggcagatccatctgttaccgtttcatcagtacggcgaaccgaaataccgcctgctggggaaaacatggtcgatgaaagaggtgcctgcgccgtcgtcagccgatgtgacaacgatgcgcgaaatggcagaacgggccggatttcaggttaccgtgggaggttaaaatggcatacctggtggcagtaaccgcctgcgtaagcggcgtggcgcatacttatatggcggcggaacggctggaaaagttgtgccagttagagaagtggggcgtcagcattgaaactcagggcgcgctgggaacggagaatcgtttagcggacgaggatatccgtcgggcggatgttgctctgttgattacggatatcgagcttgccggtgccgagcgatttgaacattgccgctatgtgcaatgcagcatctacgcattcctgcgtgagccgcagcgggtaatgagcgcggtgcgcaaagtgctttctgcgccgcagcaaacccatcttattctggagtagtcggtttttctgtcagttggctgtggtactgccgacgatattccgacggcgagcgttcggtgtttttacgaaacagacggcagaagtagttgctgtcgacaaagccgcaggcgtgcgccacttcttttaccttcaggtcatagcctttcaataacgtcttagcgtgctccagtcgcgtgtgattcaggtattcgttaaaaccaatggcccccgttttttgaaacaggtgcgagagatagtttggtgaaatatagaatgcctgtgcgacagattcgcgggtaagcgcggaggcatagcgttcgtcgatataatcgcgaatagcttcaaatagtgcctggctgcgtgaggcggtctggatttggctgccgagcaaatcgcggcagtggctaagcaggctggcgacgataagccttgccgtttgctgctcctgcggctgcatttgcatttcattgagcgtttgtagcagaaaagaacctatgcgtgggccgcgccgggcgacgtgttgcttcgccagattttgatattgtttgccatcccattgcacgacgctgaagccgagttgctgtttgccaaacagcacgctaaaggtagtagcgggggcttgccattgtggaaaattccagccaccagcaggaacgtacagcacatcgccgggaactaacgttgctccagcgccggtatcaacaaactcaccttccagcacaatttccagccgtggaaaatcgacctgatacgcgagatcgggcaccgggccgttactgctggcaaagtaaatctggcgcagggacagcgggccgttgatcaggcgggagagcagatagctgacgtcgtgatacatgttattcccttaggtatgtagacgggaaaacagtaactggcattattaaaaaaggccacctgaaaagtgtggcctgaggggagttcgatgtaaacattgcggcagtatcgcatccggcaaatagcgccagacgcgatacaaaggtcatttactgattacccacctgatcgccatacggcagcgtgtcgtaatcgatcagcgcgtttttcttgtacgggttaccaatccagcgggtagtttctttgaactgcggattcaccactgaacgggttggatcgtaaccgtcgtaagataagcctgctaaatctgaccaggtgtggatcagttccgccaggctgtatttacgatcaacatcctgcgagaaatcacgcggatgagtcgcttgccatttttccgacgtccacagcaggaacggaatggtgtacatgtggcgcgtcgggttgtcttcgttacgcccctgagttttgtgcggcggcgtgtcgtaaacctcttcaccgtggtcagagaaataaaccaggaaaccgttcgggtttgctgctttaaagtctttaatcaggctggcaaccacatgatcgttatacaggttagcgttgtcataatcgttatatgactccagctcttccgcgtttaatccaggcggaacatgatcggtattgccatcaaacttgccctgattttccgggtagcggtatttgtatttgatatgcgtacccagcagatgaacgatgatcagtttcttcggcgccgggtccttcagcacttcctggaatggtttcagcacgttggtgtcgtattcacgcgcactctgcgtacgttgctggttcatatagaactgtttgtcggtctgcttcgaaaataccgtcagcatggtattgcgggcggtcatcgtctgctggttggtgatccagaaggtttttataacctgcctgtttcatcatgttcatcagcgannnnnnnnnnacagatccgggttcttttcattggcaaaggtcagcgcctgttgcaggatttcaatggtgtacggacgagacgtaactacgttattaaacacggtcagattcggatcagttttatgcagcgcatccagctccggcgtggtttcacgcggataaccgtacagactcatgcgtccgcgctgggtcgactcgccaatcaccagcactaaagtgcgcggttcgttacccgattcatctttgaaattagccagtggcggcaaggcattattttcattcagtaactttgttagcgagtttagttgctgacgatactgataatagccggtcaggaattgccacggtgcggcaggctccatacgcgaggccaggttatccaacgttttctcaaacggcttgtttttgataaacgtattcatggcgatcggatgcagaatcaagccataaagcagggcaaaagagacaacataacgccacggctttggaatatagaccgggcgcaggcgtgtccacagcagaactgccaccgccgtataggccagcgcgataagcacaattttcaggctgaaatactggcttaaatactcgctggcttcgttggtgttggtttcgaacatcacaaacagaacgctctgcgagaactcctgcccgtagatgacgtagtagcatagcgccgccagagaggccgcccatagcaccacgccgattactgcggcaataattttaatccgcttcggaaagaggaataccgggatcaaccacagcgagctgaataacagcgagtcgcgaatgccgttggtgccactataaccactgatgtaaataatggcctgtagcagagtagagaaaaaccaaaagtagagcagtgcccaacccagggctttccagctaaaaaggggtttagcctggacttctgtggaatgcatagtaagaacctgtnnnnnnnnnntcgccgaatgtaacgacaattccttaaggatatctgaaggtatattcagaatttgaataaaatgcagacagaaatatattgaaaacgagggtgttagaacagaagtatttcagaaaaccctcgcgcaaaagcacgagggtttgcagaagaggaagattagccggtattacgcatacctgccgcaatcccggcaatagtgaccattaacgcttgttcgacgcgaggatccggttcctggccttctttttctgcctggcgggagcggtgcagtaactcggcctgcaatacgttcagcgggtcggtgtaaatattccgtagctgaatagactctgcaatccacggcagatcggccattagatgggaatcgttggcaatcgccagcaccactttgatgtcttcttcttgcaggttgcgtaactctttacctaacggccacagtgctttgtctaccaggcgttggtcatagtattccgccagccacaggtctgctttggcgaagaccatctccagcatgccgagacgcgtcgagaagaatggccaatcgcggcacatggcttccagctcgctctgtttgccatcttcgaccactttttgcagcgccgtacctgcacccagccaggcggggagcatcaggcggttttgcgtccaggcaaaaatccacggtatggcgcgcagcgactcgacgccgccggttgggcgacgtttcgccggacgtgaacccaacggcagtttgcccaattcttgttccggcgtagcggagcggaagtaaggcacaaaatctttgttttcacgtacgtagccacggtagagatcgcaggagatgactgacagttcatccataatgcgacgccagctctctttcggctcaggtggtggcagcaggttggcttccagaatcgccccggtgtacagcgacaggctgctgacggtgatttctggcagaccatatttaaagcggatcatctcgccctgttcagtcacgcgcaggccacctttcaggcttcctggcggttgtgacagcagcgccgcatgagcaggtgcgccgccgcgaccaatggaaccgccgcgaccgtggaacaacgtcagctcaatacccgctttttcgcaggttttgattaatgcatcctgtgcctgatattgcgcccaggaagctgccatcactcccgcatcttttgctgagtcggaatagccaatcatcaccatctgtttgccctgaatcaggccacgataccagtcaatattgagcagctgggtcatgacatcgttggcgttgttcagatcatcgagggtttcaaacagcggagcaaccggcatcgcaaacccgatacccgcttctttcagcagcaggtggacagccagtacgtcggacggcgttttcgccatcgagatcacgtaggcggcaatggagccttgcggcgcttcggcaatcacctggcaggtatcgagcacttcgcgcgtttcggcgcttggttgccagttgcgcggcagaagcggacgtttggagttcagttcgcggatcaggaacgcctgtttgtcggcctctgaccagctttcgtagtcgccgataccgaggtagcgggtcagctcgcccagcgcttcggtatggcgggtgctctcctgacggatatcaatacggaccagcggtacgccgaaacatttcacgcggcgcagggtgtcgagcagatcgccgttggcgataatacccatgccacacgcctgaagtgactggtagcaagcgtagagcggttcccacagttcttcgttttgtgtcagcagcccttctggttttggcagttcttcgcctttcaggcgcgcttccagccatgcctgtgtcgccatcaggcgagaacgcaggtttttcatcagatagcgatacggttctgcggcaccttcttcgccaaccagcgccagcagttcaggggtcgcttcaaccatcgacagttcagaaaccagcacctgaatatctttcaggaacaaatcggtggctttccagcggctgagtagcaggacgtggcgggtgatatcggcagtgacgttcgggttgccgtcgcggtcgccgcccatccacgaagtaaaacggaccggaacaaattcgacgggcagtttgtagccgaggttctcttccagttgttcgttcagttcgcgcaggtaatttggtacgccttgccacaggctgttttccactacggcaaagccccatttggcttcatctaccgggcttggacgcagcttacggatttcatcggtatgccatgactgggcgattaactggcgcaggcgacgcatcagctggttgtgttcgtagtcagcgatatctttgttatcgagctgttttaagcaggcgttcacttccaccattttgtggatcagtgtacgacgggtaatttcggtagggtgagccgtgaggaccagttccagcgacagcgattccactgcttttttgatggtgtcttcgctcagttccggctggtttttcagtttacgcagggtgcgggcgatcacttccgggttgctggcagcttcgcctttcggcgaaatgctgtggtattgctcggcggtgttggccaggttcaggaactgactaaacgcacgcgcaacgggcagcagctcgtcgttcgacaaattttgtaaggtggtgagtaactcctggcggttagcatcattgccagcgcgtgaagatttggacaacttacggatagtttctacgcgttcaagaatgtgttctcccaacgcatccttgatggtttctcccagcactttgccgagcatactgacattactacgcaatgcggaatattgttcgttcatattaccccagacaccccatcttatcgtttgatagccctgtatccttcacgtcgcattggcgcgaatatgctcgggctttgcttttcgtcgtcttttataaagccacgtaaaagcggtgacgtcaaatgctgcgaaatcgcttcagcaaacgaataaatagcaggaatttacgtcattaaattcacgacgctttaaataagcgtaacttatggaaatgttaaaaaatcgccccaagtaacaccaaaggtgtaggtcggataagatgcgcaagtatcgcatccgacattattgcggcactggagtttgacaacagtgccggatgcggcgcgagcgccttatccggcctacgttttaatgccagcaaaaatggtgaattacctgggttatcagttcgcgggtgggcttgataaaccgtgtttccagatattcatcaggttgatgagcctgattaattgagccaggccccaacaccagcgtcgggcataacgtttgaataaacggcgcttcggtacagtagttcaccacttcggtctttgctccgagcaatttctcaactacttcaaccagttgatgattcggtgggcattcatagccagggatcggcggatgcagctcgtcgaccgtcagacgacccggccagcgttcgctcaccggagccaatgcatcgttgagcaaaccattaagttcattgagtgtcatgccaggcagcggacgaatatccatatgcaactcacagcaagcgcaaatacggttagaagcgtcgccaccgtgaatatgcccgaggttgagcgtagggtatggcacggtaaacgcttcgtagtgataacgttctttcaggttatcgcgcaattgcaaaatatgcccgatggcgtcgtgcattagttcgatagcgttaactccgcgtgctggatcgctggagtgccccgactggccctgaatacggatggcgttagagatatgacctttatgtgcgcgtaccggttgtagtgacgtcggttcgccaatgatggcgcaatccgggcgcagggcggtagtttcggcaaaataacgcgctccggccatactggtttcttcatcagcagtcgccagaatgtagagcggttttttcagtttcgtgacgtcgacatcgcgtagcgcatcaaggataaacgcaaaaaagcctttcatgtcggcggtgcctaagccgtaaagcttgccgtcatgctccgtcagtgtaaacggatcgcgcgtccagcgaccgtcatcaaatggcaccgtatcggtatgccccgccagcaacaagccgccagccccctgtccgcaactggccagcatattaaatttgttgcgagttcctggaacaggctgcacttccacattgaagcccaaatctttaaaccagtccgccagcagagtgattaaatctgcattgctttgatcgagtgcctcttccgtggcgcttattgaaggtgtggcaatcagagcgcggtaaatctcgataaatggcggtaatttgtttttcattgttgacacacctctggtcatgatagtatcaatattcatgcagtatttatgaataaaaatacactaacgttgagcgtaataaaacccaccagccgtaaggtgaatgttttacgtttaacctggcaaccagacataagaaggtgaatagccccgatgttgaatacgctgattgtgggtgccagcggctacgctggcgcagagctagtgacctatgtaaatcgccatccgcatatgaacataaccgctttgactgtttcagcgcaaagcaatgatgcgggaaagttaatctccgatttgcatccgcagctaaaaggcatcgttgatctgccgttgcagccgatgtcggatatcagcgagtttagcccaggggtggacgtagtgtttctcgccaccgcccatgaagttagccacgatttagcgccgcagtttcttgaagcgggctgcgtggtgttcgacctttccggcgcgtttcgtgttaacgacgccaccttctatgaaaaatattacggctttacccatcaatacccggaactgttggaacaggcagcctacggtctggcggagtggtgcggtaataaattaaaagaagcgaatttgattgcggtgccgggctgttatccgacggcggcacagctggcgctgaaaccgttgattgatgccgatcttcttgacctcaatcagtggccggtgatcaacgccaccagcggcgtgagcggtgcagggcgtaaagcggccatttcaaacagcttttgtgaagttagcctgcaaccgtatnnnnnnnnnntctttactcatcgccatcaaccagagatcgccacacacctcggtgctgacgttatcttcaccccacatctgggcaatttcccgcgcggcattctcgaaaccattacctgccgcctgaaatcgggtgtgacccaggcgcaagtcgcgcaagtgttacagcaggcgtatgcccataaaccgctggtgcggctgtatgacaaaggcgttccggcgctgaaaaatgtcgttgggctgccattttgcgatatcgggtttgccgttcagggcgagcatctgattattgtggcgaccgaagacaacttactgaaaggcgcggcggcacaagcggtacagtgcgccaatattcgtttcggctatgcggaaacgcagtctcttatttaagggtgcaatgatgaatccattaattatcaaactgggcggcgtactgctggatagtgaagaggcgctggaacgtctgtttagcgcactggtgaattatcgtgagtcacatcagcgtccgctggtgattgtgcacggcggcggttgcgtggtggatgagctgatgaaagggctgaatctgccggtgaaaaagaaaaacggcctgcgggtgacgcctgctgatcagatagacattatcaccggagcactggcgggaacggcaaataaaaccctgttggcatgggcgaagaaacatcagattgcggccgtaggtttgtttctcggtgacggcgacagcgtcaaagtgacccagcttgatgaagagttaggtcatgttggactggcgcagccaggttcgcctaagcttatcaactccttgctggagaacggttatctgccggtggtcagctccattggcgtaacagacgaagggcaactgatgaacgtcaatgccgaccaggcggcaacggcgctggcggcaacgctgggcgcggatctgattttgctctccgacgtcagcggcattctcgacggcaaagggcaacgcattgccgaaatgaccgccgcgaaagcagaacaactgattgagcagggcattattactgacggcatgatagtgaaagtgaacgcggcgctggatgcggcccgcacgctgggccgtccggtagatatcgcctcctggcgtcatgcggagcagcttccggcactgtttaacggtatgccgatgggtacgcggattttagcttaagttttgttggccggaggcgcagctttccggcattgaatttcaaaataaggaaacagagttatggcactttggggcgggcgttttacccaggcagcagatcaacggttcaaacaattcaacgactcactgcgctttgattaccgtctggcggagcaggatattgttggctctgtggcctggtccaaagccctggtcacggtaggcgtgttaaccgcagaagagcaggcgcaactggaagaggcgctgaacgtgttgctggaagatgttcgcgccaggccacaacaaatccttgaaagcgacgccgaagatatccatagctgggtggaaggcaaactgatcgacaaagtgggccagttaggcaaaaagctgcataccgggcgtagccgtaatgatcaggtagcgactgacctgaaactgtggtgcaaagataccgttagcgagttactgacggctaaccggcagctgcaatcggcgctggtggaaaccgcacaaaacaatcaggacgcggtaatgccaggttacactcacctgcaacgcgcccagccggtgacgttcgcgcactggtgcctggcctatgttgagatgctggcgcgtgatgaaagccgtttgcaggatgcgcttaagcgtctggatgtcagcccgctaggctgtggcgcgctggcgggaacggcctatgaaatcgaccgtgaacagttagcaggctggctgggctttgcttcggcgacccgtaacagtctcgacagcgtttctgaccgtgaccatgtgttggaactgctttctgctgccgctatcggcatggtgcatctgtcgcgttttgctgaagatctgattttctttaacaccggcgaagcggggtttgtggagctttctgaccgcgtgacttccggttcatcattaatgccgcagaagaaaaacccggatgcgctggagctgattcgcggtaaatgcggtcgggtgcagggggcgttaaccggcatgatgatgacgctgaaaggtttgccgctggcttacaacaaagatatgcaggaagacaaagaaggtctgttcgacgcgctcgatacctggctggactgcctgcatatggcggcgctggtgctggacggcattcaggtgaaacgtccacgttgccaggaagcggcgcagcagggttacgccaacgccaccgaactggcggattatctggtggcgaaaggcgtaccgttccgcgaggcgcaccatattgttggtgaagcggtggtggaagccattcgtcagggcaaaccgctggaagatctgccgctcgacgagttgcagaaattcagcccggtgattgacgaagatgtctatccgattctgtcgctgcaatcgtgcctcgacaagcgtgcggcaaaaggcggcgtctcaccgcagcaggtggcgcaggcaattgcttttgcgcaggcgcggttagagtaatttgtttatattgctcccctgaaaatggggagcttaccacgcctacaaagtgcgacacttcgtaggcggataaggcgtttacgccacatcaggcagaaatttgtcagcattctggtgagcttaaatttaacgcccaaccagaaccattatttgtcacattcctttttatcattgtgtcttctttaccttcacactccccataaaaatcatattttcaatacatcaatcaatacatattt

SEQ ID NO: 204 - DNA, 31770 bp, Escherichia coli
  source 1..31770: mol_type = genomic DNA
aatttgtagagttcttattcaatataaccggaatagtcaggggctgatgtaaatgaccggaatgagtaagagaggcagcaccgcccctctccatcagctactcttcttcgttcccgccctcttcatacgggccaaatggcttcgcgggcagaacgatatacgtgccttcaaacactgcacccggcgtctcgtcgccaaagatttcaacttgcatctgcacccgtgcttttcgtccgcgcgccagacggtcgagatcgccgcttaaggcaccaaggtcggctaccgcatgaggtttaccgctaatcggcttgctgtagcggatatgcgcatccgccagaataatcgttccgccgagatggcgttcgcgcagcatcagccagataagcccccaaccggtgagcgttgccagtgagaataaactcccggcaaacagcgtatggtgcggattctgattaccggtttccggcatggtggtgataaatttttgcccggtatattgttgaatacgcacgcccattttttcactaagcgggatatgttcgtaccacgcctgttgcagctgcgcgcaccagtcgccgcgatgcaaaatatcatccagagtggcaacgggtttaatcatcaaaaaatggcgaatcggcgtggtagttggggtggtgatctccccctgattaatgaatcccagcttggcgaaaaactccaccgcgtcttcacgggcgctacaggtcacgcgctttacgccttcctgacgcgccaccgactccagggtcatcgccatcagcgtgcctaaccctttgtcctgcacgtccgggtgaacggccataaagcgaatggacgcttcattgtcggcattaatatacaatcggcctaccgccaccagattaccctgctcgtcgacgaccatctggtgatgcgccatcgcatcccacgcgtcgcgttccgaaccttttggttgatgcaggggcttacgcaacatttcccagcgaaactgatagtaacgctctaattcttcttctgtttgtggaacccgaaggtgatacatagcgatactctctcttgtttcccgtgacaaccctggaagctggctcatacctgcaaccagaatgtcacggggccatcattgaccagcgatacctgcatatccgcagcgaagcgtcctgtttgcgtgttcatctcttgctgacggcagcgttcgacgaaatagtcatataacgcctctgcgcgatccggtgatgcacctttggagaaacttgggcgcatcccccgttcggtatctgcggcgagggtaaactgggaaaccaccagcacactgccgcccgcctgttgcacgttgaggttcatcttgccttcggcatcgctaaagatgcggtagccgagcacacgctcgcacagacggtttgctttctgttcgtcgtcatccttttcgacacccaataacaccaaaagtcccgcgccaatttcgcccgtcacttctccctccacggtgacgctggcacgggttacgcgttgaattaatgcaatcatggttcgtcgtcttcttcttgttcagctgcttgttttagtttgcggtattccccgagagtgacagtaatttccgcgccaagcaagacgatacaccatgtccagtagacccaaacaaagagaatggggatcaccgccaacacgccgtaaatgagctgatatgacggaaacatggtgatataaagcgcgaaacctttctttcctgcttcgaacaggagcgcggcgacaaacgcgccgacaatcgcgtcgcggttaggtacgcggatggtaggaacaatgctgtacagcaaccagaaggagatccacgacaacagcagcggaaaaatacgcagcacgttatcgatgacagtattgagatcgctcgcccagcgcagggagagcaaataggaactgatcgccagactggcccctgccagcagcggccccagcgttaaaatcatccagtacacggcgaacgagtaaatttttggtcgcgctcgtttactgcgccagatggtattcaacgcgctatcgatggagtacatcagcaataacgcggtgacgatcagcccgcacgccccaacggcggtcatcttgttggaattggcaacaaattgttcgatataccgctgaataacatcgccagtagcaggcagaaagttggcaaaaataaagtgacgtaactgaatgctgacgtcggaaaacatgggaaaagcggcgaaaagcgcaaaaacaacggcaaccagcggcactaatgagagcaacgacacataggcaaggttacctgccagggttgtcatgttgtcctcatcaatgcgttgccagagtagttttagccaggcccatagtggacgggtacggtgcctggctttgtcctgaatggtttttagcataacaccttcgcgaaatagtccgggatggtggttttatctttcaccagaatactggtaatgcccagctgattggctccttctatattatcggcgttatcgtcgaaaaagaccgtatcgctgggtgaaaaaccttccgcctgcaaaacatgctggtaaattcgtgcttcaggtttgcgcatccccagatcttgcgacagatagatatggtcagcagcatcacgaatttccgggtattcttccggccagaaggtggtatgcaggcggttggtattggaaagcaccaccacgcgatgcccctgctcacgcagtttatgcatgatggcgatcacttccgggcgcagcgccacaaacaccgcctgccagccgtgagagaactgctcgtagcttagcggtagagccatctcatgacacagcgcctctgcgaacgcttcgtcgctaatttccccacgctcatgctgatgaaacgcctcccccatatgaaaactcttcttaagcgatgccagcggaatacgcgttaaatcgctccaggctcccagcacacggttaaagtcgatatcgacaatcacattacctaaatcaaagatatagagcatttttgcctcctttcgcgccacaagaaattaactgtagcgggaaaggatgggtttggctatgtggcaaggtatgaagccaggttaacggtcacaaaaatctacgcgtcttcctggggaagaatgatttcaatttggctgtcttgtaagcgtgattttagcgcagcgggcggcagctcgtcggtaaagagcgcagtgacctgtgccacgttaccaatttcaaccgccgccgaagcatgatacttagtgtgatcggcgaccagcagaatatttctcgcgtgcgccatcatcgttttcaccacgttagcttcgtttacatcaaactccatcaacgcgccatcgctctcaatcgccccaacgcttgttaccagataatcagcacgaaaatcagccacaaaggacgccgctgaagggccaatgatcccgctattatgagagcgcaacgtaccgccgggcaccatcacttcaaagcgcgggttgtggtaaagaatatgcgccacacgcaggctgttggtgattatccgcaaatgattatggttaagtaacgcccgggcaacatgctcaacagtcgtaccaatggtgataaatattgttgaaccatcaggaatatagtctgccaccgcttcggcaatcgcttttttttcctcggtttgcgaaacctcacgctgctcgaacgccgtattaacgacgctggaagcccgacccgcgccaccgtgatggcgcgtaatcaggccttgctcgcttaatttacgaatatcccggcggaccgtctgcgtggagacatccagcagatttgccagctcatcaatattcatatacccacgctcggcgatcagcatgaggagttggtcgtgccgcgggttaccggttagttcggtaaggctcatgaaaattcctcgaaaaaccatcaccctggcattttatacaaaaagtgacaaaaaagatcgggtttgatcacagtcagggatcccggctcgtccaccgggacgtgtgcattttaacgccgctacaccgctggcgaagcggactgactccgctaaatccccacttgttgccagcgccaccgccaaagcgccgtgaaaaacatcacccgcacctgtggtatctaccacatcaactttgaaggccggttgatgctgacgcccaccattttccagccagtcgcagcctgcgctaccctgggtcacatagacatgaccatttgtgagcgtttgtgcctgttttagcgcactggccatctctttcacgcccgttaagcgcgccagacccggttctgaaaaggccgcgtgatcgcttaatgccaccagctcactgatatcctgcggcgtaatgtccccgtccagaacggtcatcacacccgcctgacgggccagggtgaaggcttttttagcgccgtcgtgccagcgtacatctgccagcacaacatcccactgagagaaatcaatttcctccaaccactctgcgtcaggcagcagatccgggctggggtagttaatgattatccgctcgcctttggtatccaccatgatggcggattgcgaagatttcgcctggttataccgtttggtgtaacgggtgttaacgccccaggattccagctctgccagcaggctgttgcccgtgtcgtcatcacctacgcgaccaataaaatcgacctgcgcccccagccttgccgccgcaaccgctgccgtcgccgctggcccgccaccaacttccgtataatttctcgccacgtatttaccgctctccgtcggtaacccttccacgtaatagatgcgatccatcacggttatacctacacaagcaacacgaatcatggtcattccttaaacattttgggatgcgttcattttaatttcaccaattgtttaaaaagtgacggctgtcaattttttgacgataaattacaaatacgatcaaaaacagacaagcaaagcatgtcataaatgacaaaaagtgacatcactgtattcaggagagggttatggcagcaatcgcgtttatcggtttaggacaaatgggttcgccaatggcgagcaatttattgcagcaagggcatcaacttcgcgtctttgatgtgaacgccgaagctgtgcggcatctggtagacaaaggtgcgactcccgccgccaacccggcgcaggccgctaaagatgccgaatttatcattaccatgttgccgaatggcgatctggtgcgcaacgtgttgttcggtgaaaacggcgtttgcgaaggcttatctaccgatgcgctggtcattgatatgtccaccatccatccgctgcaaaccgataaattgattgccgatatgcaagccaaaggcttcagcatgatggatgttccggtaggccgtacttctgcaaatgccattaccggtactctgttactgctggctggcggcaccgctgaacaagttgaacgtgccacaccgatcctgatggcgatgggcagtgagttgatcaactctggcggtccgggcatggggatccgcgttaagctcatcaacaactacatgagcatcgcgctcaatgcgctttcggcagaagccgccgttttgtgcgaagccctgaatcttcccttcgatgttgccgtcaaagtgatgagcggtaccgccgccggtaaaggtcacttcaccacttcctggccaaacaaagtcctcagcggagatctttctcccgccttcatgatcgatcttgcccataaggatcttggcatcgcccttgatgtcgccaaccagctgcatgtgccaatgccgctgggggccgcctcacgggaggtttatagccaggcgcgcgcagcgggtcgcggtcgccaggactggtccgccattctggaacaggtccgtgtcagtgccgggatgactgccaaagtaaaaatgtaacgactggataaaggaataaatgaatgaataagtacaccatcaacgacattacgcgcgcatcgggcggttttgccatgctggcggtcgatcagcgcgaagccatgcgcatgatgtttgccgcggctggggcacccgctccggtagccgatagcgttttaactgatttcaaagttaacgctgcaaaggccctctcgccttatgcctcggcgattctggtagatcaacaattctgctaccgccaggtggttgagcaaaacgcgattgccaaaagttgcgccatgattgtcgccgccgatgagttcattcctggcaacggtattccggtcgatagcgtggttattgaccgcaaaatcaatccgctacagatcaaacaagacggtggcaaagccttaaaactgctggtgctgtggcgtagtgatgaagatgcgcagcaacgtctggatatggtgaaagagttcaacgaactgtgccactcacacggtctggtaagcatcattgagccagtcgtccgcccaccgcgtcgtggcgataaattcgatcgcgaacaagcgatcatcgatgccgccaaagagctgggcgacagtggcgctgacctctacaaagttgaaatgccgctttatggcaaaggtccgcaacaagagcttctctgtgcttcacaacgtctgaatgaccatatcaatatgccatgggtgatcctctcttccggtgtcgacgaaaaactgttcccgcgtgccgtacgcgtggcaatgacggcgggcgcatcgggattcctggcaggccgtgcagtctgggcatcggtcgtcggtttaccagacaacgagctgatgctgcgtgacgtttgcgcaccgaaattacaacaacttggcgatatcgtcgacgaaatgatggctaaacgccgctaagatgaggataaaaggaatgaaatggtttaacaccctaagccacaaccgttggctggaacaggaaaccgaccgcatctttgattttggtaaaaattccgtagtgccgactggttttggctggttaggcaataaagggcaaatcaaagaagagatgggcacccatctgtggatcaccgctcgtatgttgcacgtttattccgttgctgcggcgatgggtcgacctggcgcttactcgttggttgatcacggtatcaaagccatgaacggcgcactgcgtgataaaaaatatggcggctggtatgcctgcgtgaatgacgagggcgtggtggatgcctccaaacagggctatcaacacttctttgctctgctgggtgccgccagcgccgtcacaacgggtcacccggaagcgcgcaagctgctcgattacaccattgaaattatcgagaaatatttctggagcgaagaagagcagatgtgcctggaatcctgggacgaagccttcagcaaaaccgaagagtaccgcggcggcaatgccaatatgcacgcggtggaagctttcttgattgtttatgacgtcactcacgacaaaaaatggctggatcgcgcgattcgcgtggcttccgtgattatccacgacgtcgccagaaataatcattatcgcgttaacgaacacttcgatacccagtggaatccgctgccggattacaacaaagataacccggcgcatcgcttccgcgcgtttggaggtacaccaggccactggatcgaatggggccgtttaatgctgcacatccatgctgccctggaagcccgttgcgaacaaccaccagcatggctgctagaagatgccaaaggtctgtttaacgccaccgtgcgcgatgcctgggcacccgatggcgcggacgggattgtttataccgttgactgggaaggaaaaccggtggtccgcgaacgtgtacgttggcctatcgtcgaagcaatgggtacggcctacgcgctctacaccgtcactggcgatcgccagtatgaaacctggtatcaaacatggtgggagtactgcattaagtacctgatggactatgaaaatggttcctggtggcaggagctggatgcggacaataaggtcaccaccaaagtctgggacggcaaacaggatatttatcacctgctgcattgcctggtgatcccgcgtatcccgttagcgcccggcatggctccagcggttgcagcgggtctgctggatattaatgcgaaataactgatctgaaaatagggtgcgggttttcccctcaccctaaccctctccccaaaggggcgaggggaccgtccggtgcagtttttgggtttgacatcagcctcacgggaggctgtatgtcgttaattaaggtgccttgtatgcaaatcaccaatatgcattgcagtggacagaccgtttcacttgccgcgggggattatcacgcgaccattgtgaccgtcggtgctggtctggctgaattaacctttcagggttgtcatttagtcatcccgcacaaacccgaagagatgccgctggcgcatctgggtaaagtgcttattccgtggccgaaccggatcgccaacggctgttaccgctatcaggggcaggaatatcagttacccattaatgaacatagttcaaaagccgctattcacgggctgcttgcctggcgagactggcaaattagtgaattaaccgccaccagcgttaccctgacagcttttctgccgcccagttacggctatccgtttatgctggcttcacaagttgtttattcgctcaacgcacacacgggtctttccgttgagatcgcaagccagaatatcggcactgtcgcagcgccttatggcgtgggtattcatacttatttaacctgcaacttaacatctgttgatgaatatctgttccagcttccggcaaaccaggtttatgccgttgatgaacacgtaaatccgacaacgcttcaccacgttgatgagctggatttaaatttcacgcaggcgaaaacaatagccgcgacaaaaatcgaccacacctttaaaaccgctaatgatctgtgggaaataaccattacccatccacaacaggcgctttcggttagcctttgttgcgatcaaccctgggtacaaatttatagcggtgaaaaattacagcgtcagggactggcagttgaacctatgagttgcccgcctaacgcctttaattcaggtatcgacttattattactggaaccaggaaaaccgcaccgcctgttttttaacatttacggacagagaaaataacttgtattgattagcagtcaaaatcattgaagaacatttcactcgctaaaggcaacattatgtatcttcaatttattaagttaaaaacagctcagcttctgtaaagtttttatatatcagttttatgagaatcattttacataagcctgtaataacaggaaggcaacaatctcgttctcaactctatggagattagttatggatacgccacgtccacagttattagattttcaatttcatcagaataacgacagttttaccctacattttcaacaacgtcttattttaacccatagcaaagataatccttgtttatggattggctcaggtatagcggatatcgatatgttccgcggtaatttcagcattaaagataaactacaggagaaaattgcgcttaccgacgccatcgtcagccagtcaccggctggttggttaattcatttcagccgtggttctgacattagcgccacgctgaatatctctgccgacgatcagggccgtttattgctggaactacaaaacgacaaccttaaccacaaccgtatctggctgcgccttgccgctcaaccagaggaccatatctacggctgcggcgaacagttttcctacttcgatctgcgtggcaaaccgttcccgctatggaccagtgaacaaggcgttggtcgcaacaaacaaacctatgtcacctggcaggccgactgcaaagaaaatgcgggcggcgactattactggactttcttcccacagcctacgtttgtcagcacgcagaagtattactgccatgttgataacagttgctatatgaacttcgactttagtgccccggaataccatgaactggcgctgtgggaagacaaagcaacgctgcgttttgaatgtgctgacacatacatttccctgctggaaaaattaaccgccctgctgggacgccagccagaactgcccgactggatttatgacggagtaacgctcggcattcagggcgggacggaagtgtgccagaagaaactggacaccatgcgtaacgcgggcgtgaaggtcaacggcatctgggcgcaggactggtccggtattcgtatgacctcttttggcaaacgcgtgatgtggaactggaagtggaacagcgaaaactacccgcaactggattcacgcattaagcagtggaatcaggagggcgtgcagttcctggcctatatcaacccgtatgttgccagcgataaagatctctgcgaagaagcggcacaacacggctatctggcaaaagatgcctctggcggtgactatctggtggagtttggcgagttttacggcggcgttgtcgatctcactaatccagaagcctacgcctggttcaaggaagtgatcaaaaagaacatgattgaactcggctgcggcggctggatggctgacttcggcgagtatctgcccaccgacacttacctgcataacggcatcagcgccgaaattatgcataacgcctggcccgcgctgtgggcgaaatgtaactacgaagcccttgaagaaacgggcaagctcggcgagatccttttctttatgcgcgccggttctaccggtagccagaaatactccaccatgatgtgggcgggcgaccagaacgtcgactggagtctcgacgatggcctggcgtcggttgtcccggcggcgctgtcgctggcaatgaccggacatggcctgcaccacagcgacattggcggttacaccaccctgtttgagatgaagcgcagcaaagagctgctgctgcgctggtgcgatttcagcgccttcacgccgatgatgcgcacccacgaaggtaaccgtcctggcgacaactggcagtttgacggcgacgcagaaactatcgcccattttgcccgtatgacctccgtcttcaccaccctgaaaccttacctgaaagaggctgtcgcgctgaatgcgaagtccggcctgccggttatgcgcccgctgttcctgcattacgaagacgatgcgcacacttacaccctgaaatatcagtacctgttaggtcgcgacattctggtcgctccggtgcatgaagaaggccgtagcgactggacgctctatctgccggaggataactgggtccacgcctggacgggtgaagcgttccggggcggggaagttaccgttaatgcgcccatcggcaagccgccggtcttttatcgcgccgatagcgaatgggcggcactgttcgcgtcgttaaaaagcatctaatcacatccgcccgtggggaaactcatgggcaaagggagaacatcgatgagtcacatcacaacggaagatccagcaactttacgcctgccctttaaagagaaactctcttacggtattggcgacctggcctctaacatcctgctggatatcggtacactttatcttttgaagttttataccgacgttctggggctgccaggcacctatggcggcattatctttttgatttcaaaattctttactgcgtttaccgatatgggtaccggcattatgttggattcccgacgcaagatcggtccaaaaggtaagttccgtccttttattctgtatgcgtcattcccggtcaccttactggcgatcgccaactttgtcggcacaccgtttgatgtcaccggtaaaacggtgatggccactattctgtttatgctttacggactgtttttcagcatgatgaactgctcctacggcgcaatggttcccgctatcaccaaaaaccccaacgaacgcgcctcactggcggcatggcgtcagggcggcgctacgctgggcctgctgctgtgcacggtgggattcgtgccagtgatgaatcttatcgagggtaatcagcaacttggctatatcttcgccgccacgctgttttcactgttcggcctgctgtttatgtggatctgctactcaggcgtgaaagagcgttatgtcgaaacccaaccaaccaatccggcgcaaaagcctggcctgttgcaatctttccgcgcaattgccggtaaccgcccactgttcattctgtgtattgccaacctctgcaccttaggggcgtttaacgtcaagctcgccattcaggtctattacacccagcacgtacttaacgatcccatcctgttgtcgtatatgggatttttcagcatgggctgtattttcatcggcgtgttcctgatgcctggcgcagtcagacgttttggtaagaagaaggtctatatcggcggcctgctgatttgggtgctgggcgatctgctcaactatttcttcggcggcggctcggtcagctttgtggcgttctcctgcctggcgttcttcggctcagcgtttgttaacagcctgaactgggcgctggtttccgacaccgtcgagtacggcgagtggcgcaccggcgtgcgttcggaaggcacggtctacaccggcttcaccttctttcgcaaagtgtctcaggcgctggctggtttcttccccggctggatgctgacgcaaattggctatgtgccgaacgtcgcacaggctgaccacaccattgaagggttacgccagttgatcttcatctacccaagcgcactggcggtagtcaccattgtggcgatgggttgcttctacagcctgaacgagaagatgtatgtccgcattgtggaagagatagaagcacgtaaacgcacggcgtaataataataaacgacgccctgcggggcgttataaggagtgattatgtctgaccataatccactgacattaaaactgaatctgcgggaaaaaatcgcctatggtatgggcgacgtcggttcgaatttaatgctctgcatcggtactctgtatctcctcaaattttataccgatgaattagggatgcctgcttactatggcgggattatctttctggtggcgaagttttttaccgcgtttaccgatatgctcaccggatttttactcgactcgcggaaaaatattgggcctaaaggcaaatttcgtccctttattttatatgcagcagttccggcggcgttaattgcaacgctccagtttatcgccaccaccttttgtttgccggttaaaacgacgattgccaccgcgctgtttatgatgtttggactttcatacagtctgatgaactgctcgtatggtgcgatgatcccggcaattaccaaaaacccgaatgagcgcgcgcagctcgcggcttaccgccagggtggtgcaaccatagggctattgatttgtaccgtggcgtttattccgttgcagtcgcttttttctgactcaaccgtcggttatgcctgtgcggcacttatgttctccattggcggctttatttttatgatgctgtgctacagaggcgtcaaagagcattatgtggacacagcgccaaccggacataaagccagtattctcaaatctttttgcgcgatatttcgtaatccaccattgctggttttatgcattgctaacctgtgtactctggcggcatttaatatcaaactggcgattcaggtctattacacccagtatgtgctgaatgatattaatttattgtcgtggatgggattcttcagtatgggatgcatcctcgtcggcgtattactggtgccagtaactgtaaaatgttttggtaaaaaacaggtttatttagctggcatggtgctgtgggcggtgggtgatatactgaattatttctggggaagtaactctttcactttcgtcatgttctcttgtgtcgccttttttggcacggcctttgtaaacagcctgaactgggcactggtaccagataccgtagattacggtgaatggaaaaccggtattcgtgccgaaggttctgtttataccggttataccttctttcgtaaaatttctgccgcacttgctggcttcttgccaggcattatgctgacgcaaattggttatgttcccaacatcgcgcaaagcgatgcgacattacagggtttgcgtcagctcatttttatctggccttgtgcactggcaattattgctgcattgacgatgggattcttttacacactcaatgaaaaacggtttgcattgattattgaggaaatcaaccaacgcaaaaataaagagatggcgacagaagaaaaaacggcttccgtaacgttataaatgtcaatagccgctatttccatcctggtgggtggcggcctccctacgtttaaaaaatggacttattatgaaaaagattaatgcaataattttattatcttctctgacctctgcctcggtatttgctggcgcatacgtcgaaaacagggaggcatataatcttgcctccgatcagggcgaggttatgctacgtgtgggttataacttcgatatgggcgcgggtattatgttaaccaatacctacacctttcagcgagaagatgaactaaaacatggctataatgaaattgaaggttggtatcctttattcaaaccaaccgataaattaaccatccagcccggtggcttaattaatgataagagtatcggttcgggtggtgcagtgtatctggacgtcaactataaatttgtaccatggtttaatctgacagtacgaaatcgctataaccataataactatagttcaacagatttgagcggggaactggataataatgacacctatgaaattggcacctactggaattttaaaatcaccgataaattttcctatacatttgagccacattatttcatacgcgtaaatgactttaatagcagcaatggaaaagatcatcactgggaaatcactaataccttccgttatcgcattaatgaacactggctgccttatttcgaattacgttggttagatcgtaatgtcgaaccgtaccaccgcgagcaaaaccagattcgtatcgggacgaagtatttcttctgatgtgaaactgccggatgcggcgtaaacgccttatccggcctacggttgatacggttttcgttggccggattaagcacatccggccattaatcaagcttcagccgccagcatctctttcttacgttggctaattcgcttaaccagcattacggaaaccaccgcaccacagaatgcgaagcaggccataatgccaaacacgattttgtagccaataatccccggatttaaatccagaatgtagccatacagactgaagcagaacatcgccggagcgtaaccaataaagctacccaacgccatcgccgcgcctgttttattttcagcaatttttgcttcgccgataggtgcaaaaaatacggctcgctgtgtaaagactatcgcgccaaagcccagcgtacatgccatccctaaatagaccggcatactttcgtgcggcagcataatcaacagtacgagcgcagcggtactgatgataaaggtgtagcatagatatttactcggcgatttcaggatcttatctgaaatcatgccaccaatcggtccaccaatcattttcagacagtattggttaatgatgccgtaagcccccaccagcgcaacgggcaatagatagatgtttttcaggaatggaatgaagaatgtcaggccacagtaaaccgcgtaaacaaagaagacgttaaaagcgataagccagatggttttgtctctcagcaccgaggtcatactggtgttttgcgatgctccgtcttcttttttcacctcaacggacggtgcctcttctttgtcattcaggacaaagaaaataataatgcctacggcaatcacaataagggaatagaaccagatgcctgctttaaaacctaataagccactgccaaaccaggtaaatactgccaacgcagaaaatgccaccacggtatcgacaatgccacgccctgtttcgaagaagccaaacaaccgaccttgttgttcgctattgcccaatcgacttaccgacttgagcaagaccggccagttcatcatgtcgcaagtaacgccaaatagcgcccagacaaagaggatgccccaataccccggcattgtcgtcaaataaacacccagtaatcctgtcgcaatgagtgagaatgacatggtgtatctgcgcggtagtttatcggcaaaataaatagacagaaaaaagcccactgtggtgacaaatgagtttaccgacatagcattaccaatttgaccattggtcaaatggaaatattcctgcatcgggatataaaacgcatctttcagcgacggtaatttataaattgtaccgccacacagtgttaatagactaaataacgcccatttctttttcgtgagcataacatcccctaagcgatttttaaaatcactgttttaaaggcaataagataccgaccattcatatagaatggttttattaactgcgtatgagttaaaacttattagtggttcagaagatggtttgcctcttgtttgatttgttgtagtacgttacgcacatgatttatctgattaattgcatcttctttttctttacgtaaccgcgcatccagtaaatgattttctggtaggggtgtttcactcatctggcgataagggatccacggattatcatcttcgtcttcaaagcggaacgccggcgcatagtaatcaacctcttcttccaggccatatgccgtcacctgcggctcatcatcaccaaggcagataaggtgcgttaataacgctttgaacggcatatcaccctgacctgaaatacaggctttatgacccaggccaccctgttctttaacgatcaaggcatctttaatatggacctgggtaatatgcggtgccatcgtttttaaggcgtcgatgggatgctcatttgcattgatcatgttcgcaaaatcaaacagtaaggaaagagactccatctcactttctttgaccagcgacaccaactcatgactttttaaatcttcatgctgctcgatcgtaaaagtcaggccgctgtcctgatacgtttcccgtacataggcaatgtcgttagcgataatcgataatacgtcgcgcaaattaccttcataacgtggataaaaacgtacggacgatgccccagttttcaacgcgatggcgacggcttcgtcaatagatgccttatctgaggcgctggtttcaatatgaatatcaaggttcagacggcgggctttatccccaaaggcagagagttctttatcgtccatattaccaagagaaaaacgctcgccatccagaacatggattttgacgccacgtagattattttcacttgcgatatcaagtaaatcagcaggcaacactctttccagccgcatatttaaatgaaaggcataagcatgtaaataaagaggaagagtgtcgacacgttgtagaatctttcttgcgttatttattgtcaccataaaacacctacagattaatgatgaggtctacggcctcaaatcgccaatattcaatatctatctggacaatattgccttgctggtcggcgcgatgcttttcaattaagatcgctggcatacccgcagaaccgccaagatacttgctgatatcgcccggcattctgacgggtttgaaaatcaatttttttactaccgtctctttttggtagcacttttcccagactgcagaaaatgagtggttttcaagttgttcaataaaacccggagcaacttcaggattaatatatgtttcgtgatagaaaactttatgtccttccagcgccccccagccggtgatgcgatagagttcagttgatggtgtcactgcaatcagtggcgcgagcgtcttgggaatatcgctggtacggtttttctcggtaaacccccaggaaggctctcgtccttgctcaattgcggcccgctgaaagctcgccgacaactccggactgtaattaaatcgcggctgggtcacgaaccaccccttacgatccttacggaagattttggattctgcctcgaggttcaacaacgcctggcgcagcgtcatacgtttaatgcccagcagttctcccagctctctttctgaagggagttttccacccggcgtggtgatgccatctttcaaccaccgatccagtttctcttttgcattttctacggtggattgattctccgccattgtttaatccttttggtttaaaccagatgaagcatcttacgcttacgccaaaaaagaaagcaattaacggcgtatgactttgcagataattgtgacaaagctctctattgacgtaatcccagacttataagggagatactcgcattggtgtgcgctcacgacaggtaaaaaaaaacctgccagcgatggcaggttttttataactaaaaaacgaaattaatcgtctttcggtgcgcggttggcgcgacgacgatcgttttcagtcaggtgacgtttacgaatacggatagaggtcggagtcacttctaccagttcgtcatcatcgatgaactccagagcttgttccagagtcatgcggataggcggaaccagaacaacggcttcgtcagtaccggaagcacgcatgttggtcagtttcttaccagtcaggcagtttaccgtcaggtcgttagagcggctgtgaataccgataatctgaccttcgtaaacttctgcaccgtgaccgaggaacagcttaccgcgatcctgcagaccgaacagcgcgaacgcgaccgctttaccctgaccgttagagatcagtacgccgttctgacgctgacccacttcacccggacgtacgtcgtcgtagtggctgaaggtggagtacagcagaccagtaccggaagtcatggtcatgaactcagaacggaagccaatcagaccacggcttgggatcacgtagtcgagacgtacgcggcctttaccgtctggattcatgtttttcaggtcgcctttacgttcgcccagcgcctgcattacagaaccctgatgctgttcttcaacgtccagagtcacgttttcatacggctcttgtttacgaccgtcgatttcacggaagataactttcggacgggataccgccagttcgaaaccttcacgacgcatgttttcgatcagaacagacaggtgcagttcgccacgaccagaaacgcggaacgcatcggcgtcttcggtttcttctacgcgcagcgcaacgttgtgtaccagttctttgttcagacgatccaggatctgacgagacgttacgaacttaccttctttaccgcagaacggcgaggtgttaacgcagaagaacatagaaacggtcggctcatcaacggagagtgccggcagcgcttcaacgttttgcgtgtcgcaaacggtgtcagaaatgttcagttcgccaaggcccgtgatcgcaacgatatcgccagcttccgccagatcggtttcgatacgttccagaccgaggtggcccagcactttaccgactttcgcgttgcgggttttgccttcgctatcgatgatagtgacctgctggttcggcttcactttaccgcgcttgatgcggccaatgccgataacgccaacatagctgttgtaatcgagctgagaaatctgcatctggaacggaccgtcaaggtcaacgtccggcgcaggaacgtgatcaacaatcgcctgatacagcggggtcatgtcttccgccatatcttcgtggtccagacccgcgataccgttcagcgcagaagcgtaaacgatcgggaagtccagctgctcgtcggtcgcgtcgaggttaacgaacagatcgaatacctgatccacaacccaatcaggacgcgcgccagggcggtcaactttgttgataacaacaatcggcttcaggccgtaagcaaacgcttttttggttacgaagcgcgtttgcggcatcgggccgtcaaatgcgtcaaccaccagcagcactgagtctaccatggacattacacgttcaacttcaccaccgaagtcggcgtgccccggggtatcaacgatgttgatacggtaatcattccatttgatagcggtgtttttcgcgaggatggtaatcccacgctctttctccaaatcgttggagtccatcacgcgctcttgggtttcggcacgagagtcgaacgtaccggattgttggagcagcttgtctaccagggtggttttaccatggtctacgtgcgcgatgatggcgatattacgcaatttttcgatcacaactttgcctcaggcattagaaatagcgcgttattgtacacggattaatcgcactacaaaacaggatcacaaacatcctccgcaaacaagtattgcagagtccctttgtgatcgctttcacggagcataaaaagggttatccaaaggtcattgcaccaacatggtgcttaatgtttccattgaagcactatattggtgcaacattcacatcgtggtgcagcccttttgcacgatggtgcgcatgataacgccttttaggggcaatttaaaagttggcacagatttcgctttatcttttttacggcgacacggccaaaataattgcagatttcgttaccacgacgaccatgaccaatccaggagagttaaagtatgtccgctgaacacgtactgacgatgctgaacgagcacgaagtgaagtttgttgatttgcgcttcaccgatactaaaggtaaagaacagcacgtcactatccctgctcatcaggtgaatgctgaattcttcgaagaaggcaaaatgtttgacggctcctcgattggcggctggaaaggcattaacgagtccgacatggtgctgatgccagacgcatccaccgcagtgattgacccgttcttcgccgactccaccctgattatccgttgcgacatccttgaacctggcaccctgcaaggctatgaccgtgacccgcgctccattgcgaagcgcgccgaagattacctgcgttccactggcattgccgacaccgtactgttcgggccagaacctgaattcttcctgttcgatgacatccgtttcggatcatctatctccggttctcacgttgctatcgacgatatcgaaggcgcatggaactcctccacccaatatgaaggtggtaacaaaggtcaccgtccggcagtgaaaggcggttacttcccggttccgccggtagactctgctcaggatattcgttctgaaatgtgtctggtgatggaacagatgggcctggtggttgaagcccatcaccacgaagtagcgactgctggtcagaacgaagtggctacccgcttcaataccatgaccaaaaaagctgacgaaattcagatctacaaatatgttgtgcacaacgtagcgcaccgcttcggtaaaaccgcgacctttatgccaaaaccgatgttcggtgataacggctccggtatgcactgccacatgtctctgtctaaaaacggcgttaacctgttcgcaggcgacaaatacgcaggtctgtctgagcaggcgctgtactacattggcggcgtaatcaaacacgctaaagcgattaacgccctggcaaacccgaccaccaactcttataagcgtctggtcccgggctatgaagcaccggtaatgctggcttactctgcgcgtaaccgttctgcgtctatccgtattccggtggtttcttctccgaaagcacgtcgtatcgaagtacgtttcccggatccggcagctaacccgtacctgtgctttgctgccctgctgatggccggtcttgatggtatcaagaacaagatccatccgggcgaagccatggacaaaaacctgtatgacctgccgccagaagaagcgaaagagatcccacaggttgcaggctctctggaagaagcactgaacgaactggatctggaccgcgagttcctgaaagccggtggcgtgttcactgacgaagcaattgatgcgtacatcgctctgcgtcgcgaagaagatgaccgcgtgcgtatgactccgcatccagtagagtttgagctgtactacagcgtctaatagttgaagttgtactacccggcgcaacaacgccggaggttcaaaccaggcccatctggcgtaattgttgcagccagtttgaacacggacagcacgcagaacccggagcgtacactggtacgtgaggagttcgagcactgcccaggttcaaaatggcaaataaaatagcctgatgggactggtttttagttgccgtggaaatttcagcccatctctgcatgggcttttttctccgtcaattctctgatgcttcgcgctttttatccgtaaaaagctataatgcactaaaatggtgcaacctgttcaggagactgctttatggcaacaggcacgcagcccgatgctgggcagatcctcaactcgctgattaacagtattttgttaatcgatgacaacctggcgatccattacgccaaccctgccgcgcaacaactgctcgcccaaagctcccgcaaattgtttggtacaccgttaccggaactgttgagctacttctcattaaatatcgagctgatgcaagaaagtctggaggcggggcaaggttttaccgataacgaagtgacgctggtcatcgacgggcgctcgcatatcctttctgtgacggcccagcgtatgccggacggcatgatcctgctggagatggctccgatggataaccagcgccgcttaagtcaggaacagctacagcacgcccagcaggttgctgcccgtgatttagtgcgcggcctggcacatgagattaaaaatccgcttggcggtttacgtggcgcggcgcagctactcagcaaagcgttacctgacccatcactactcgaatataccaaagtgattatcgaacaggcggaccggctgcgaaatctggtcgaccgtctgttggggccgcagctgcccggtacgcgcgttaccgaaagtattcacaaagtagctgaacgcgtggtaacgctggtgtcgatggaactgccggacaacgtgcggttgattcgtgattacgatcccagcctgccggaactggcgcacgatccggatcaaattgaacaggtcttgctgaatattgtgcgcaatgcgctacaggcgctggggccggagggtggtgaaatcattctgcgtacccgcaccgcgtttcaactgaccttacacggcgagcgctaccggctggcggcgcggattgatgtggaagataacgggccgggcattccgcctcatttgcaggatacgctgttttacccgatggtcagcggccgcgaaggtggcaccgggcttggcttatccatcgcccgtaatttgattgatcagcattcaggcaaaattgaatttaccagttggccaggtcataccgagttctcggtttacctgcctatcaggaaataaaggtgacgtttatgcaacgagggatagtctgggtagtcgatgacgatagttccatccgttgggtgcttgaacgtgcgctcgctggagcgggtttaacctgtacgacatttgagaacggcgcggaagtactggaggcgctggcgagcaaaacgccggatgtgctgctttcagatatccgtatgccgggaatggacgggctggcgctgctcaagcagattaaacagcgccatccaatgcttccggtcatcattatgaccgcacattccgatctggatgctgccgtcagcgcctatcaacaaggggcgtttgattatctgcccaaaccgtttgatatcgacgaagccgtcgcgctggttgagcgcgccatcagtcattaccaggaacagcagcagccgcgtaatattcagcttaacggcccaacgaccgatatcatcggcgaagcgccagccatgcaggacgtgttccgtattatcggtcggctttcgcgttcttctattagcgtgctgattaacggcgaatccggcaccggtaaagaactggtcgctcatgccctgcatcgccacagtccgcgcgccaaagcgccgtttatcgcgctgaatatggcagctatcccaaaagatttgatcgaatcagaactgtttggccacgagaaaggcgcgtttactggcgcgaataccattcgtcaggggcgttttgaacaggccgatggcggtacattattcctcgacgaaattggtgatatgccgctggatgtgcagacgcgtttgctgcgcgtgctggcagacggtcagttttaccgcgttggcggctatgcgccggtgaaagtggatgtgcggattatcgctgccactcaccagaatctcgaacagcgagtgcaggaaggtaagttccgtgaggatctgttccaccgcctgaacgttatccgcgttcatctgccgccgctgcgcgaacgtcgggaagatattccccgtctggcgcgccattttttacaggttgccgcgcgcgaactgggcgtagaagcgaagttactgcatccggaaaccgaagctgctctgacgcgtctggcgtggccaggcaacgtgcgccagctggaaaacacctgccgctggctaacggtgatggccgccgggcaggaagtgttgattcaggatttgcccggcgaactgtttgaatcaacggttgcggagagtacttcgcaaatgcaaccggacagctgggcgacgcttcttgcgcagtgggcagacagagcgctgcgttccggtcatcaaaatctgctttccgaagcgcagccagagctggagcggacgttactgacgaccgcgttgcgacatacgcaggggcataaacaggaagcggcgcggctactcggctggggccgcaacaccctgacgcgtaagttaaaagagctggggatggagtgattcacggcgtgtgtgtaaagattgattattgagcgcaaattgctggtattttacgctttactgttccgataagttcagtatgatcttgcccggaaaacggggagagtcattatgctggaatcaataattaatctggtatcgagtggcgcagttgacagccacacaccgcaaactgccgttgctgccgtgctgtgtgccgcaatgattgggctgtttagttgagtttcagattgctgatgaagtgctctttgttcatgccggatgcggcgtgaacgccttatccggcctacaaaagcaatattttcaacaggttttgtaggcctgataagcgtagcgcatcaggcaatcttgttctcagcacattgatggcgctttcgttttctactttgtaaacgaagcgccattcactatttaaatcacccgtgagaactgctgcatccgcgctttctggcgcagataggtatcaaagcacatgcaaatgttgcggatcagcaagcgacctttcgccgtcacctgtattcccttctcatccacatccaccagcccatcttttgctaacggggcgagcagcttgagatcttccgcaaagtaatcagcgaagtgcaaatcccactgtttctcaataggggcgtaatccagacggaagttgcagatgagcgacttaatcacatcgcggcgaatacagtcatcacgcgttagcgcaataccacgccacagcgcattgccttgttcatccacttgctgatagtactgcttcaactctttctggttctgcgcgtagcagtcgccaatcatgctgatggcggaaacgcccatccccagcagatcggtatcgccctgagtggtgtagccctggaagttacgatgcagcacgccttcacgctgggccaccgccagctcgtcatccggacgggcaaagtgatccataccgataaactgatagcccgattgcgtcaggaaggcgatggtttcctgcaggatatcgagtttttgctgcggactcggcaggtcagcatctttgattttgcgctgagcagcaaaaatggtcggcagatgcgcgtagttaaagacactcagacgatcggggttcagctccgccacacgtttcagggtaaaggcgaaactctccggcgtctgtttcggcaggccgtaaatcaggtcgatgttggtggaggtaaaaccaatctcacgcgcatggttaagcagtgcaaagatgaactcttcatcctgctcgcggttaaccagacgttgcacttctttgttgaagtcctgcacgcccatgctcaggcgattaaagccttcggcgcgtaaatgatcgagtacatccagttcgatttcccgcggatcgacttcgatcgaaatctccgcatcggcattgaactggaagttttcgcgcagcagcttcatcaggcggctgatttgcgctttattcagatacgtcggcgttccgccgccccagtgcaattggctgacgtgacgcccggcgaacagcggtgcacgatggacgatttcttgctccagcgcgtccagatactgatcggccttgtgctgctggcgagtaacaatcttattgcaaccgcagaagtaacaaagcttatggcagaacgggatatgtacgtagagagataatggacgctcaggatagcgcgccacggcttgtaaaaacgcctgttcgccgaagtcttctgaaaactccagcgcggtcgggtacgaggtgtatcgtggcccggaatagttatatttctggatcagggccagatcccagtcgatttgctgtacagacatgctcactccttccgatggcgtctctggcggctacggcgtaccggcggatgcccgtttcgggtcatcagccggttgcgcagccacttttgtcgccgcgacaaccgctgtagtttaacgaataaccacaccagataacatataaccggaagggttatcagcagaacgggaaggcccacggcggcaatccgttagttgccccgcagcagacgcatcatgtcttcttgcttctcgtcttcttcctcttcttcgtcatcgtcataagagaggccgagtttctgcatcaactcatcaatacgatccagtttagcatccacccaggattgctcttcggcgctcagggtttcgcctgcttccagacgttccagcagcgcatccagacgctcatccgtttccagtaattccaactccgcctgcggtgaaagcataggtttctcactcttcggtttgtgctgtttggtgactttttcaatcacgcccaatggaataggggttttactgccaatacgtggatcttttggtgcgttctggcctttgctgcctgacgtggtgtttccgcccgctgcgcggctgcccggcgcatgaccacgacgttttttctgacgcttgcgatcacgagcttcctgatccagctcctcgcgtgtttttcgacgcgcttttgcatgacctttgctgcgtgagtttgaagatgatggtttcataatggttcgtcttttagccgttttattcagtatagatttgcggcggaatctaacagaaagcaagcaaagaaaaaaggcgacagattactctgtcgccttttttcctgactcataacccttaacgggtcttacaatccttgcaggccgccaacacaccctgtttttcctttagccggaacaatccgtgttgattccatttccgtttaattacgtctccggacgtttgtcttcctgacaatcctctgtcttcgcctcctggcgctcctgaccctcatcctgagtcattgttcctgttagcgtcctcgctctatgggtgctactttacgcctttgctttaaacaaacaatcaaccgccatcagtatttgcacattttcagagttttatataaaagcaattcactgatttatatagcttatttgacatgcatcgcagaattttctctgctatttcgcataaagactatcggcaatgtctcacaaagcgtatggcttttacttacaacgctcacgccgaaaaatccgccttttattatggttcaggtataatcgccacaaagctttgactgacggagacgaccgctttgactaatttgaattatcaacagacgcattttgtgatgagtgcgcctgatattcgccacctaccttccgataccggaattgaagtggcttttgcaggccgttccaacgcaggtaaatccagcgcgctgaacacgctgactaaccagaaaagcctggctcgtacctcaaaaaccccagggcgcacccagcttatcaacctgtttgaagtggctgacggcaagcgtctggttgacttgcctgggtacggttatgcggaagtcccggaagagatgaagcgcaaatggcagcgtgcgctcggcgaatacctcgaaaaacgtcagagcctgcaaggtctggtggtgctaatggatattcgccatccgctgaaagatttggatcagcagatgattgagtgggcggtagacagcaatatcgccgttctggtgctgctgaccaaagcggacaaactggcaagcggcgcacgtaaagcgcaattgaatatggtgcgtgaagctgtactggcgtttaacggtgatgtgcaggttgaaacgttttcttcgttgaagaaacaaggcgtggacaagctgcggcagaaactggatacctggtttagcgagatgcagcctgtagaagaaacgcaggacggcgaataattttcttgccttaatgcttgtgccggatgtggcgtatccggcccgtaaattcaatagattacaattctaccgttggcctgataaacatagcgcatcaggcattacggatcttttctttcgcccaataaaaaacgccccagtcattactgactggggcggctaaaatattcagccaaatccgattacgtgaagtaaaaggtctgaaagatagaacatcttacctctgtaccctacgcgactaactttactcttttttgttcagttcagaaagcactttttgtaattttttttcagttgttgcataggaatttctaatagccatcacaaaacgtgacagcttatgttgcttacttacgaaaaaagggcatgttcaggcgaatcttagtgcgcctgatcccagttttcgccactccccacttccaccagcaacggcacatccagacgggtacagttttccatcagttgatgaatctgcttcgcgacggcatcaacatcatctttatgaacttcaaataccagttcatcgtgtacctgcatgatcatacgtacacgcggttgctcagcctgtaaccacgcatcaacggcaatcatcgcccgtttgataatgtcggcggcggttccctgcattggcgcgttaatggctgcacgttcagccgctgcacgacgagcaccattgctggatttgatatccggcagatacagacggcgtccgtccagcgtttcaacgtagccctgctctttcgcctgagcacgggtgcgttccatatactccagcacgccagggtagcgttcgaagtaaaggtccatgtacttctgcgcttctttacgtggaatgttcaattgccgcgccagaccgaaagcactcatgccataaatcagaccaaagttgatcgctttcgcgctacggcgttgctcgctggtgacggtttccagtggcaaaccaaacacttctgccgccgttgcccggtggatatcttttccttccgcgaatgcggtcagcaagcctttgtcacgcgagagatgcgccataatgcgcagttcaatctgcgagtagtccgctgagacaatcacataatcctctggcgcaataaacgcctggcggatacgacgaccttcttcgttacgcaccggaatgttttgcaggttaggatcggttgacgataaacgtcccgttgcggttactgcctggtgataagaggtatgcacacgcccggttttcgggttgatcatcagcggcagcttgtcggtgtaagtcgacttcagcttcgccagaccacgatactccagaatcacttttggcaacggatagtccagcgccagttcttccagtacctcttccgacgttgacggcgcgccacccggcgttttcttcagcggtttaataccctgtttttcaannnnnnnnnnaaacagaatggtttgcaactgcttggtggaagaaaggttaaattcttcacctgcaatttcatgcgctttcttttccagctcagccagacgcaaggtgagctcttcagaatgattgtgcagcactttcggatcgatcttcacaccgttacgttcaatgcgtgaaagcactggcaccagcggcatttcgatattctcgaagacgttcaacggccctttgtgtttttgcagatccggccacattttcagatgcaactgcaaggtgacatcagcatcttcggcggcgtaacgtccggcctcttcgagggcaatctggttaaaggtcagttgatttttgcctttacccgcaatctcttcaaaagtgatggttttgtgcttcaaccaacgttccgcgaggctgtccatatcgtgacgcccggcaacgctattgagaatgtaggactccagcatggtatcaaacgcaatcccacgcagctcaatgccgtaattcgccagaataccgcgatcgtatttcaggttttgcccgaccttcagcgccttttcatcttccagcagcggttttagcaactcgagtgcacgctcgcgagagatttgatcgggcgcgtcaagataatcatgagcaaccggaatatatgccgctacgcctggctcgatagcaaaagaaagcccgaccaggttagcagagatgttatcaaggctgtcggtttcggtatcaaatgcaaataccggcgctttttccagcttcgcaatccacgctttcagtgtttcttcatcaaggatggtgacgtagttgtcataagaaatcaccgttgccgtcacttctggcgcttcgtctgcaacactggtttcctgcggcttcgcggctggttttgcccctttggcctgtaaccatttgcccgcttcgacatcagcagtccagcgtttgaactcatactttttgaacagccccaacaactcttccgctgccggttgctgcacttccagttgttcacaggtcagctccagttcaacgtcggttttaatcgtcgccagctggtatgagagataagcaacttctttgttttgctcgagcttcgctgccattgttttcgcgccacggaagctcaacccagcaattttttctggctcggcatacagcgtatccagcccgccaagaccttgcagcaatgcctgcgcggttttttcaccgacgcccggtacgccaggaatgttatcggaggagtcacccatcagcgccaggaaatcgatgatcagttctggcggcacgccgtacttattcaccacctcttccggtccgaggatggtattcgtcatggtattgataagcgtaatatttggcgtcaccagctgcgccatatctttatcgccagtgctgatcagcaccggacgcccggctttttcggcttcgcgcgccagagtaccgataacgtcgtccgcttctacgccagaaaccgccagcagcggcagtcccatcgctttaaccatcgcgtgcaggggttcgatttgtgctcgcagatcgttcggcattggcgggcgatgtgatttgtaatgttcaaacagttcatcacgaaaggtttttcccttggcgtcaaagaccaccgctgcatgcgtcggtttatattgcatgatcagactgcgcagcatgttgaggacaccatacatcgcaccggtcggctcgcctgcgctgttagtcagcgggggaaacgcgtgatatgcgcgataaagataagatgaaccatctacaaggataagtggattttgggggatctgaaccataatgtccgtgcctgtttatcagattatgggtaaaggatgccacagacaggatgaaaacatgagtttttcaccgcttttcgtgaaaatcttttgtagatcttctggatcgctcgcaaatcgtcatgtggataactttgtgcataaattatttacatcgcttttaatttattatcatgctttttacagcatgatg

SEQ ID NO: 205 - DNA, 30813 bp, Escherichia coli
  source 1..30813: mol_type = genomic DNA
acggaagttactgtcgttctcaaaatcggtggagttgcatgacaaggtcatcgggcattatctgaacataaaacactatcagtaagttggagtcattaccgctgaagaaatcgcgcgccttgagaatctcattaccgctgaagagcaagtgttgtcgaatctggaagtctcccgtgatggcgtggaaaaagcagttacagcgacagcgcagcgtatcgctcagtttgagcagcaaatggaagtcgttaaagccactgaagccatgcagcgtgcacaacaggctgtaacaacctctaccgttggcgcatcttccagcgtttcgacagcggcagaatccttaaaacgcctgcaaacgcgtcaggccgaacgtcaggctcgcctggatgctgctgcacagttggaaaaagtcgcagacggtcgcgatcttgatgaaaagctggcggaagccggaattggcggtagcaataaaagtagcgcccaggatgtattagcaagactgcaacgccaacagggcgagtaatttttttgccagcctcgctaaaaggctggcaactattttaaggataaaatatgtctggttttttccagcgtctgtttggcaaggataataagcctgctatcgctcgcggtccgctgggacttcatctcaatagtggctttacgctcgacacgttagcgtttcgtttgctggaagatgaattgctgattgcgctgccgggtgaggaatttacggtagccgctgtcagccacatcgatctgggcggcggtagtcagattttccgctactacacttcaggcgatgaatttctgcaaatcaataccaccggcggcgaagatattgatgacattgatgatatcaagctctttgtctatgaagagagctacggtatcagtaaagagagtcactggcgcgaggcgatcaacgccaaagtgatgggggcaatgatcttaaactggcaggaaaaacgctggcagcgattttttaacagcgaagaaccgggaaatatcgaacccgtctacatgctggaaaaagtagaaaatcaaaaccatgccaaatgggaggtccataattttaccatgggctaccaacgccaagtaaccgaagatacttacgaatatttgctgttaaatggtgaggaatcttttaacgatctcggcgagccagagtggttattttcgcgcgcgttgggtgtcgatatcccgctgacatcacttcatattattggttaattacaaggacgtttacaatgcatatactggattcacttcttgcctttagcgcctatttttttattggcgtggctatggtgattatttttctttttatctattctaaaattacaccgcacaacgaatggcagttaatcaaaaacaataataccgcggcttcactggcgttcagtggtacattgttaggttacgttatcccattatccagtgcggcaatcaatgcggtgagtattccagactatttcgcctggggcgggattgcactggtgattcagttactcgtttttgctggtgtcagactttatatgcccgcattaagcgaaaaaattattaatcacaataccgcagcaggaatgtttatgggaaccgccgcgctggctggcggtatttttaacgcagcttgtatgacatggtaatggacgatcatggccagaaaacgcaaatcaagaaataacagtaaaattggtcacggagcgatcagtcgcattggaagaccgcataatccttttgagccgcgccgcaatcgctacgcacaaaaatacttaacgttggtgctaatgggcggtgccgtttttttaatagtcaaaggatggagtgaaagtagcgatgtcgataacgacggcgacggaacgttttactcgacagtgcaggattgtattgatgacggtaataatgccgacatttgcgcgcgtggctggaataacgccaaagcggcgttttatgccgatgttccgaagaatttgactcagcagaactgtcagtctaagtatgaaaattgttactacgacaacgttgaacagagttggatcccggtaatatctggatttttgttaagccgggttattcgtaaagatcgcgatgagcagtttgtttataacagcggcggatcctcatttgcttcccgccccgtctggcgcaacacttccggtgattactcctggcgctccggttctggcaaaaaagagtcttactcttcaggcggctttaccaccaaaaaagcgtcaaccgtttcgcgcggcggctatggtcgttcttccagcgcccgtgggcattggggaggctaatcatgctgagacacaacgttcctgtgcgacgggatctggaccagatcgccgctaacaacggtttcgactttcatatcatcgacaatgaaatctattgggacgagagtcgggcttaccgttttactctgcgccagattgaagagcagatcgaaaaaccgactgcggaactgcatcagatgtgccttgaggtggtggatcgcgcggttaaagacgaagagatcctgacgcaactggcgatcccgccgttgtactgggatgtgatcgccgaaagctggcgcgcacgcgatccttcgctgtatggccggatggattttgcctggtgtggcaatgcgccggtgaagctgctggagtacaacgccgatacgccgacctcgttgtatgagtcggcttatttccagtggttgtggctggaggatgcccggcgcagcggcattattccgcgtgatgccgatcagtacaatgccattcaggaacgcctgatttcacgctttagcgagctttatagccgggagccgttttatttctgctgctgtcaggacaccgatgaagacaggactaccgtgctgtacttgcaggactgcgcccagcaggcagggcaggagtcgcggtttatctaccctgaagacctcgggtcgggcgtcggcggtgtactgaccgatcttgatgataatgtcatccagcgtgcatttaagctgtatccgctggagtggatgatgcgtgacgataacggtccgctgctgtgcaagcgtcgcgagcaatgggtggagccgttatggaaaagtatcttgagtaataaagggctaatgccgctgctttggcgcttcttccctggtcatcctaaccttcttgcatcctggtttgagggtgaaaaatcgcagattgccgctggcgaaagctatgtgcgtaaaccgatctactcgcgcgaaggcggaaacgtcaccattttcgacggtcagaataacgtcgttgaccacgctgatggtgattacgccgatgaaccgatgatctaccaggcgtttcaacctctgccgcgatttggcgatagctacacactcatcggtagctggattgtcgatgatgaagcgtgcggaatggggatccgtgaagataacacactgatcaccaaagacacctcacgtttcgttccgcattacattgctggataagaatgttttagcaatctctttctgtcatgaatccatggcagtgaccatactaatggtgactgccattgatggagggagacacagtgcactggcaaactcacaccgtttttaatcaacctataccattaaataacagcaacttatacctgtctgatggctcgctctgcgaagcggtaacgcgtgaaggtgctggctgggatagcgattttctagccagtattggtcagcagttaggaacggctgaatcccttgaactggggcggctggcgaatgtgaatccgcctgaattattgcgctacgatgcgcaaggacgccgtctggacgatgtgcgttttcaccccgcctggcacctgctgatgcaggcgctatgtaccaatcgggtgcacaatcttgcctgggaagaagacgctcgctccggcgcatttgtggcgcgcgcggcgcgttttatgttgcacgcacaggttgaggcagggtcgttatgtccgataaccatgacctttgccgccacgccattgctgttacagatgttacccgcgccgtttcaggactggaccacgccgctgctgagcgatcgctacgattctcacttattgccaggtgggcaaaaacgcggtttgttgattggcatgggaatgacggaaaagcagggcggttccgatgtcatgagcaacaccacccgcgcagagcgcctggaagatggctcttatcggctggtggggcataaatggtttttctcggtgccgcaaagcgatgcgcatctggtgctggcgcagactacgggcggtttgtcctgcttttttgtgccgcgctttttgcctgacgggcaacgcaacgcgattcgcctcgagcggctgaaagataagctgggtaatcgctctaacgccagctgcgaagtggagtttcaggatgccattggctggttgttggggcaggaaggggaaggaattcgtctgatcctgaaaatgggtgggatgacgcgttttgattgcgccctgggtagccatgccatgatgcgccgtgcattttcgctggcgatttatcatgcacatcaacgccatgtttttggtaatccattgatccaacagccccttatgcgtcatgtcttaagtcgcatggcacttcagcttgaagggcaaacggcgttgctgtttcgtcttgcgcgagcgtgggaccggcgtgccgatgccaaagaagccctgtgggcgcgtttatttacgcctgcggcaaaatttgtgatctgcaaaagaggtatgccgtttgtggccgaagcgatggaggtgctgggcggcattggttattgcgaggagagcgagctgccgcggctttaccgggagatgccggtaaacagtatttgggaaggttccggcaatattatgtgcctggatgtgctgcgcgttctcaataagcaagcgggcgtatacgacttattgtcggaagcgtttgtggaagtgaaagggcaggatcgctattttgatcgcgcggttcgtcgtttacagcagcagctgcgtaagccagctgaagaactgaggcgagagattactcatcagctattcctgctgggctgcggtgcgcaaatgttgaaatatgcttctccgccaatggcgcaggcgtggtgtcaggtgatgttagatacgcgcggcggcgtacggttgtcagagcagatccagaatgatttattgctgcgggcgacggggggagtgtgtgtgtaagcgtatacgactgatgcgacgctggtttcgattaactaaatgaaatatgtgaaaattgtaggccggacaaggcgctcgcgccgcatccggcattgttcatttgctgtagatgacactcatgcatacagtatcgcctgtacgcgccagttatcaggctgctggtcttcgtacatggtaataatgcggtaccatgacgcaccttgttcatcggcctttaacgccacgatacgttccacgtcctgcggatcccctgaaatattgctaactgagatctgacctatttcattcaggcccgtcacgcagtcagcactggcgaattctgcagactgtgccgtggcgctcgcaggataagtcactaattgcagcgagggtgaggcaagtaattgtttcatcgtcagctccatttttcgtttccccacatgttgcagggcattccatcgcggtaataaacgcccaggcttccagccggtaatttattgtgcacaggtaaacgcatagggacgcaaagcaatgtaaagctgactatgtaagttgtctgatttatttacggtacaaaatggcttgtgaataccactgtcctgtcacgatggtttcgtccaccatgacgacaacgtaataatcagcttttgcagcgacagctttcgctctgatttctgctaatgcgtcatccggagaaccccgaaccatcgtgcttacgctgcctattcgctgtaacccttgcgtctggtcgcggcgaatctcttgcggatggtccgttactggcggtgctggctgtggcgtaccttgcagtgcgctacaggcacttaacatcaacaccaataataaactggcaaaccggtaaataacgctattacgtttcctgctaaacatagtgtagtgccttattaatttaactttgggggaatgttcccgaattgttacctggtacgcgattttcgaatgaaaacgtgacgaaagcgtaacccacatctcaacattatgaactaataccgccagcagaaacttgtgctaaggatttcttcatgtcataccagacaaaaaggagagacagatgattgaaatagaatcacgcgagctggcagatattcccgttcttcatgcttatcctgtcgggcaaaaagataccccgttaccgtgcgtaattttttatcacggctttacttcatccagtctggtgtatagctattttgccgttgcgctggcgcaggctggtttgcgggtgatcatgccggatgcgcccgatcacggtagccgttttagtggtgacgcagcgcggcggttaaatcaattctggcaaatcttgctacaaagtatgcaggaattcactactttacgtgcggcaatagccgaagaaaactggctgcttgatgaccgtctggcagtcggtggtgcgtcgatgggcgcgatgacggcactggggattaccgctcgccaccccacggtgagatgtaccgccagcatgatgggagcgggctattttacatcactcgcccgttcactgtttccaccgctgatacctgaaacgacagcacagcagaatgaattcaataacattgtcgcgccgctggcagagtgggaagcgacaaaccacctggaacaacttagtgacagacctctactgctgtggcatggcctcgacgatgacgttgtgcctgccgacgaatcactacgtttgcagcaggccttaagcgagacgggacgggataaactgctaacctgttcatggcagccaggcgtgcgtcaccgcattacgcctgaggcgttagatgctgcagtgacatttttccgccagcatctttaaacacgcagaatgctgaccccttgcgcttccagttgttgcaggatttccgggttagcatttttgccggtgatcagcatatcaatttgatcggcacggctaaaaagcattcccgcgcgttcgccaatcttactgctatcaaccagtaccaccagtttccctaccacgctcagcatcttctgctctgccattgccgtcagcatatcggttttatacaacccttctgctgtcagtcctttgccgctggtaaacatccagtgcccggcatagagactgttttcgctgccctgcgggcttaaagtgatggactgacttttgttgtactgtccgcccataatgatcacgctgtcatgttcttgatcgatcaggtaatttgccagcggtagataattagtgatgatttgcactggcttgccacacatttcccgcccaagcagaaacgcggtggagccgcagttgatgactacgctttcgcccggattaaccagctgcgaggccgctttagcgatacgtactttttcatcgtgattctgcgcctgatgcagattcatcggcgtccagcgcgggcgctgttgggtaatagcttctgcgccattgcgcacttttttcagtttgccgctttcgtcaagtttattgatatcgcgtcgcgcagtggcaggcgaaattcccagacgctcaacgactttctcaacggtcacaaagcccaattgtgcgagcatttccaggaggatttgatgtctttgtgcttcagtcatgagctattccgataaaatttgatttttttagatgatatttgaaatagccaggaaatactacgccggatagcgcgaacttctccacgctatccggtataaacgacagattacaggaatgacttgaacggcagatccggttcaatagtgaagcaatcatcgaaaccgcgcggatagtggtactcgaagttgtctttatccagcggccaggtaaatttgccgccaacctgccagataaacggcttgaagccatacttcagacgatcttttttcatctcccacagcacgcggatctcttgcggatcggcctggaagtttgaccagatgtcgtggtggaacgggataaccactttcgcattcagggcttcacccatacgcagcatatcggcgctggtcattttgtcggtaataccgcgcgggttctcaccatacgatcctaacgccacatcgatctgatgttcgttaccgtgcttcgcataatagttagagtagtgggaatcgccactgtgatatagggaaccgccaggggttttgaacaggtagtttactgcgcgatcgtccatgccatctggcagtacgccagccgctttttgatcggcaggcagggtgatcagtgcagtacggtcgaaagcgtcaagcgcatgaatttcaatgtctttcacttttactacatcgcccggtttgaccacgatgcaacgctctttcggtacgccccagccaatccacaaatccacacaggttttcggtccaatgaacggtacgtcatcagcacagttctgcatcacggcagcagcaacgttaacgtcgatatgatcgttgtgatcgtgagtcgccagtaccgcgtcgatctggcgaatcgcaaacggatcaagaacaaacggggtggtgcgcaggtttggctgcagttttttcacgccagccatgcgctgcatctggtgaccctgtttcattaacgggttaccgtgactttgtttgccagtgccgcaccagaaatcaacgcaaacgttggtgccaccttctgatttcaaccagatcccggtgcagcctagccaccacatcgcaaatgtgccaggggcgacctgctcttgttcaatttcttcattcagccagctaccccactccgggaaagtgctcaggatccaggattctcgggtgatacttttcactttactcatcgccatttaccttcatgatagttcaattcgaatcaatatgtgattggttttgattaatcctgacactattttttcaggaaggcaatgaccattttttgactttttgccagggaagtggttgttgattttgagtgtggaaagatttaatggaatgtgtaattcaattaactaaatgaatttaaatgaatagttgtttcgttgtgtaaatcccattctatccatgtggaattatttgcgggtcgcgtcacatttaatcataaataatcttgttgtgattacttttgaaaattagagtgagtgcacaacattccgggtgtgtggaatacccggttacctcttcttcaggagatcgttatggagatcctctacaacatctttaccgtgttttttaaccaggtcatgaccaatgccccgttgttgctgggtattgtgacctgtctgggctacatcctactgcgcaaaagtgtcagcgttattattaaaggcacgattaaaaccataattggtttcatgttgttgcaggcagggtccggcatcctcaccagcaccttcaaaccggtggtggcgaaaatgtccgaagtctacggcattaacggcgcaatttccgatacttacgcgtcgatgatggcaaccatcgaccgcatgggcgatgcctatagctgggtaggttacgcggtgttgttagcgctggcgttgaacatctgttacgtgctgctgcgtcgcattaccggtattcgtaccatcatgctgactggtcatatcatgttccagcaggcggggctgattgccgttacgttgtttattttcggctactccatgtggacgaccattatctgcacggcgattctggtttcgctctactggggcattacctccaacataatgtacaagccgactcaggaagtgacggacggctgcggtttctccatcggtcaccagcaacagtttgcatcatggattgcctataaagttgcgccgttcctcggcaaaaaagaggaaagcgttgaagacctcaaactgccaggctggctgaatattttccacgacaacatcgtctccacggcgattgtgatgaccatcttctttggtgccattctgctctccttcggtatcgacaccgtgcaggcgatggcaggcaaagtgaactggacggtgtacatcctgcaaactggtttctccttcgcggtggcgatcttcatcatcactcagggtgtgcgcatgtttgtggcggaactctctgaagcatttaacggcatttcccagcgcctgatcccaggtgcggttctggcgattgactgtgcggctatctatagcttcgcgccgaacgccgtggtctgggggtttatgtggggcaccatcggtcagctgattgcggttggcatcctggtcgcctgcggttcctcaatcctgattattcctggctttatcccgatgttcttctccaacgccaccatcggcgtgttcgctaaccacttcggcggctggcgtgcggcgctgaagatttgtctggtgatggggatgatcgaaatctttggttgcgtctgggcggtgaaacttaccggtatgagtgcctggatgggtatggcggactggtcgattctggcaccgccgatgatgcagggcttcttctccatcggtatcgcctttatggccgtcatcattgtaattgcactggcttatatgttcttcgctggccgcgcactgcgcgcagaagaagatgcagaaaaacaactggcagaacagtctgcttaataaggagttttgattatgaccgtacgtattctggctgtgtgtggcaacggacaaggcagttccatgatcatgaagatgaaagtggaccagtttttaacccaatcaaacattgaccacacggtaaacagctgcgcggttggcgaatacaaaagcgagttgagcggcgcggatatcatcatcgcttctacgcacattgcgggcgaaatcaccgtgaccggcaacaaatacgtggttggcgtgcgcaacatgctctctcctgctgactttggcccgaaactgctggaagtgatcaaagagcatttcccgcaggatgtgaagtaaggacgcaccatgaaattacgtgattcgctggcggagaataaatccatccgcctgcaggctgaagctgagacatggcaggacgcagtaaaaatcggcgttgacctgctggtggcggcggatgttgtcgagccgcgttactaccaggcgattctggatgcggttgaacagcacggtccgtactttgtgctcgcaccaggcctggcaatgccgcacggtcgcccggaagagggtgttaagaaaaccggttttgcgctggtgacgctgaaaaagccgctggagttcaaccacgaagataatgacccggtggatatactcatcaccatggcggcggtcgatgccaacactcaccaggaagtgggcatcatgcagatcgtcaacctgtttgaagatgaagaaaatttcgaccgtttacgtgcctgccgtaccgagcaggaagtactggatctcattgaccgcaccaacgcggcagcttaagaaggaattgaagatgtcattaccgatgttacaagtcgcgctggacaaccagactatggatagcgcctacgaaaccactcgcctgattgccgaagaagtcgacattatcgaagtgggtaccattctgtgcgtgggcgaaggcgtgcgtgcggttcgcgatctgaaagcgctttacccgcacaaaatcgtactggcagacgccaaaattgccgatgcgggcaaaatcctctctcgtatgtgcttcgaagccaacgctgactgggtgacggtaatttgctgtgcggatatcaacaccgccaaaggcgcgctggacgtagcaaaagagtttaacggcgacgtgcagatcgaactgaccggctactggacctgggaacaggcgcagcagtggcgtgacgcaggcattcagcaggtggtttatcaccgcagccgtgacgcgcaggccgcaggcgtagcgtggggcgaagcggacattaccgcgatcaaacgtctttccgatatgggcttcaaagtcaccgtcaccggtggcctggcgctggaagatctgccgctgttcaaaggtattccgattcatgtgtttatcgctggtcgcagcatccgtgatgccgcttctccggttgaagctgcacgtcagttcaaacgttccatcgccgaactgtggggctaaggagcggatatgttgtccaaacaaatcccgcttggcatctatgaaaaagcgctccccgccggggagtgctggctggaacgcctgcaactggcaaaaacgttgggcttcgattttgtcgagatgtcggtagatgaaacggacgagcgcctgtcgcgcctcgactggagccgcgagcagcgtctggcgctggtgaacgcgattgttgaaaccggcgtgcgcgtgccgtccatgtgcctttctgctcatcgtcgtttcccgctgggcagtgaagatgacgcggtgcgggcgcaggggctggagattatgcgtaaagctatccagttcgcccaggatgtcggtattcgcgtgatccaactggcgggctatgacgtttactatcaggaagccaataacgaaacgcgtcgtcgtttccgtgacggcctgaaagagagcgttgagatggcaagccgcgcgcaggtgacgctggcgatggagatcatggattacccattgatgaactccatcagcaaggcgctgggctacgcgcactatctcaacaacccgtggttccagctctacccggatatcggcaacctctcggcgtgggacaacgacgtgcagatggagttgcaggccggaatcgggcatatcgtcgcggtacatgtgaaagacaccaaaccgggcgtcttcaaaaacgtgccgtttggcgaaggcgtggtggatttcgaacgttgtttcgaaacgctcaaacagagtggctattgcgggccgtacctgattgagatgtggagtgaaacagcggaagacccggcggcagaagtggcgaaagcgcgtgattgggtgaaagcgcgcatggcgaaagcgggcatggtggaggcggcataatgcaaaagctaaaacagcaggtatttgaagccaacatggatctgccacgctatgggctggtgacctttacctggggcaacgtcagcgctatcgaccgcgaacgcgggctggtggtgatcaagcccagcggcgtcgcctacgaaaccatgaaagcagacgatatggtggtggtcgatatgagcggtaaggtggtggaaggggaatatcgtccgtcttccgacactgcgacgcatctcgaactctaccgtcgttacccgtcgcttggcggcattgtccatacccactccactcatgccaccgcatgggcgcaggcggggctggcgatcccggcgttaggcaccacgcacgctgactacttctttggtgatatcccgtgtacgcgtggattaagcgaagaagaggtgcagggtgagtatgaactgaacactggcaaagtgattatcgaaacgctgggcaacgccgagccgctgcatacgccgggaattgtggtgtatcagcacggaccgttcgcctgggggaaagatgcccacgatgcggtgcataacgcggtggtgatggaagaagtggcgaaaatggcgtggattgcgcgcagtattaacccacaactcaatcacatcgacagcttcctgatgaataaacacttcatgcgtaagcacggtcctaacgcttattacgggcagaagtaaaacacgcgctgcggaaatttccttcctcgggagataactggtctaattccgcagccgtttttcaaaaaaagccccctgcgaagggggcaaagcaaactatggcaatgtttcgttggttatgcctggtgctagcgataaatatccgcgctggcgtgcatattgccgttactccccggttcccgcatcagaattacgtggtagtacgttgcgccctgcgcatctgtctcttcatttaatgcctgacgcgcttcgctttcagtggcgaaattatgattgatataaatcacgcctaagctttgcacatcatccatatttctggcccggtggttattaatttcaatggctgcccatgtatttgcacttagcaaaagcacagccagaagggctaaaactcgactgaacatagatacctcctcgacggctgactttgtgtgctctcctctgtgatgatcttctgatttaattttaatcaatgataaagaagttgatggtgaccatttctgatgcagttgttcgaaaaaacactgtgacggaatgtgatgaacttcaaatcagcggtttagaggttatttgcgaaaggggagatttatttctgctccgcccttgagtttagcggggtatgtcagtactataacgcgtcatttttcagccgacctttaacacgttccttgcctccccgggattcggctgacccagacaggaggctgaataatccgtaaggagcaattcgatgcgtcattacgaaatcgtttttatggtccatcctgaccagagcgaacaggttccgggcatgatcgagcgctacactgctgccatcactggtgcagaaggcaagatccaccgtctggaagactggggccgccgtcagctggcttacccgatcaacaaactgcacaaagcacactacgttctgatgaacgttgaagctccgcaggaagtgatcgatgagctggaaactaccttccgcttcaacgatgccgttatccgcagcatggttatgcgtaccaagcacgctgttaccgaagcatctccgatggttaaagcgaaagacgagcgccgtgagcgtcgcgatgatttcgcaaacgaaaccgctgatgatgctgaagctggggattctgaagagtaatttctgatgaccaaccgtctggtgttgtccggcaccgtgtgcaggactccccttcgaaaggtcagtccatcaggaattcctcactgccagttcgtgcttgagcatcgttctgtgcaggaggaagccggctttcaccggcaggcatggtgtcaaatgcccgttattgttagcggacacgaaaaccaggccattactcacagtataacggtcggcagtcgcataaccgttcaggggttcatttcatgccacaaggcaaagaacggactgagcaaaatggttttgcatgccgagcagattgaattgatagattctggagactagccatatggcacgttatttccgtcgtcgcaagttctgccgtttcaccgcggaaggcgttcaagagatcgactataaagatatcgctacgctgaaaaactacatcaccgaaagcggtaagattgtcccaagccgtatcaccggtacccgtgcaaaataccagcgtcagctggctcgcgctatcaaacgcgctcgctacctgtccctgctgccgtacactgatcgccatcagtaatcggtcacggtccattaatacgactttgagaggataaggtaatgcaagttattctgcttgatcaagtagcaaacctgggtagcctgggtgatcaggtaaacgttaaagcgggctatgctcgtaacttcctggtaccgcagggtaaagctgttccagctaccaagaaaaacattgaattcttcgaagcacgtcgcgctgaactggaagctaaactggctgaagttctggcagctgctaatgctcgcgctgagaaaatcaatgcactggaaactgttaccatcgcgtctaaagctggcgacgaaggtaaactgttcggttccatcggtactcgcgacatcgctgacgctgtaactgcagctggcgttgaagtggctaagagcgaagttcgtctgccgaacggcgttctgcgtaccactggcgaacacgaagtgagcttccaggttcacagcgaagtattcgcgaaagtgatcgtaaacgtagtagctgaataattcgttattcaacgagacgtaaaaacgccgaccattggtcggcgttttgcttttgtagcgagcacttgcagatatcgataagggccacaataagcagccctacgaagataattacttagctgcctgaatatcagccagcattggggcaagggctgggttgtccttagcgaagtttgcgtacattggctgtactttctcgataaacggagctttatctacctggtagactttcacgcccattttatccagttttgcaaatacttgtttctcttcctcgctccacaagtctttcatgtagctcattgattctttagctgcttttaatataactgcctgattttcctggctaagtttatcaaacgcagcattgctcatcagaaccacatcgggaaccatagtgtgttcgtcaaggctgaaggattttgccacttcaccgtgacgcatggtagtcagcgccatcacgctgttttctgccatatcgaccacaccctgctgtaaggctgtatacaactcgccgtaatccagtggcgtcgggttaccgcccatgactttgatcatttcaactgcgccagggcttggctggacacggactttcatgcctttcagatcgtctggtttcagtactggtttattgccatagaaactgcgggcgcctccatcataaaaagtcagcccgaaataacctttgcttttcgttgagtcgaggatttttctcccgatatcgccctgcatgacctgataataatgatcacgatcgcggaacaaataaggcaggctaaataatttataggaattttcaaatgcttccatttctgccgcattggtttttaccaggggaatagcgccagaacgaatcagctccattgtttctcgttgagtacccaatgttccatttggataaatacgaatagtaatatcaccgttagagtactctttgctctttttcgcaaagaactccatcgctttatgaacaggatgagacttatcctgattatgactcagttttaatgtcactgcccaggactggcttgcggataacataagaacagcaccgataatgccagcggatacttttattttcatagatgttccttttctaataaatatggcggcaggtgccgccagtgaatgcgcatcagtagcccagtgctcttggcaatgccatactgatttgcggaatataggtcaccattgccagcaccaataccatcacggcatagaatggcagcataggtttgataattttattaatcggtaatttagatacactacaaccgacaaataacacactgcctacaggcggagtacaaataccgatacacatgttcagtaccatgacaataccaaagtgaatcgggtccatgcccagttcggtgacaaccggtaaaaatatcggcgtaaaaatcagtaccgccggtgtcatatccataaaagtgccgataatcaacaggataatattgataataagcaggattattattgggttgtcagaaatagtgttaagcaaatcgagaatcaggaagggaacgtcagcgtttgacattgcccatgacatacccatcgaagaaccaattaataacaagacaattgcagtggtaataacggattccagaaatattttaggtaaatctttaactgagatttcacgataaagaaccagtgcaaggaaaagggtataaattactgcaattgcggaggcctctgtcggggtaaaaataccacttaatacaccccccataattaaaataatcaggaaaatactggggatagccatccatatcgcaacgccagcctggcgtaaagtcgggcgttctggctttggataaccgcgacgtaccgcgataataccggctattaccatcagtgccagacccagcaaaattcccggaacataacccgccaggaacagtgcggcaatagaagtaccaccactgaccagtgaatagacgattaacgtattacttggtggaataagcaaacccgtcggggcagaggcaacgttaaccgcagtactgaatgccgggtcgtaaccctctttaacctgttgcggatgcatgacgccgcccatcgcagccgccgaagccacggctgaaccagaaattgccccgaacagcatattggcgagaatattacagtgggcaagtgagcctggcagacgaccgccgagaatacgggcaaagttgattaatcgtcgcgctattcctccatggttcataatgttgccagacaagataaaaaatgggattgccaacaacgtaaaactatctaacccggaggctaacttttgggaaaccacactcaatgctgagttgaaatcgagttgtgtggaaattgatgccagtgtcgataaaccaatggcataaacaataggtacacctaatgccaacataaaaaagaaggcaccaaataacacaataatcggtaaccagtaatccataatttctccattcctactatggttggttgttgtttgttatctttagagtggttgtttaagttcggttaaaaccatatctatggtgtatataataataagtacaccactaatcgggatgctcatatagatatatcccatttgccagcctaaagcgggcgaggtctgacctgaatcgaatgtatccatcgttaatagcccaccaccatataccataatgatggttgcgaagataataacgataatctgaatacacaaaaataaatgacgtcgggcttttcctttcagcatcataggtagcaggtcaatcgccagatgccggttttgccctgcggtgtatgccccaccaaaaagtccaagacaaataaagagcaaacggctgagttcatctgtaaaaatactgggactagtaaatataaatcgtgcagccacctgccacgtcacacatgccacgatgatcgccaaaatggtaatgttcaatgctgcaagcagagcattaatagatctaattatatttcgcatagtgattaacctttgcaatatcattcatcctgtggctggtaaattgtcccattaagaaaaccaggccagtttttttcaaaccaaatacctcggataataggaaactcacgaacaggtgtttctctgacgtgaaagataccgttgcaataatgaataagtagtttatcttttttatcctcagtacgctctgaacgaaagcgccaggcatcacaaaaaccatttcgtgtttgcggaatagaatttccatccctgtcgagaataatacgtgctccccgactaccaccacctgcgtcaatataatgcgttaattgcgttaatacggcggcagaagtcagtgccatatgccgccacataaacagctcggcaacttcacccacatgtttgatagccaatccatgccgttggacaaattcgctcaatagcagggcatcgcgagtggcgcgtcggactttatcggcatggcaaataaatcccgcatggtcagacattcgtgcctgaattttttctctcacaaccgacaacggcatcccggtcccgttatcgtgcgcctgagtaatgatctctcttatagaagccagtgtaggagctaccagctgtgctatatctccatcaatattccgcttttgcgtgcaaccaataaaacgtgccagacgaacagcaaaaacctgcccggcattcaatgctgcaccaccagggcgagtgacgccgtgtgtgccagcaacttcccccacggcgaaacagccgggcagggaggtttgtccccagatatccacttcaatgccgccattcatatgctgattattcatggcaaactgcaaaggctgtgtggtgagatcgtaaccgtgcatcttatacagcgagatagacagcggattcattcgttgcagccgttcgatgggcgatggtgccagagcgtcgttattttccagatacgcgcgaacgtcgtcgtccagtcgatctaatgagaacggcaggtcacccggcaccgcttcaggattgcgattgaaatccataaatacctgacgccctgattgctgctcttgcgctactgccatatctaacaagctggagccaaaatccatcacccgagtggcgtggaacggccactgatagcctttacggaaaatgtttgaagccagctcctgggtggtgcgatagtaatccgcgaggaagttatactcgttaccctcagcatccacggaatagatatacgggatcacctgtacataggtgccggataaattccacggaaacgtgctacgcggcgtgcctataccaaactggctttcggtcagattggttagcgtcaggccttcctccagcgccagccccagcgagccaaaacatttgtgtgggtacacactgtcgcgataaagctcgccaggccctcctgttgccagtaccacattgggcgcagtcacaattgccagcccccaagggttatgggcgcgatgaccggtcgcgaggattgcccccgcaacacggtcttcgccgttttcgtcacgctgatgcagcagtttaatcactgttgcactggtcaacactggaatggcgaggcgctgtacttcttccaacagcactttcaccattaaccttgaggtacgcggcccacacgaggttgcacgcccggcttcgtcatggtcggtttgataacgaagaatcgcgccatagcgatcttccggtaattccagaccaagatattgcaacccgccaagagtgtgcagagaacctaccgcttcgacataagcggtgtcgtgatccatcgccccaccgctcgccagtgcctctgccagtttggtgaagttgtcgccgttgcccgcggtagcggcggtaaacagtgtctgtttatcggaaccagaacatgccgacgtccccatatataacccggcggtggcgatcagcacattttgctggcggcgtttaagttccacagctgcacgcagcccggctgcaccactgccgactaccagggcatctgtttgccagagtgggtaatcaacaccgtctaccgtgacaacccatgcgggctctgcctgtgcaaaaccctttgggaaagtaacgtgcgtcagcgcatcaaggatggtgtcatcaagctgactcatgcatcctccatcggcgtaaacaggctactttccatcaggcgtgggtgcttgataattggacggaaagccatatacggcagaatgtcgcgctcaatctccacacccggcgcgatttcaattaattcaacgccttctgccgttaactggaatactgcgcgttcagtgatatacaacacttcctgaccactttgctgtgcgtaggcggcgctaaaagtgattttttccaccttggtaaccagtttagggatttgacctgactgggcgatatgcaagccatctggtgttatatcgatcttgctgcctttagcgtcgaacgtgccgcagaacaccactttacgggcattttgcgcaatttcgagaaatccgccggggccaatcagattgccattgagatgggagacgttgacgttaccgtactgatccatctctcccatgccgaggaaggtgatatcgatccctccgccactgtagaactcaaattgatcgagtgatggaattatggcatcggcgttgcgggcgcagccgaaaaacgcatcatccagcatcatgccgttatgtacgccttgctcgacgctcagccataaactttggtaaggaacgccttcgcgcagcgctactcctggaatgccgccgggaataccaaagccaaagttggttgaagcgccagctaccagttcgcgtgctgcccgacgggcaatcaggcgacgtaccggatgactaaccagttcaatagcgtcgttagaactcagacggcgatgttggccgctgatggtcaggtcgtaaccgccaagataggtttgtggctgttcgcggtgttcaacgatgccatcaaccagaatgcccggtaatttaacccggcgtggttcaatcgcgccagcttccagcacatcgcgtacctgtacgaacactttgccgccgctgttgtgtgctgccagcgccatggaatagctatccatatcaatcgcttcttcttcaaggctgacgttgcctcgaggatcggcataagtgccacgcaaaatcgcgtaatccactttgaaagggcgataacgaagtttggtttcaccgtcgatttcaatcagttctaccagctcgtcggtagtgcattcattcgacttaccgccgccattgagtggatcaacaaacgatcccagcccaacgtgggtaaaaagccccggacgtccggcgccgatctcccgtagcagtgcctgaatcacgccaccaggaaagcagtaggcttcaatcgtgttattttttaccagcgcctgcattttgggcgaccaggtaaagtgcccggcaataatgcgtttgagcatctctgcgtgcgcaaaacgattagtgcctttgcagtcgcgatcgccaatacccagcgagtggattagcgtcaggtcgcgagggtgtccggtttgcaggaaacgcgcttcaatagcagccagaatatggtcggcttccaccataccgccgccgttaccgctaatagcaatagtcgcaccgtcctgaatttgcgccgccagtgcctcggcggttgttatcttacgcatacaatttccttattgattatggaagctcacgctacttttttcggcaaaggcgcgcgtcgcctgctggcaatcctgagtggcggacattaatccggccagtagctggtgcgggtaatcggcatgtttattttccagtgccagaatcagttgcttaatatgcgccagtgccaccggaccgcatttttccagctgcgctaactggttcaccatccagctttccacctgttctttttctaccacttcatcaattaaattcgccgcctgagcttcctgcgccgtcaggcgtttacccagcatcagcatctggcgaccgaccaccggaccaacctgattaagcacacgttcaatgcccatccagccaggcaccatgccgagcatcacttccgggttagagaatttcgcgccggggcgggcaatacgaatatcgcagcacaaggccagttcaataccaccgccgatggtatgaccgttgagattcgcaacggttaattggggtaagtttcgcaggcgattaaaaacgtcattaccgcgtttaatccattttctgcccatatctaatggcgaataggctgaccacgatttaatatcgccgcccgcacaaaagaatttatcgccggttgccgttaattcgactaatcgtaatgtggtgtcgttttcaatttcatttaaataatggtcgagagattcgatcatttcttcattaatagcatgacatttatcttcacggttcaatgtcaggcggcaggaagctgccgctctgctgaacagaacgggttggtcactcatgatcattccttaacaataatgcgcgatgcgatcgacgctaatatccagcgtgctgttaatatctttctgccaccagtaaggcgagaatatttccagttctatagcgccattaaatccggcgttttcaaccagccgacgaattgacggaatattgatgacgccatctcccggcattccccggtcattgaccagatcggtggtcggtactaaccagtcggaaacatgaaacgcgaggatgcgttttccagcacgcaggatctgactggcgagatccggatcccaccagacgtgataaacatccaccgccacgccgaggccaaactcaccatcgggatcgagttcatcacaccagtccagcgcctgacgtaacgtgcacaggcaagagcgatcggcagctgtcatcgggtgcagtggctccagcgcaattggcacgccgacatctttcgaatgtggcagcaactggcgaatcccttgtttcacttgttctcgcgcttcatatagatctttagtgcccgttggcagaccgccaaccacctgcatataacaggcggcgttaagcaccgctgcgtcgtccagcgcccggcggttatcatcaatcgccagtttgcgttccgccagtgtcggcgcggtgtagtaagtgctacggcacaaaccggaaacgctcatgttactggcggcaagctggcgggtgatttgctggagatcttcaccctgcaactccctgcgccagggggcaattgcgccaataccgcgtgcggcgcaggcatcaataatggcgggtagcggcgttttatagcccagtgtcgcggtattgatactgaataaatccgggcgttgtaacagatctctcatgattcagcctcagaagcgcggcatacttaagccgccgtcgatggcgaccgcttgaccacaggtgtaaatcagtttaccttccgccatcgcgcggacggtggaagcaatatcagccggataaccccaacgtccccacggcaccagacctttggcaatcagttcgtcgtaataagccgttgctggaatagtcatatcggttttgatgagaccagggcgcacttcataaacgccaatttgttcattacaaaggcgagcagcaaacagacgagcagcggcagaaacggcggttttggcaatggtgtattcgccgcgattcatcgccagcatgatggcgttgatggaactgacgaaaataatcgagcggtgcggcagctccgcttccggtttcggctgtgccagtaagcgcttactgaatgcctgagcaaggaagaacggcgcgcgggtgttaatggcaatgttttgatcgaagctgtctggttcgaggtcgaggaggtcaccgcgttttttcactgaaatgcctgcgttgttgagcaggcagtccagacgtccccacaggttttgcgccgcgtcgagcatctcttcatgcaaggagagatcgccgacatcggcagggaagcaaatcacttccacgccttcagctatacattcttgttgtgtgatatgcagtttttctacgctgtcggcatcgggaagatcgttaatcagcaggttaaatccgccacgagcaagctccagcgcacagccctttccaataccacgagcggctccggtaatcacggcaacaggacgagtggatttcatacaatagctctctttttttgaatattgttttctaagtgacaattagcttgcgacgtgctgcaagaaagatcaaccatctggttggttgatgtgcgatagtgatcacaggacatttgataacttgatgaaagtacaagtttttatcctttttactggagcttctaattaatcgggttaagatagttatcttgaagaggtcgtggggaagcgttatgtatcttgataccagcaacgtacagagcctgaaggaaaagctgctgttatgcgcggttaatgaatttgccgaatatggttatgaaggggccagggtcgataatattgttaaggctgcggggtgtagtaaacagacggtttatcatcactttggtaataaagaaaatttatttattgaagtactggaatatacctggaacgatattcgacaaaaagaaaaggcccttgatttctcagatcttccgccacaaaaagccattgagaaaattattgattttacatgggattattatattgctaatccctggtttttaaaaattgtgcatagtgaaaatcaaagtaaaggtgtgcattatgcaaaatcacagcgtctcttagaaattaaccatgcgcacttgcagttaatggaatccttattggatgaagggaagaaacacaatatttttaagccagatatcgacccattgcaggtgaatattaatattgctgcgcttggcggatattatttgatcaaccagcatacgcttggcctggtttatcatatcagtatggtttccccccaggcactggaagccagacgtaaggtcatcaaagagacaatccttagctggcttttggttgacccttcatctaccgcgcacgaataaaactgccatccggctggcgggtgaacaggacctgttgattattccccgtatcaatggttaagcccgtcaccacgccgctggcgttctggcggattttcaccatttgcccgttttgcaaattactcagcggcttacccgcgccttctacctgcgccattgcatagacatcggtagcgggcagtccgtggtcgcggaacagctgcgccatcgttttaccgggttcgacacggtaagagcgccattgattatcaattccgctatctggctggaatggttgtgtttgggtagtttgcggctgttcttctggctggccttcctgtataggttctggagcgaccggagccacctgatcaggatcattttgtggtgtgactaattgcgcccgcagctgttcttctgtcggcagttgtgattgcgactgaatatctaactgcgcttcacgcgtcaccaccggcgcgttgggcgtatcatcagatggaagcagaaatccgaccaccaatataatggcggcaataatgatcccccgacgatgcatcggcggcagcgggtccatgaagcgaaaattgtccggcgcgtgccagactttctccagggttggttttagttcaaagcgcccgggcatggtttcctcctgctccgcgtcttgttcctcaatcatagcctatgaataagctaacgctatgatgtccgtggtaaacccgcctttattatattcatacgggatattgctattgtttctttttccccgggatttgtcatcattcctgcgacaaagttttacccaaagaagtgtggctgatatgctgcccgctacttttataccctaagaaaggaaatacgatgaccaccccaacttttgacaccatcgaagcgcaagcaagctacggcattggtttacaggtaggccaacaactgagtgaatctggcctgcaagggctgctgccggaggcgctggtggctggtattgcagatgcgctggaaggcaaacatccggctgttccggttgatgtggtgcatcgcgcgctgcgtgaaatccacgaacgcgccgatgccgtnnnnnnnnnnttccaggcgatggctgccgaaggtgtgaaatatcttgaagaaaatgccaaaaaagaaggtgtgaacagcaccgaatctggcctgcaattccgcgtgatcaaccagggtgaaggcgcaattccggcacgtactgaccgcgttcgtgttcattacaccggtaaactgatcgacggcaccgtgtttgacagctccgttgctcgtggtgaacccgctgaattcccggttaatggcgtgatccctggctggattgaagcactgactctgatgccggtaggttctaaatgggaactgactatcccgcaggaactggcatatggcgagcgcggcgcaggcgcatccatccctccgttcagcaccctggtgtttgaagtcgaactgctggaaatcctctaagcagcgcattctgttcccctcgaaccagaggggagcaggcattcagcaataaacccttcagtttgccaaacggcgctattttgtgttgcaaagaccccgtaagcgtgtatttttgtgagctgtttcgcgttatcaccgtgatatgacactcactttaaacataaaattaacattagatctaaatcttagtattcatcccgcgtattgttacctaatatcgatgagtcccgatacagattcgtcgtatcatagactgactaaaggccgtagagcctgaacaacacagacaggtacaggaagaaaaaaacatggtagatcaggtaaaagtcgttgccgatgatcaggctccggctgaacagtcgctacggcgcaatctcacaaaccgacatattcagcttattgccattggcggtgccattggtacggggttgtttatggggtctggcaaaacgattagccttgccgggccgtcgatcattttcgtttatatgatcatcggttttatgctctttttcgtgatgcgggcaatgggggaattgctgctttcgaatctggaatacaaatcttttagtgacttcgcttccgatttactcgggccgtgggcaggatatttcaccggctggacttactggttctgctgggttgtaaccggtatggcagacgtggtggcgatcactgcttatgctcagttctggttccccgatctctccgactgggtcgcctcgctggcggtgatagtgctgctgttgacgctcaaccttgccaccgtgaaaatgttcggtgagatggagttctggtttgcgatgatcaaaatcgtcgccatcgtgtcgctgattgtcgtcggcctggtcatggtggcgatgcactttcagtcaccgaccggtgtggaagcgtcattcgcgcatttgtggaatgacggcggctggttcccgaaaggtttaagtggcttctttgccggattccagatagcggttttcgctttcgtggggattgagctggtaggtacaacagctgcggaaaccaaagatccggagaaatcactgccacgcgcgattaactccattccgatccgtatcattatgttctacgtcttcgcgctgattgtgattatgtccgtgacgccgtggagttcggtagtcccggagaaaagcccgtttgttgaactgttcgtgttggtagggctgcctgctgccgcaagcgtgatcaactttgtggtgctgacctctgcggcgtcttccgctaacagcggcgtcttctctaccagccgtatgctgtttggtctggcgcaggaaggtgtggcaccgaaagcgttcgctaaactttctaagcgcgcagtaccagcgaaagggctgaccttctcctgcatctgcctgctcggtggcgtggtgatgctgtatgtgaatcctagcgtgattggcgcgttcacgatgattacaaccgtttccgcgattctgtttatgttcgtctggacgattatcctttgctcgtacctggtttaccgcaaacagcgtcctcatctgcatgagaagtcgatctacaagatgccgctcggcaagctgatgtgctgggtatgtatggcgttctttgtgttcgtggtcgtgttgctgacactggaagatgacactcgccaggcgctgttggtcaccccgctgtggtttatcgcactggggctgggctggttgtttattggtaagaagcgggctgctgaactgcggaaataaccgcattatcatgctggatggcgcaatgccatccagcttttagattactcacccgccagcgcgcgtgggaacagtacattgttttccagactgatgtgatccatcaggtcatcaatcagttcattaatgccgttatacatcgctttccaggtggtgcaggcttctggcggcggtgtgacgttattggtagtgtgtttgatcacttccagcagttcgcccgcttcatcgtgctcgctttccattacgctgattggccccattgcctggctgcccatgccttgtttgatcatcgggaagaggatctgctcttctttcatcatgtggctggaaagctcttcatgcagcatggtcaggtattttgtcagcccttttggcacgctcggtttgtcggcgtgaacgcgctcgactttagtcgcttgcaggatcagctccggcagttgctcgcggtgacgatcgtggtagcgcacgatgatatggtcgatgatttctgccagcggggcgctacgccagtctttctcaatcggttgttcagcaagctctgccagctcagcttcaatgacctcaacatccagttctttacgtgccgccgcacgcgccagcgtttgcttaccgccgcagcagtaatccatatcatatttacgaaacagagccgaagcgcgagggatagagagcgccagttcacctaaaggttggtcgcgataagccatagctgatacctcattcttaataagataagatgtattttaaatgcatctttaaggcaaatgctataacccttacgtagcagaggcttatttaactcactgccagtatgtcaactttctgagacagattcagttaaaggcttttccggttttgctctgactgcaatgaccacgccaaccactaacagcgcgataccgctcagcgtcatcagcggcggcatttgctggcgtatcaaaaaggtgtacagcaaacctgccagtgtttcgaaaacgatcagcggcccgagaatcactgtcggtaatcgctggctggcgacgttccagcagagtgcgccaacccatgagcaaagcacggctatcgcaaccatcagactaataaacaccagcggacgggggccaaaaggtaaggagaagtccggcgtttgtatattcagccagtaacaggcgacgagatagccgatgagagaaaccggcagcgtgaccagcgcctgcgccgtcgcccacatcatcggatgtttgtcgggattttcccgcagccagcgggcgttgcgcagggcataccatgcccagcagaccacggaaactaacgctagcacgatgccagaggtataacgtgcccagtcaaaatcggggagtccgtggtttaactcagcaatattcacacacgccaggccgatgccaatacaaatcagtgccggggcgagttttccccacgcgagtttgccgtcgcgctggctataaagcagattggcaaagacaggaatgaccaccggcagggtgccaataatcatcgtagaaacaggcgcgccagtacgttgaatggcactggcaaggcagaagtaatagatgaggttgcccatcatagtgagcatcaaggcggtaagccagtcgcgacgcgccaactgacgcagacgcacgcgtcccagccaggcaatgggtagcgcaattaaccctaacgccagataacgccccatcgactgcaacatcgccgggtattccggcacgatcaacggcccgacaaaaataagcccccacatcaaccctgctaacagggcgtacagcacgccgctaatcattactggcatccattggtctgtcagaagaaacgttcaggaagcagacatgattgctcccggcatcccgtcattatcagagaggatgcgggaggatgccactttaattaactatttattaacattaaaaagatggc

SEQ ID NO: 206 - DNA, 30807 bp, Escherichia coli
  source 1..30807: mol_type = genomic DNA
cattcaatcactttaaaaacatgatgttatttgtttttctggttttttagatgatagatgttgctggatagtaagtgtctttaacgctattgcgctgtcagatgtaactctgtaaaacagatcaggaaggcggatttcatcgattttgggtgtttttaattcatttacatcacaaatgttttttgattgtgaagtttttgcacgaacggggaagatgaatgaaaaagattgcatttggctgtgatcatgtcggtttcattttaaaacatgaaatagtggcacatttagttgagcgtggcgttgaagtgattgataaaggaacctggtcgtcagagcgtactgattatccgcattacgccagtcaagtcgcactggctgttgctggcggagaggttgatggcgggattttgatttgtggtactggcgtcggtatttcgatagcggcgaacaagtttgccggaattcgcgcggtcgtctgtagcgaaccttattccgcgcaactttcgcggcagcataacgacaccaacgtgctggcttttggttcacgagtggttggcctcgaactggcaaaaatgattgtggatgcgtggctgggcgcacagtacgaaggcggtcgtcatcaacaacgcgtggaggcgattacggcaatagagcagcggagaaattgagattcatccactacttgcatggatgagtaatgattaatgtggatagagtttctttttgaggttggctaatgaaacgctttccgctatttcttttattcaccctgctcacgctgtccaccgttccggcccaggctgatattatcgacgatactattggtaatattcagcaggcgattaatgacgcttataaccctgaccgtgggcgagactatgaagattcgcgcgacgacggctggcagcgtgaagtgagcgacgatcggcgcagacaatatgacgaccgccgccgccagtttgaagatcgccgcaggcagctggacgatcgccagcgccagcttgatcaggagcgtcggcaactggaggatgaagagcggagaatggaagatgagtatgggcgatgaggttgggtatggagcaggcatcgcccctcaccccaatggggagagggagaaaacgagcgcaatattcaatatcgagcacaatcggtcccctcgcccctctggggagagggttagggtgagggggccagcgcgcacattccctctcatcacgccaccccaatctccatcccatcaaaccccacctcaaaccctgacggtagtgcgttttccatcagccacgcatcaaactggtggctgatatgggtcagaatcacctgtggcgagcggataacctgattcagcgcaagcacggtatttaaatcacagtgattacgcggtgcatccgcgcgcggcgggtgactgcaatcaatcaccatcacctgcggatgattattgagtaaaaatttcagcgttttttccggcaggccagcggtgtcagacagccacgccacccggctatgtgccgtttccagcagataaccgaaggtcagttttgagtggttaagcggcagcggcgtgacctgcaacccctgcaaatcaaacaccacaaacggtaccactgtgtggctgaaatcaagcaggcccggatgtttaaacagatcgtcgcagccctgttcatccggcgggccgtagaccgggatcacatcgcccacgccccagcgtagcggaaatagcccctggacgtgatccatatggtagtgcgtcagcaaaaactgctggaacgatccaggcgaccagcgatcggtgagatcgtgccgcccggcgtcgatcagggtgatcgcgtcgttaaacttcactacgccgctgcatggctggcggcgatactgcggcgagcgccgcgctctggcgcaggccgcgcactcgcagccccatgccggaacgccctgtgcgccgccagtgccggtgagcgtgagggtcaggctcatgttacagcgccttggtgaagcggaagtggctctgctcgtagccttcacgcaggtaaaaacggtgtgcgtcgtggcgcttcacgttggtggaaagctcggtcatttcggccccggcctggcgggcttcttcttctgcccatgccagtaatttactgccgacgttcagaccgcgcgcctgcggcatcaccaccagttcctgaatttcgccgatccagttgacatgatgcagatgaaactgcaaatgcaggccgatcatgccgacaacttcgccatccaccagcgccagatggtagcgcatgtttgggtcgcgcaggttggcgttaaagcccacgcgaaacgcatggtggtcaaactccgcctgttttagctcacaaatcagcgcgtaaaccgcgtcggtatcgtactgcgtggccgggcgaagctcacaagcaggcatggtgtttctccttctgatggatcagcgtcagcagcgtgtcgaccgactggcgcaggctgccgtcattgttgagcgtatggcaatcctgtggagtatagcgggcggcgcgcgccaggcgggcgttaatttcactggcgttttcacggccacggttttccaggcgctggcgcaggatctccggcgaaacctgtaaacagacgggcagcagcgccgattgatagcgcgcccgtgcctgcggcaaatgcgcgcgtgaaccgttgacgactacgtcgaatccagcgtgcagccagaggtcaatctcgatgccgacgccataatacagaccgttagcgtgccagcttaaggccagcaggttttgccccgcgcgggtaaaaaactcccgctcactcagggcgatatggttttcacttccggcgctggcgtcgcgcgtgatgtagcgatgcgccaccagtaacggcgtttgttcccgcaggcggagttccgccagcaggctgtctttcccggagccggacggccccattaaccaaatcagttttcccatcatcagaacacccttttaccctgacgccagacgtggtcgatatgaatgtgattgccctggcgatgcgccagcaccaggtcagcgcgtttaccctcgccaatcaccccgcgatcctgaagattcagcgcctgcgccggatttttggtcaccagcctcaccgcctgcggtagcgtaaagcggttgctctcgtcatcggcgacgcggaacgccgcatccagcaggctggcggggtagtagtcggaagagaggatatccagcagaccaagctgcgccagttcactggccgccacattgccggagtgcgagccgccacgcacgatatttggcgcacccatcagcacgttcatgccatgcttacgcgaggcttccgccgcttcgaacgtggtgggaaattcggcgatcacgctgccaagttggtgggattcggcaacgtgggcgtgcgtggcgtcatcgtggctggcgagcgcaatttgtcgcgcgtggcacagggcggcgatggattcgcgattcggctgcgaccagcgtgcggcgagcgccaattgctcttcttcgtactgctgcatctgcgcatcggtgagggagtatttgccctgataatattcgcgatacttctcgcggttagcgaactggcgctggcccggtgagtggtccatcagcgacaccagcgtcaccggttcgcgctgaaccagtttttcaaacagcggcagtgtggtgtgatgcggcagttcgcagcgcaggtgcaggcggtgctcggcgcggttgacgccgcgtttttgcgtctcttcgatggcgttgatcatcttctccagattctccagccgatcgccgccgtcgcgcacatcaccaatcgccacggcgtccagtacggtggtgatgccgcttgccaccatcagcgcgtcgtggctgctcatcgccgaatgggcgggccagtcgactttcgggcgcggggtgaagaatttatcgaggttgtcggtatgcagctcaatcaggccgggtagtagccagccaccttcgccgtccatcgcttctggcaggcggctctggctttcggcaaaggcgcggatttcgccatcctgcacctccagcgaaccgtgcaccacctcgttttccagcaccagcttaacgttattgataatcatgaagaggctcccattgggtgcaggcggtcggcgacgtcattacgtacagcttcgtcatggaagatgccgacgatggctgcgccacgggctttggcttcgtgaatcagttccaccaccgcggcgctgtttttggcgtccagcgaggcggtaggttcgtcgagcagcagaatggggtagtcgacgataaagccgcgggcgatgttgacgcgctgctgttcgccgccggagaaggtcgatggtgccaggtgccacaggcgttccggcacgttcaggcgggtgagaagacgcgcggctttagcggcgcaggcttcacgcggaacgcctgtatcgagcagcggctgcatcaccacttccagtgctgagatacgcgggatgacgcgcagaaactggctcacccagccgatggtagttttgcggatctccaccactttgcgcgctggcgcggtgaccaggtctacccattcgtcaccgtgtttgatctggatttgcccttcgtcgggcagatagttggcgtacagcgagcgtagcagagttgatttgccgctgccggaatggccgtggagcaccacgcattcacctgcgttgacggtgagcgaggcgcgttgtaagacgggcaggcgcacgccgttttgctggtgcaggatgaaggttttactgacgttttgtacgttaatcatttttcgcctcgtggttcgcatattggggagcggtgcgcgcattgcccctcaccctaaccctctccccgaaggggcgaggggaccgattgtgcgcggtgttgaatattgcgccggttttctccctctccctccgggagagggccggggtgaggggatcagcgcgcacggtgttgcattcaattctgcaaaaccgatgacaccagcagttgtgtatacggatggtgcgggtcgtcgagcacgcggtcggttaacccactctccaccacttgcccctgcttcatcaccagcaaacggtccgccagcaggcgggcgacgcctaaatcgtgggtgacaatcactaccgcgaggttcagctccaccaccaggccgcgcagcaggtcgagcaggcgtgcctgtaccgacacatccagtccgccggtcggctcgtccataaacaccagcttcggatgcgtcaccaggttgcgggcgatctgcaaacgttgctgcatgccgccggaaaaggtggtcggcaggtcgtcgatccggttggcgggaatttccacctcttccagccacttctgcgcggtggcgcgaatgtcgccgtaatgacgcgccccggtcgccatcagccgctcgccgatattgccgcctgccgagacctggcggcgcaggccgtcgagcggatgctgatgcaccacgccccattcggtgcgcagcaggcgacggcggtcggcctcgctcattgcgtacagcgaacggctctcatagtgaatctccccctgctgcggcgtcaggcgcgcggagattgatttcagcagcgtggtcttcccggagccggactccccgacaatgcccagcacttcccccggccataaatcaaaagagacatcgctaaagcctttgcccggcgcgtaaaggtgggtcaggttattgaccgaaagtaacggttgattcattggttttttgcctcgctctgttggcggcaataatcggtatcggagcagacaaacatgcggtttccggcgtcatccagcaccacttcatcaagatagctgtgggtcgatccgcagatggcgcatggctcatcccactgctgaacggtgaacgggtgatcgtcgaaatcgagactttccacgcgggtaaacggcggcaccgcatagatgcgcttctcgcgccccgcgccgaacagttgcagggcgggcatcatgtccatttttgggttatcgaatttcgggatcggcgacgggtccattacgtagcgcccgttcaccttcaccggataggcgtaggtagtggcgatatgaccgaagcgggcgatatcttcatacagtttcacctgcatcacgccgtactcttccagcgcgtgcatggtgcgggtttccgtttcgcgcggctcgataaagcgcagcggttccgggattggcacctggaagataatgatctgatcttcggtcagcggcgtttcggggatgcggtgacgcgtctggataagcgtcgcatcgtccgtacgttcagtggtgtttaccccggtcacgcgcttaaagaagttgcgaatcgacacggcgttggtggtgtcatccgcaccctggtcaatcaccttcagcacgtcgctttcgccaatcacgctggcggtgagctgtatgccgccggttccccagccgtatggcatcggcatctcgcgcccgccaaacggcacctgataaccggggatcgccaccgcttttaagatagcgcggcggatcatgcgtttggtctgctcgtcgaggtaggcaaagttgtagccgctcagattagccatggttcttctcctgttgcagacgtttgagtagctccagttcggcctggaaatcgacgtagtgggggagtttgaggtgcgagacaaagcctgcggcttcgacgttgtcggcatgtgccagcacaaactcttcatcctgcgccgggcctgtcgcatgctcgccgtattccggagcctgcaacgcacgatcgaccagcgccattgccatcgctttgcgctcgctcatgccgaataccagcccgtagccgcgcgtgaagtgcggcggctcatccggcgggtcgataaaaccgttgaccatttcacactcggtcatcagtagttcgccgacgtttaccgcaaatcccagctcttccggcacaatcgacacgtcgatgtaaccactgcggatctcgcccgcgaacgggtgattgcgcccgtaaccacgctgggtggagtaggccagcgccagcaaatagccttcgtccccgcgcattaattgttgcaggcgggaggagcgtgagcaggggtaaaccggcggcgtgcgggtgatgtcatccggctgtgcgccgctatcttcttcaaacttcgccagcccctgacgcgccagcaggctgaaaacgtgcggcgacggctgttgttcgctgtcggcggtggtcagcgtcggcgcttcgccgtttgccagcagggtgaaatcgagcaggcgatgggtgtagtcgtaggttgggccaagcaactgaccgccgggaatatctttataaaccgctgaaatacgccgttcgagacgcatctccgtggtgtcgagcggctcgcttaccgccagcttcgccagcgtggtgcggtaggcgcgtagcaggaaaatcgcttcgacgttatcgccgctggcctgtttcagcgccagcgccgccagttcgcggtcggcaatgccgccttcggtcatcacgcgatctactgcaagattaagctgctgttcaatctgggcgacgctcagttcaggcaaatcggtattgccccggcgtcggctctcttgcagggcgtgggcggcgtcgatcgccttctcgccccctttcacggcaacgtacatcagcacacctccacatgagtggttcgcgggatagccagcagccgctcgccgcaggtcaggatcaggtcgatgccgagcgggaacgggtgcgggcgctcggtgagttcgtgcagaatgcactccggcagctgcggagcgatcattcgttcttcggcaatacccgcgccagtaaggcgcagcatgcgcccgccgctcaggctggcgacctgtaaaatcagcgttgcacccgcttccggcgcaacggcggtgccggtggaaagggcgttaagctgttcgctggaaatcgcctcatccgtcaccgcgaaggtcgcctgttccggctggctgaccagcggcgcgttggtatgaaaacgcaggctctggctgacgatatcgttactcaatggcgcggcaagccacaccggcgtgtcgttatcggccagcgtcagcagcacgctggtggtggcgatattcagcggctgccagccgcgcttgagctgatgcagggcgacaatcacgcccggctcgctcatggcctttaacaggcgacgaaaactgtgctgggcatcctgcacgggaagcataaaagcggtttccagggtcatgcgttgtctccgcgaaccatcgtaaagaagtcgacccggctggcgttcacttcggcctggcgtgcggcaatgcgtgccatacggtcagcgtccagcggggcaataagggtttctgataagttttgaaaatagcgagattgctgcatcagcgcgtcaatcagcgcgcagcgttcggcgtgctgtttgtcgcgccccagcacccagctgtagccgagcgtgccgtcagtcaggcgtacggcggcgcgggtgagcgtggcgtcgccggcaaaaaagcgttcgccggtgccgcccatccgcgcctgaatctgcaccaggccggtttcggcggcgcggataacctcatagtcggcggtgatgttcagtgctttcaggcgggctgccagttcagccggttggctgtgcgccagtacggacatccagtgctggcgggtcgcggtatctgcgtgcattcagtgctccatagtgaattcaatcatgtcggcgcgcgtcaggctgacggagtactccgccgggctgctttcaccgtcacggtggttaagggtgcgcacgcacagcagcggcgacatattcggaatttcaagacgctggcactctttggcctgggcgcgacgggcgttgatccgcgtctggctgcggcgcagcgcaattccggtttgctcgcgcagaaaatcgtgcagcgaaccgctgtcgaagcgttgcagcgtcggccaaagggtgaggtccgcaaagtagtggtcgattaaacagagcgcgacgccgttgacgcgacgcagggtgcgcaaatggataacgttctcgccctcggtaatccccagcgcgtcagcgacgtgaccggacgcggggcgcaataccgacagcagtttttcgctggtgggatggctaccctggtccagcaggttctggctaaaacgcgcctgggcgttgagcgggtaatcgaacgggcgcatcagcaccagcacgccgacgccctgacggcgctgtacccagcctttttccaccagttggtcgatggcgcggcgcagggtgtggcggttcacctcaaagcgcgccgccagttgctgctcggcgggaagatagtcgccgcagcggtagtgttgacgaagctcctgctcaagttttgcggctatctcctgatagcgtgttgggtagctggtcggatgtgtagacaagtgcatagatatcaatgcctcgcttatcagataaagtgcttacgcaaccgttgagagaggaaatccagcaggctgaccgtgacgatgataagcaccatcagggcgcaggtttgctggaactggaaaccgcgaatcgcttcccacagggtgacgccgatcccgcctgcaccgaccatgccgacgacggtcgccgagcggacgttggattcgaagcgatagagggagtaggagatcagcagcggcattacctgtggcagcacgccgtaaaggatctcttccagcttgttggcgccggtggcgcgaatgccttccaccgggccgggttcaatcgcttccaccgcttcggaaagcagtttcgagagcacgccggtggtgtgaataaatagcgccagcacgccagcgaacggtccgagaccgacggcgaccacgaacagcatggcgaagaccatttcgttaatggcgcggcaggcgtccatcaggcggcgaacgggctggtaaacccaccacggcaccaggttttcggcgctcatcaggccgaaggggatggagagaaccactgccagcgcggtgccccagacggcgatttgcagcgtgacggccatttcggtgaggtaatcctgccactggctgaaatcgggcgggaagaagtcggcagcgaaggttgccatgttgccgccgtctttaatcagcgtaagcggggccatttccgcgccctgccacgagacgaccagcacggcgagaacaacggcccagctcagaagcgagaaccagctacgcttggatggggcgatggtgatggtttgcatgtttggctccgtttaatgttttctccctctccctcaagggagaggggaccgatcgagcacattactgcaccgctttactcaccgaactcatcgcgcttaacgcgttgttcaggcggtccaggtcatccagctgcgcctgaatctcggtggttttcgccagcttgtcctgctcattcagtcctttattgctttttacgccctgcatctctttaaacagtgcgagctggcgaatcggcaccagttgcaggtcgctggaggcgcggaacggggcccagcccaggcgttccagcaccgctttctcttccggcgtttttccgtagttcataaagaagtcgtagatcttgtctttggtggtttcggagagattcttgcgccagacgatcggatcgcctgggatcagcggcgacttccagatcatcttcagttctttcagcttctctggcgcggaggttttcagcttgtcgaggttttcggtgttgttggtggcaacatccacctgcttgttggcgacggccagcgcgttggtttcatgcccagcgttgacggtgcgcttaaagtcgctggcggagatattgtttttggcaaagacgtagtaaccggggacgaggaagccagaggtggagttaggatcgccattgccgaaggtgagatctttccgcttcgccagcagatcgttcaggttgttgatcggactatctttgttgacgatcaacacgctccagtaacctggcgatccatccgccgcgaccgtctgggcgaagacctggccgttggcgcgatccaccgcttccattgccgacaggttgccgtaccaggcgatatccactttattgaagcgcattccctggataatgcctgcgtagtctggggcaaagaaggcgttcaccttcacgcccagcttcttctccatatcctgtaagaatggcgtccattgcggtttcaggttttgctgtgattccgttgaaataatgccgaaattcagcgccttttcctgctcttcggcgtgtgccgggcttaacagggtgctgaggctgaacatgctggtgaaggccagcgaggcaattatcttagcgttcattcgttttcctcaatgatggggatgtcaggcagctttcgcgttctcttcgatgcgattaatgctgcggtagagatggtcaaaacgttcgttatcaaactgttggctgctgccgtcgtagaaaacgtgcccctggcgcagggcgacgatgcgttcgcagtagcgcagggcgtaatccacctgatgcagcgtgacgaccacggtgatgccgtcgttctgattgatgtcgcgcagggtgtccatcacgatgcgggcggattccgggtccagcgaggcgatgggttcatcggccagaatcaccttcgcctgctgcatcagcgcgcgggcaatcgccacacgctgctgctgtccgccggagagggtggaaacgcgttgatgggcaaaatgcaccatgccaacgcgggtcagcgcctgtaacgcgcgttgtttctgctcgcgggtaaaccagctaaaacaggtgcgccagaacggcgtgctgccgagcgcgccaatcagcacgttctccagtacgctcaggaggttcaccaggttgaattgttggaagatgtagccggtgttggcgcggcttttgcggatatcgcgcgccagacggccttcgcgctggactgtgcggcccagcagctcgatatggctgccggcggatttatcgccggtaatcaaaccgcttaagtgacgtaaaagggtggatttgccggaacccgacggcccaagcagagccaccatttcaccgtgatgaatgttcagatcaaccgcatgcagcgcctgatgctgattgaaggttttggcgagcttctcgacacggataatcgtttgcatgatgcagcctccctaaaaaagtggctccatcgtggcggattattgtgacgatttggttaattaaaagtgactaacagatgaagagttaacgggaattcgatgacagtgcgggagggcgggcctcccggcggattattgcgttggttgttgtttgacgacattaatcatccacggtacgccaaatttatcggtgactttgccaaagccatgcgcccagaaagtttcctgccaggccatttcgatttttccgttagcggcaagattgtcaaaccagcgttttccttcttcgacctgttgcgaatcgagcaccagcgtaaagccggagtagctggcttttcctgacggcatggcatcgctcatcatgatgtcgcttccggcaatgcgcacgttggcatgagcgatggcggtatcgggaaattgcattccggaagggcagttctcggcgctgtcctgcgctgattttggcatttcgccgaagctgattttatagagcagttcnnnnnnnnnngttcagcgcccaacgtacgttgataataagcaattgcgtcggcacagttaccggcaaaagagaggtagggacttaacggcatgatggtgacctcagttaagagaagccagttaagtgtagttcgaaatttatacagatgagagggaagcctgataagacgcggtcagcgtcgcatcaggcagtcggcatcgttgccggatgcggcgcgagcgccttatccggcttaccgatcacaatacaatcagttctttttcacaaactcagatttcagtttcatcggaccaaaaccgtcgattttgcaatcgatgttatggtcgccttcaaccaggcggatgtttttcactttggtgccaattttcagcatcgaagagctacctttcaccttcagatctttaatgatggtaacgctgtcgccgtcagccagcagattgccgttagcatctttaacgatcagctcgtcgctttcctgtgcaggttctgcgtcgttccattcgtaggcacattccgggcagatgtacatgccgttatcttcgtaagtgtattcggagttgcattttgggcagtgtggtaatgacatgtggatttcctcaaaagtcagcagggcaaaagcgccaaaaaacggcagattgccgaaaaaggccgcaattatacacaaaatccctgagtttgtcgggggtactgctgattttagacgacgatcgttttcatttgaaaggaaacgcaaaaagaaaataatctttttgcctctatttattatttaagataatgttaatgctctacttgttcttttttttattcacatgatatttttatctttctgacgttttaaacgtatcagaagacgttatttattctgataaaaaacaacacactaaatataaaattatttcttgcagtaattataaaagccgaaaacagaactcaaaaacaatctggctaaataaaagtaacaaaatttgctttaaggaagaattttctatgtacacacagaccctgtatgagttaagtcaggaggctgaacgcctgttacagctttctcgccaacagttgcagttactggaaaaaatgcctctctctgtacccggagacgacgcgccacaactggctttaccctggagtcagcctaatatcgccgaacgtcacgcgatgctgaataatgagttgcgtaaaatttcccgactggaaatggtgctggcaattgtcggtaccatgaaagcagggaaatcaaccaccattaatgccattgttggtacggaggttctgcctaatcgtaatcgcccaatgactgcgctgccgacgcttattcgccatacgcccgggcaaaaggaaccggtactgcatttttcacatgtcgcgccaatcgattgtttaattcaacaattacaacagcgcctgcgtgattgcgatattaagcatctgaccgatgtgctggaaatagataaagatatgcgtgcgcttatgcagcggatcgaaaatggcgtcgctttcgaaaaatattatctgggtgcccagcctatttttcattgtctgaaaagtttgaatgatttagtgcgactggcgaaggcgctggacgtcgattttcctttttctgcttacgccgccattgagcatattcccgtgattgaagttgagtttgtccatctggcggggctggagagttatcccggtcagttgacgttactggatacccccgggccaaatgaagccgggcaaccgcatctgcaaaaaatgcttaaccagcagctggcacgcgcctcggcggtactggcggtgctggattatacgcaactgaaatcgatctccgatgaagaggtccgtgaggcgattttggcggtggggcaatcggtgccgctgtatgtgctggtcaataagttcgatcaacaggatcgtaacagtgacgacgccgaccaggtgcgggcactgatttccgggacgctgatgaaaggctgtattacgccacagcagatatttccggtgtcgtcgatgtggggctacctggcgaatcgggcgcgccatgagttagtcaacaacggtaagttaccagcgccagagcaacaacgctgggtggaagattttgcccatgccgcgctcggcaggcgctggcgtcatgccgatctggcggacctcgaacatattcgtcatgctgccgatcagttgtgggaagattcgctgttcgcccagccaattcaggcgttgcttcatgccgcttacgctaacgcctcgttgtatgctttgcgatctgctgcgcataaactgttgaattacgcgcagcaggcgcgggaatacctggattttcgtgcgcacgggttaaacgtcgcttgtgaacaattgcggcaaaatatccatcaggtcgaagaaagtttgcagctattgcaactcaatcaggcgcaggtgagcggcgagattaaacatgaaatcgagctggccctgacctccgccaaccactttctgcgtcaacaacaagatgcgctgaatgcgcagttagccgccttgtttcaggatgattcggagccgttaagcgagatgcgtacccgctgtgagacactgttacagacggcgcagaacaccatcagtcgcgactttacgctgcgttttgccgagctggaatccaccctttgccgagtgttaaccgatgttattcgccccattgagcaacaagtcaaaatggaattgagcgagtcagggtttcgtcctgggtttcattttcctgtttttcacggcgtagttccccacttcaacactcgccagctgttcagtgcagtcatttcgcgccaggatgcaacggacgagcagagcacgcgtttaggcgttgtgcgtgagactttttcgcgctggttgaatcagcccgactggggacggggaaatgagaaatccccgacagaaacggttgattacagtgtgttgcaacgagcattaagcgcagaagtcgatctttattgccaacaaatggctaaagttctggcagagcaggtcgatgaatctgttacggcaggcatgaatacttttttcgctgagttcgcttcatgtttgacggaattacagacgcgtttacgcgaaagcctggctctgcgtcaacaaaatgaatcggtggtcaggctgatgcagcagcaattgcagcagactgtgatgactcacggctggatttacaccgacgcccagctgttacgcgatgatattcaaacacttttcacggcagaacgatattgaccaagacgttactggacggccccggtcgcgtgctggagtcggtttatccccgctttttagtggatctggcgcagggcgatgatgcccgccttccacaagcccatcagcagcagtttcgtgaacgactgatgcaggaacttctttcgcgtgtgcagcttcagacatggacgaacggcggcatgttaaatgcgccgcttagcctgcgactgacaatggtggaaaaactggcgtcgatgctggatcccggtcatctggcgctgacgcagatcgcgcagcatctggagctgctgcaaaaaatggatcaccgccagcactctgctttcccggagctcccccagcaaattgccgccttgtatgagtggttttcagcccgttgtcgctggaaggaaaaggcattaacgcaacgaggcctactggtgcaggcgggtgaacagagcgagcaaatttttacccgctggcgtgctggggcgtataacgcctggtcgttgcctgggcgctgttttatcgttctcgaagagttgcgttggggggtatttggcgatgcctgtcgtctgggaagcccgcaagcggtggcgttgttgctgggtgatttgcgcgtgaaagcgacacaacatctggcagagagtatcaatgcggccccgaccacgcgtcactattaccatcagtggtttgcctcttcgaccgttccgacgggcggggatcatgctgattttttaagttggctgggaaagtggaccacggcagataaacaacccgtttgctggtcagtgacccaacgctggcaaactgtcgcgctggggatgccacgactctgttcagcgcagcgtctggcgggggcaatgctcgaggaaatcttctctgtaaatttggcgtaaataatcagttacatcaatgagtcctaaacgaaatccatgtgtgaagttgatcacaaatttaaacactggtagggtaaaaaggtcattaactgcccaattcaggcgtcaactggtttgattgtacattccttaaccggagggtgtaagcaaacccgctacgcttgttacagagattgcatcctgcaattcccgctccccttttgcggccgtcgcgctgatttttctggcgtttgcggaaatgggccaactctgcgaggaaagctatgctgaaaaggaaaaaagtaaaaccaattacccttcgtgatgtcaccattattgatgacggtaaactgcgtaaagccattaccgcagcatcactgggtaatgcaatggaatggtttgattttggtgtttatggttttgttgcttacgcattaggtaaagtttttttcccgggggctgaccccagcgtgcagatggttgctgcacttgccactttctccgttccctttctgattcgaccgcttggcgggctcttctttggtatgttgggcgataaatatggtcgccagaagatcctcgctatcactattgtgattatgtcgatcagtacgttctgtattggcttaataccgtcctacgacacgattggtatttgggcaccgattctgctgttgatctgtaagatggcacaaggtttctcggtcggcggtgaatataccggggcgtcgatatttgttgcggaatactcacctgaccgtaaacgtggctttatgggcagctggctggacttcggttctattgccgggtttgtgctgggtgctggcgtagtggtgttaatttcgaccattgtcggcgaagcgaacttcctcgactggggctggcgtattccgttctttattgctctgccgttagggattatcgggctttacctgcgccatgcgctggaagaaactccggcgttccagcagcatgtcgataaactggaacagggcgaccgcgaaggtttgcaggatggcccgaaagtctcgtttaaagagattgccaccaaacactggcgcagcctgttgacatgtattggtctggtaattgccaccaacgtgacttactacatgttgctgacctatatgccgagttatttgtcgcataacctgcattactccgaagaccacggggtgctgattattatcgccattatgatcggtatgctgtttgtccagccggtgatgggcttgctgagtgaccgttttggccgtcgtccgtttgtgctacttggtagtgttgccctgtttgtgttggcgatcccggcgtttattctgattaacagtaacgtcatcggcctgatttttgccgggttactgatgctggcggtgatccttaactgctttacgggcgttatggcttctaccttgccagcgatgttcccgacgcatatccgttacagcgcgctggcggcggcatttaatatttcggtgctggttgccggtctgacgccaacactggcggcctggctggtcgaaagctcgcagaatctgatgatgcctgcctattacctgatggtagtggcggtgattggtttaatcaccggcgtaaccatgaaagagacggcaaatcgtccgttgaaaggtgcgacacnnnnnnnnnncagatatacaggaagcgaaggaaattctcgtcgagcattacgataatatcgagcagaaaatcgataatattgaccacgagattgccgatttgcaggcgaaacgtacccgcctggtgcagcaacatccgcgaattgatgaataagctgaaacggatggcctgatgtgacgctgtcttatcaggccaattgaactcttaaggttcacttaatctctgacgcgcatactctcctccaggttaacggaggagagtgcaatgaaaaaccgtgtttatgaaagtttaactaccgtgttcagcgtgctggtggtcagcagctttctttatatctggtttgccacgttctgatctttcttcagccgtacccaggcccgcgtgccggaagtctcttgccggttttgcaggaaaaactgcccgtgatgcaactgtgtaatgcggctgacaatacttaaccccagaccaatcccgccataacggctgtccatacgtacaaacgctttactcaactccccgcatttactctcatcaatacctggtccttcatcttcaactgccatgaccgctccgccatcttcttgcagcttaatcataatgttgctgccttgcgggctgtaacgatgggcgttttctaccaggtttcgcaataacatccgcagcagggttgcatcaccctgaacggtgatgtcggcggcgctctctggcaatagcagggtttgctgtcgctggtcgagcatggtactgagttcgtcatacgaggggagaatgacatcttccagcagttttacatgttgataattaccggaagaaaatgactgtccggcacgcgccagttgcagcagctgggagacgctctccatcatctgatcaagccgtgccactaacggtgctacatcaatgtgatgcgttttcgccagcagttccagatgcaaacgcacccccgccagtggcgttcgcagttcgtgcgcgacgtcagcggtaaacaacctttcgttatccagcgtgctggtcaggcgactgaccagatcgttcaacgccgaaaccaccgcttcgatttcgagggtggcgctgtgaatggcaatgggcgttaagttgtcggcggtgcgcgcttccagctctttttgcagctccgccagcgggcgggtgatgcggcgtaccgcctgatagcagataaatagcgtcaggctgaccataaagacgccggggacaatcaggctggcgaccgcctcgcggatctcacgcatgatgtggcgatcgttgttgcgattgtcgcgtagcgcctgctcaaacagctgaatctgctcggtactttcatgccatagccagaagacgctgatcagctcaaacaccaacaaaatggccccgatggtcaatatcagccgttggcgcagcgatattggtcggcgcagaaaatgcatcagattcaattagttttcctcattcgcgaccagcatatagccaaagccgcgcacggtgcggatacgggctttgcccactttgtcgcgcagattgtggatatgcacttccagggtgttggtcgagggttcattgtcccagttatagatgtcgttgtagagaatttcccgatgcaccggactgcctgctttgagcattaaccgtgacagcagagcatattctttgggcgtcagaatcaactcttcaccgctcatccatacctgacggcgacccatattcagcgtcagattgccaacaatcagctcactttcgccctgattattatggcgtcgtagcagggcgcggatacgggcgtgtaactcttccagcgcaaaaggcttcaccagatagtcatcggcaccgacatccagcccggcgattttgtcggtcagcgtatcgcgagcggtgaggatcagtactggcagggtgtattttttctgccggatacgggcgagaaaatgcagtccatcttcgtcgggtaaccctaaatccagtaccaccaggctgtaatgaccggcctcaaggctttgttccgccatccgcgcggttgtcacgccatcgcacgcgtagccttcggtttgcgccgccagaatcaatccctgcaataacagcgtatcgtcttcaacaatcagaattttcattcactcactctcctgcaagtttgcagaatatcatccgcagcctggtaatacttcgtctcaacgccagttaatcccaatagcgtggagaataaattgtcttgtgaatagtgttgcgtttgcgcctgtttttgcaggcagttctggtcaacctgataccgtttttgataatcctccgacagccacagcagcattggcacctgtttttggctatccggggcgatggcataaggcagaccgtgcagatagatgccattttcacctaacgattcaccgtggtcagaaagataaaccaggctggtggtaaatttatcctgatgttctttcagcagattaatcgctttatcaacaatatagtcgacgtaaaccagcgtgttgtcgtaagtgttcaccagttgctctttgctacaggtctggatctcattggtgtcgcaggttggggtaaatttcctgaactgcggcggatagcggttgtaataggtcggaccgtggctgccgatggtgtgtaagacaatcacgccatcaccctgcaggttattgatgtactcttccagcccgtggaacagcacttcgtcatagcattcgccgttgatgcactgaccaggcagattcagcgcggtgacgttctggtgaggcacgcggtcgcaggcacctttacagccgccatcgttgtcattccacagcacgttgatgcccgctcgctgaatgatatccagcacgccttcctggtgctgtgccagctcttctttgtaatgctcacgcggcatatccgagaacatgcacggtactgaaactgccgttgccgtgccgcaagatgcggtattagggaaatagaccacgttatctttcgccagccgcgggttagtttcacgcgggtagccgttgagggagaagttctccgcccgcgaggtttcgccgacaatcaggatggtcaaatttttacgtttttcgttctgcattaacgggttgcggtgggcgtcttcaccaattcgcaccagcggtagatttgctagtcgctgatgggagtaccatgaccagctggcaacaatgctgttagaggggcttaaggatttcaccagctctttgttattgcggaacaacgaggcgtagtctttataaaacagtgcggcgaccagcaaaatcagtagtacagaaaccagaatattggctccacggaaaagaacactgcgcagacgcgaggtggcaggtttgatttttatccagcaggcaatcagcgcagcaagcacgccgctgaatcccagcgttaataacatttgcggtgtcatcagcgcataactttctgccggagtggtatcaataatattggcaatcatcgagcggtcgatgacgatgccgtaagtcattatgaaatattgtgcagccgcgccaaccagaataaacaggcaggccagtggtcgattaagccataagaaagagcttagtgtcaggacaatattaatcacgctgaaagcgacgaccggcatcgacaagaaaaccagtacgttatgcagcgaatccagcggcagcgcctgcaacacctgtttaaaaaaggcaatattcaggcagatagagatataaaaagcggccaacaatagccaggcgagtaaattcaaagagggtctttttagtaggcgcttcaacatcacggtgtttccatcgaacaaagtgcgcatatgctcgcaaagcaaaattaagccaaccttaagttcttaaggttggcttttatgtttgctggattaaggggaattaatctttgcttattggtgcatctaagggatacgggtttttatgtagccggttgtaattcagcgcatacatggcggtgatgaccatcagggtgacaaatgaccacataacctctttcgctccggaccccaccacggcccagatgcagtagaggaaggcaatggtagtaactgccagatatgccgggcgtgctttaccaaagtgaccgtgtccgagcagcagtaacgccgcacaggtgtaaagatatggcaccagtgtaaagatgaccgagacggaagaaaccagaccgaactctttggtcgcgtttggtgaaatgctgctgagctggaagatggtcatcaaaataccgacgataatcagccccgccactggcgtacccgctttatttacacgggcaaaaattggtgggaacagtccgtcatcggcagcggctttcgccgtttgacccgccagcaacgtccagccgcccagtgaacctaagcaacccgcagctgcgcagaaggaaacaatggccccggcggtgtcacccaacgccatccgtgcggcatcaccgaatggcgaagcagaaacgcgcagtgcggcattagggatcatccccataatcgcggtggtagaaagtacatagcaaacggcggcaatcaataccccaccaatggtggcgatagggacattgcgtttcgggtttttcaccacacctgcggcaacggaggcactttccacaccgatgaacgaccacagcgtaacgttaagggtactttgaattgcaccgaaggtgcccaggccgctgacgttccatgccgccatataggtttcaccacggaaccagaaccagccaaatacggcaatcccgacgatggggatcagcgccagcacggtggcaactgcctgcacacgggtgatcattttcggaccgacaatgttcagcaggacgaagatccacagcaccacgacgcaggtgatggttaataccaatggatctttcagaatcgggaagaagtaacttaaatatcctacgccaatgaccaccatggcgatattgccgatccagcaggccagccagtagaggacgttggtttgataaccgagaaacgggccaaagcagcggcgggcgtacgcgtaagaaccaccaggacttggatcgaggaacgacattttggcgtataccatcgagagccccagcgcaccgataatcgtcaccaaccatccataaatggcaatcccgccagtagaggccaggtttgcaggtaacagaaaaacacctgaccccataatattccccgacaccatcagggtgacggggattaagcccactttgtgagcatcagcatccgaagacataattaaactcctgcgaaggcgagcttcgtgacaataaattacgtcatatcatacgcctgcattcgatagttgaattattatcgaccgggttatcgctgatgccgttattaatatagctcttcgttaaggttaaaaatcaggcgacagtgcgttctctgtgctgactaacataatgcagcggcgtcataccgtagaagtctttaaagacagaaataaagtacgacgtactgttgtagccgcaggactgtgatacctgagagatatttttaccgtccatcattaattcatttacggcataacgcatgcggcaggtggtgattatttggctataactggtgttttcgcttttcaactttttctttaacagacttgggctaagacataaacaactggctaccatactaagattccagtctttgtgaatatcgctttcaataatttgataaacgctgtcacttacacaattacgtaacatatacatcattaatgaaaggaattttttactgtcgagaaaacgggatagcaccgtgaataataatgcgcgtgttcgttccttttctgactcagtttctgcgggcatcatgctgtgttgcgcggcaacgcgaaagacgtctggcgtcaggcatggcagggtgagtatgggcgtagcgctacgttgccatactggtatttgcgagagatctttattcagaaaccggaggtaatctttgatgatgtcgtgactaatatgagcaaccaaagtgttgttaagagaggagacgtcgataatattattttcacaatttaataacgccatatggttagctttaaggctaataggttctttcccattcacccttatccagacatctttttcagtcaataaaacaatacaaggttggtcgctgcaaatcctcatacatgtactcctgagtgcaaataaaagaccagttctcgctaaagcaaagcgataccgggaaatggttatataattgtatgatgaatataaacatgcataaaaataacgagttttactaatattacaaatttttatagtaatttctcatgtacatatttttttacaggataaataacaggcaaaaaaaagcgcggggtggggccgcgcaaaaagtatgacatttttgtttgcagcaatttttatgaaaacgttgccatactcaaaaggcctaaggccaggcggcgtaatgttatttaaacaattacgccttcagcggaatagtggttacgctttcacgcacataacgtggtaaataccgtcaataatttcagtcccttcagtttcgtgttcaaatccagggaaatggtggtcccaggattgcagcgagcgtaaataacttacttgcggactgtttttatcgccgaagttttcaccagacagcagcatcgggattcctggcggatacgggataactgagtttgccgcgatgcgtcctggcagattttcaatggataccagttcgacattgttgtcgacaatcgcgttgtacgcttcacgcggggtgatttccgccatcggcaggccggaataggcttcgttcaaccgtgcgccagggttgttttctttcagccaggcaaacatggtgtcacccagatcgtgaatccccatgttcgcgtaagtgtcaggatattgttcaacaagttccggcatcacctgcgccagcggtgtgttggcgtcatagtggcgtttgaaggagcaaagggtgttaaccagagtcccccatttcccacgggttacgcccatagagaacaggaacataatttggaagtcagtggtgcgggtaggcacaatgccgtggcgaccaagccaggcagtgaccagcgccgccggaacaccggtttcttccagttcaccatcttcacccattcccggagcaaggatgctgactttaattgggtcgagcatactccagttatccggaatatctttgaagccgtgccagctttcgcccggatgcattacccagcagtcctgaacggtggtcagcagtttggttggtgcgtcagcaaagtcataggttttgccggtttgtgggtcggtgacgacttctttgttccacggtttgaagaaccagctaccgtcagcggtgaactctttatatagccgcgccatcgcctgacggaaatcaaccgcttcgtcaatcacttcctgtgtcagtgacaggccgctgttgccgtccatcatcgacaccgccacgtcgttggatgcgcagatggcatacagcggggaggtggtggcatgcatcatgtaggcctggttgaagcgggagaagttaatcgccccacgaccttcacgtacatgaatataagaagcctgtgacagcgcattcagcagtttgtgggtggagtgggtggcgaaaacggtaggaccgttgtgatcgccaggttcgccgcgcatggcatagtgatcggctgagatcgtgttgaaacgttcatagccgtactaggcatcggcaaagtgcagacgatcgcaggttttatccagcagatcctgggcatctttagcgttataacacacgccgtcataggtgcagttggtcaccacgcagtaagacggtttttgcccggctttgtctttggtcagcgggctttcactgattttcttctgcaaggtttcaggttgcatttcctgcggatagattggcccgataatgccgtagcggttgcggcttggcaccatatagaccggtttcgcgcctgtcagcatcaaaccttgttcgatggatttatggcagttacggtcaacgaccacgacatcgttatcggtcatgcaagcctgcatgatggtgcggttagagccggaagtaccgacgactaccgaccaggagcgatcggcaccaaatacgcgtgcggcatatttttcgctttcgccaaatgcgccagtatggtcaagcaaagaaccgagggaagttcgttcgatgcccatgtcggtgcggaacagattttcaccatagtagtcatggtagaaacgtccggcgggtgttttggtaaaaccaacgccgccctggtggcctggcgctgcccaggaatattcatggatgtcactatatttcatcagcgcgctgaacagtggcggcaacagctgctggcggtagcgggtcatcgcggcaacggcgcgtccggcgataaagtcggcggtatcttccagaatccaggcgaattcatcgacaagctccagcagatcccggtccattgcggcgagggctttttcccgatcgcccaacaggaagaccggcacgttttgttggcgctcatgaagcttaccgatcaattgtctgacgttttgatgttcgtccggatgttccatttgatagctgaacatcaggcagtcaatggcttcgtttgaagagagaatggcaaaaccatcatcaaaggaggtggatttaatcacggtaacattttgctggcttaaagcatctgccagacgctcaacggcgttaccgacccaggtgtcttgatggagaaactcgctttcaacaattaatactttcatcattgcttacccggttatgaaggaatcttcgttgcgggcaagtatcttccggccttttcgggctgtaaagcgcgtgaaaaacaaacatttttgaaatatttagttttataaacaatacgttatgtgattattttaaattattttcactgcttattatcgacggctaaactatttttttggctgatactgatatcgtctttagccgggaaacgtctggcggcgctgttggctaagtttgcggtattgttgcggcgacatgccgacatatttgccgaacgtgctgtaaaaacgactacttgaacgaaagcctgccgtcagggcaatatcgagaatacttttatcggtatcgctcagtaacgcgcgaacgtggttgatgcgcatcgcggtaatgtactgtttcatcgtcaattgcatgacccgctggaatatccccattgcatagttggcgttaagtttgacgtgctcagccacatcgttgatggtcagcgcctgatcatagttttcggcaataaagcccagcatctggctaacataaaattgcgcatggcgcgagacgctgtttttgtgtgtgcgcgaggttttattgaccagaatcggttcccagccagagaggctaaatcgcttgagcatcaggccaatttcatcaatggcgagctggcgaatttgctcgttcggactgtttaattcctgctgccagcggcgcacttcaaacgggctaagttgctgtgtggccagtgatttgatcaccatgccgtgagtgacgtggttaatcaggtctttatccagcggccaggagagaaacagatgcatcggcagattaaaaatcgccatgctctgacaggttccggtatctgttagttggtgcggtgtacaggcccagaacagcgtgatatgaccctgattgatattcactttttcattgttgatcaggtattccacatcgccatcgaaaggcacattcacttcgacctgaccatgccagtggctggtgggcatgatatgcggtgcgcgaaactcaatctccatccgctggtattccgaatacagcgacagcgggctgcgggtctgtttttcgtcgctgctgcacataaacgtatctgtattcatggatggctctctttcctggaatatcagaattatggcaggagtgagggaggatgactgcgagtgggagcacggttttcaccctcttcccagagaggcgaggggagcgtccgagcatcatgaggccgaaaactctgcttttcaggtaacttattaccataaactcagatttactgctgcttcacgcaggatctgagtttatgggaatgctcaacctggaagccggaggttttctgcagattcgcctgccatgatgaagttattcaagcaagccaggagatctgcatgatgactgcacccaaaattacatttatcggcgctggttcgacgattttcgttaaaaatattcttggtgatgtgttccatcgcgaggcgctgaaaacggcgcatattgccctgatggacattgatcccacccgcctggaagagtcgcatattgtggtgcgtaagcttatggattcagcaggggccagcggcaaaatcacctgccacacccaacagaaagaagccttacatgatgccgattttgtcgtggtggcatttcagattggcggttatgaaccttgcacggtgactgatttcgaggtctgtaagcggcatggtctggaacaaaccattgccgatacgttggggccgggcggtattatgcgcgcgctacgtaccattccgcatctgtggcaaatttgcgaggacatgacggaagtctgccccgatgccaccatgctcaactatgttaacccaatggcgatgaatacctgggcgatgtatgcccgctatccgcatatcaaacaggtcgggctgtgccattcggtgcagggaacggcggaagagctggcgcgtgacctcaatatcgacccagctacgctgcgttaccgttgcgcaggtatcaaccatatggcgttttacctggagctggagcgcaaaaccgccgacggcagttatgtgaatctctacccggaactgctggcggcttatgaagcagggcaggcaccgaagccgaatattcatggcaatactcgctgccagaatattgtgcgctacgaaatgttcaaaaagctgggctacttcgtcacggaatcgtcagaacattttgctgagtacacaccgtggtttattaagccaggtcgtgaggatttgattgagcgttataaagtaccgctggatgagtacccgaaacgctgcgtcgagcagctggcgaactggcataaagagctggaggagtataaaaacgcctcccggattgatattaaaccgtcacgggaatatgccagcacaatcatgaacgctatctggactggcgagccgagtgtgatttacggcaacgtccgtaacgatggtttgattgataacctgccacaaggatgttgcgtggaagtagcctgtctggttgatgctaatggcattcagccgaccaaagtcggtacgctaccttcgcatctggccgccctgatgcaaaccaacatcaacgtacagacgctgctgaccgaagctattcttacggaaaatcgcgaccgtgtttaccacgccgcgatgatggacccgcatactgctgccgtgctgggcattgatgaaatatatgctcttgttgacgacctgattgccgcccacggcgactggctgccaggctggttgcaccgttaaaacgcgactaaacgctactgcgccgggggatttattccggcgcacacctctgacgataccaataacagaaggcgggcgttggtaacagcgacccgataccctatgagcatttcaatgactacaaaactcagttatggatttggagcgttcgggaaggattttgcgatcggcattgtgtatatgtacctcatgtattactacaccgatgtcgttgggctgtctgtgggtttggtcggtactttgtttctggtggcgaggatctgggatgctattaacgatccgattatgggatggattgtaaatgctacgcgatcgcgatggggtaagttcaaaccctggatcctgatcggtacgttggcaaactctgtaatcttatttctcctctttagtgcgcatctgtttgaaggtactactcagattgtctttgtttgcgtgacctacatcctctggggcatgacttacaccattatggatattcccttctggtcgctggttccaaccatcacgctcgataaacgtgagcgcgaacaactggttccttatccgcgtttttttgccagtctggcaggctttgttacggcaggtgtgacgctaccatttgttaattatgtcggcggtggcgatcggggatttggctttcagatgttcactctggtactaatcgccttttttattgtttcaaccatcatcactctgcgcaatgtgcatgaagtcttttcgtcagacaatcaaccgtctgctgaaggaagccatctgacacttaaagccatcgttgcgctaatttataaaaacgatcagctttcatgcctcttgggtatggctcttgcttataatgtagccagcaacattattaccggatttgctatctattatttctcatatgttatcggtgatgcggatttgttcccctattatctgtcgtatgcgggagctgctaacctggtgacgttagtattcttcccacgcttagttaaatcattatcccgacgcattttatgggccggagcatctattcttccggtgttaagctgtggtgttctggatttgcccctatatttccagacatctgttatcacttaacccattacaagcccgctgccgcagatattcccgtggcgagcgataacccagcgcactatg
